United States Patent Application Publication US 2024/0327476 A1 - sequence listing, part 4

SEQ ID NO: 3210 - DNA, 7559 bp, Homo sapiens
  source 1..7559: mol_type = unassigned DNA
tgccggggcaatgtcccgccgcaaacagggcaacccgcagcacttgtcccagagggagctcatcaccccagaggctgaccatgtggaggccgccatcctcgaagaagacgagggtctggagatagaggagccaagtggcctggggctgatggtgggtggccccgaccctgacctgctcacctgtggccagtgtcaaatgaacttccccttgggggacatcctggtttttatagagcacaaaaggaagcagtgtggcggcagcttgggtgcctgctatgacaaggccctggacaaggacagcccgccaccctcctcacgctccgagctcaggaaagtgtccgagccggtggagatcgggatccaagtcacccccgacgaagatgaccacctgctctcacccacgaaaggcatctgtcccaagcaggagaacattgcagggccgtgcaggcctgcccagctgccagcggtggcccccatagctgcctcctcccaccctcactcatccgtgatcacttcacctctgcgtgccctgggcgctctcccgccctgcctccccctgccgtgctgcagcgcgcgcccggtctcgggtgacgggactcagggtgagggtcagacggaggctccctttggatgccagtgtcagttgtcaggtaaagatgagccttccagctacatttgcacaacatgcaagcagcccttcaacagcgcgtggttcctgctgcagcacgcgcagaacacgcacggcttccgcatctacctggagcccgggccggccagcagctcgctcacgccgcggctcaccatcccgccgccgctcgggccggaggccgtggcgcagtccccgctcatgaatttcctgggcgacagcaaccccttcaacctgctgcgcatgacgggccccatcctgcgggaccacccgggcttcggcgagggccgcctgccgggcacgccgcctctcttcagtcccccgccgcgccaccacctggacccgcaccgcctcagtgccgaggagatggggctcgtcgcccagcaccccagtgccttcgaccgagtcatgcgcctgaaccccatggccatcgactcgcccgccatggacttctcgcggcggctccgcgagctggcgggcaacagctccacgccgccgcccgtgtccccgggccgcggcaaccctatgcaccggctcctgaaccccttccagcccagccccaagtccccgttcctgagcacgccgccgctgccgcccatgccccctggcggcacgccgcccccgcagccgccagccaagagcaagtcgtgcgagttctgcggcaagaccttcaagttccagagcaatctcatcgtgcaccggcgcagtcacacgggcgagaagccctacaagtgccagctgtgcgaccacgcgtgctcgcaggccagcaagctcaagcgccacatgaagacgcacatgcacaaggccggctcgctggccggccgctccgacgacgggctctcggccgccagctcccccgagcccggcaccagcgagctggcgggcgagggcctcaaggcggccgacggtgacttccgccaccacgagagcgacccgtcgctgggccacgagccggaggaggaggacgaggaggaggaggaggaggaggaggagctgctactggagaacgagagccggcccgagtcgagcttcagcatggactcggagctgagccgcaaccgcgagaacggcggtggtggggtgcccggggtcccgggcgcggggggcggcgcggccaaggcgctggctgacgagaaggcgctggtgctgggcaaggtcatggagaacgtgggcctaggcgcactgccgcagtacggcgagctcctggccgacaagcagaagcgcggcgccttcctgaagcgtgcggcgggcggcggggacgcgggcgacgacgacgacgcgggcggctgcggggacgcgggcgcgggcggcgcggtcaacgggcgcgggggcggcttcgcgccaggcaccgagcccttccccgggctcttcccgcgcaagcccgcgccgctgcccagccccgggctcaacagcgccgccaagcgcatcaaggtggagaaggacctggagctgccgcccgccgcgctcatcccgtccgagaacgtgtactcgcagtggctggtgggctacgcggcgtcgcggcacttcatgaaggaccccttcctgggcttcacggacgcacgacagtcgcccttcgccacgtcgtccgagcactcgtccgagaacggcagcctgcgcttctccacgccgcccggggacctgctggacggcggcctctcgggccgcagcggcacggccagcggaggcagcaccccgcacctgggcggcccgggccccgggcggcccagctccaaggagggccgccgcagcgacacgtgcgagtactgcggcaaggtgttcaagaactgcagcaacttgacggtgcaccggcggagccacaccggcgagcggccttacaagtgcgagctgtgcaactacgcgtgcgcgcagagcagcaagctcacgcgccacatgaagacgcacgggcagatcggcaaggaggtgtaccgctgcgacatctgccagatgcccttcagcgtctacagcaccctggagaaacacatgaaaaagtggcacggcgagcacttgctgactaacgacgtcaaaatcgagcaggccgagaggagctaagcgcgcgggccccggcgccccgcacctgtacagtggaaccgttgccaaccgagagaatgctgacctgacttgcctccgtgtcaccgccaccccgcaccccgcgtgtccccggggcccaggggaggcggcactccaacctaacctgtgtctgcgaagtcctatggaaacccgagggttgattaaggcagtacaaattgtggagccttttaactgtgcaataatttctgtatttattgggttttgtaatttttttggcatgtgcaggtactttttattattattttttctgtttgaattcctttaagagattttgttgggtatccatcccttctttgttttttttttaacccggtagtagcctgagcaatgactcgcaagcaatgttagaggggaagcatatcttttaaattataatttggggggaggggtggtgctgcttttttgaaatttaagctaagcatgtgtaatttcttgtgaagaagccaacactcaaatgacttttaaagttgtttactttttcattccttccttttttttgtcctgaaataaaaagtggcatgcagttttttttttaattattttttaattttttttttggtttttgtttttggggtggggggtgtggatgtacagcggataacaatctttcaagtcgtagcactttgtttcagaactggaatggagatgtagcactcatgtcgtcccgagtcaagcggccttttctgtgttgatttcggctttcatattacataagggaaaccttgagtggtggtgctgggggaggcaccccacagactcagcgccgccagagatagggtttttggagggctcctctgggaaatggcccgacagcattctgaggttgtgcatgaccagcagatactatcctgttggtgtgccctggggtgccatggctgctattcgctgtagattaggctacataaaatgggctgagggtacctttttggggagatggggtggcctgcagtgacacagaaaggaagaaactagcggtgttcttttaggcgttttctggcttgacggcttctctctttttttaaatcacccccaccacataaatctcaaatcctatgttgctacaaggggtcatccatcatttcccaagcagacgaatgccctaattaattgaagttagtgttctctcatttaatgcacactgatgatattgtagggatgggtggggtggggatcttgcaaatttctattctcttttactgaaaaagcaggggatgagttccatcagaaggtgcccagcgctacttcccaggtttttattttttttttcctatctcattaggttggaaggtactaaatattgaactgttaagattagacatttgaattctgttgacccgcactttaaagcttttgtttgcatttaaattaaatggcttctaaacaagaaattgcagcatattcttctctttggcccagaggtgggttaaactgtaagggacagctgagattgagtgtcagtattgctaagcgtggcattcacaatactggcactataaagaacaaaataaaataataatttataggacagtttttctactgccattcaatttgatgtgagtgccttgaaaactgatcttcctatttgagtctcttgagacaaatgcaaaactttttttttgaaatgaaaagactttttaaaaaagtaaaacaagaaaagtacattctttagaaactaacaaagccacatttactttaagtaaaaaaaaaaaaaattctggttgaagatagaggatatgaaatgccataagacccaatcaaatgaagaaataaacccagcacaaccttggacatccattagctgaattatcctcagccccttttgtttttgggacaacgctgcttagatatggagtggaggtgatttactgctgaattaaaactcaagtgacacaagttacaagttgatatcgttgaatgaaaagcaaaacaaaaacaattcaggaacaacggctaattttttctaaagttaaatttagtgcactctgtcttaaaaatacgtttacagtattgggtacatacaagggtaaaaaaaaaattgtgtgtatgtgtgttggagcgatctttttttttcaaagtttgcttaataggttatacaaaaatgccacagtggccgcgtgtatattgttttcttttggtgacggggttttagtatatattatatatattaaaatttcttgattactgtaaaagtggaccagtatttgtaataatcgagaatgcctgggcattttacaaaacaagaaaaaaaatacccttttcttttccttgaaaatgttgcagtaaaatttaaatggtgggtctataaatttgttcttgttacagtaactgtaaagtcggagttttagtaaatttttttctgccttgggtgttgaatttttatttcaaaaaaaatgtatagaaacttgtatttggggattcaaaggggattgctacaccatgtagaaaaagtatgtagaaaaaaagtgcttaatattgttattgctttgcagaaaaaaaaaaaatcacatttctgacctgtacttatttttctcttcccgcctccctctggaatggatatattggttggttcatatgatgtaggcacttgctgtatttttactggagctcgtaattttttaactgtaagcttgtccttttaaagggatttaatgtacctttttgttagtgaatttggaaataaaaagaaaaaaaaaacaaaaacaaacaggctgccataatatatttttttaatttggcaggataaaatattgcaaaaaaaacacatttgtatgttaagtcctattgtacaggagaaaaagggttgtttgacaacctttgagaaaaagaaacaaaaggaagtagttaaatgctttggttcacaaatcatttagttgtatatattttttgtcggaattggcctacacagagaaccgttcgtgttgggcttctctctgaacgccccgaaccttgcatcaaggctccttggtgtggccacagcagaccagatgggaaattatttgtgttgagtggaaaaaaatcagtttttgtaaagatgtcagtaacattccacatcgtcctccctttctctaagaggccatctctaagatgtcagatgtagaggagagagagcgagagaacatcttccttctctaccatcactcctgtggcggtcaccaccaccacctctcccgcccttaccagcagaaagcaatgcaaactgagctgctttagtccttgagaaattgtgaaacaaacacaaatatcataaaaggagctggtgattcagctgggtccaggtgaagtgacctgctgttgagaccggtacaaattggatttcaggaaggagactccatcacagccaggacctttcgtgccatggagagtgttggcctcttgtctttcttccctgctttgctgctttgctctctgaaacctacattccgtcagtttccgaatgcgagggcctgggatgaatttggtgcctttccatatctcgttctctctccttcccctgcgtttcctctccatccttcatcctccattggtcctttttttttctttcattttttatttaatttcttttcttcctgtctgttcctcccctaatcctctattttatttttattttttgtaaagccaagtagctttaagataaagtggtggtcttttggatgagggaataatgcatttttaaataaaataccaatatcaggaagccattttttatttcaggaaatgtaagaaaccattatttcaggttatgaaagtataaccaagcatccttttgggcaattccttaccaaatgcagaagcttttctgttcgatgcactctttcctccttgccacttacctttgcaaagttaaaaaaaaggggggagggaatgggagagaaagctgagatttcagtttcctactgcagtttcctacctgcagatccaggggctgctgttgcctttggatgccccactgaggtcctagagtgcctccagggtggtcttcctgtagtcataacagctagccagtgctcaccagcttaccagattgccaggactaagccatcccaaagcacaagcattgtgtgtctctgtgactgcagagaagagagaattttgcttctgttttgtgtttaaaaaaccaacacggaagcagatgatcccgagagagaggcctctagcatgggtgacccagccgacctcaggccggtttccgcactgccacaactttgttcaaagttgcccccaattggaacctgccacttggcattagagggtctttcatggggagagaaggagactgaattactctaagcaaaatgtgaaaagtaaggaaatcagcctttcatcccggtcctaagtaaccgtcagccgaaggtctcgtggaacacaggcaaacccgtgattttggtgctccttgtaactcagccctgcaaagcaaagtcccattgatttaagttgtttgcatttgtactggcaaggcaaaatatttttattaccttttctattacttattgtatgagcttttgttgtttacttggaggttttgtcttttactacaagtttggaactatttattattgcttggtatttgtgctctgtttaagaaacaggcacttttttttattatggataaaatgttgagatgacaggaggtcatttcaatatggcttagtaaaatatttattgttcctttattctctgtacaagattttgggcctctttttttccttaatgtcacaatgttgagttcagcatgtgtctgccatttcatttgtacgcttgttcaaaaccaagtttgttctggtttcaagttataaaaataaattggacatttaacttgatctccaaa

SEQ ID NO: 3211 - DNA, 2038 bp, Homo sapiens
  source 1..2038: mol_type = unassigned DNA
cgggcggggcgcagggcaggctgcacctcagagcggcgggagcagcggcgggtccaggaaacccctggggcgtacgggtggccccgggggggccgggggcggggaggcgggcggccggcaccgccccggccgacaaaagtcccttcagttcagccggctgcaggggaagtcccggcgcccggcgaaaccaccctcccgtgcagccgagcccagccgctctccggccgccgtccccggcggccccatgccccgatgccccgcgggggccatggacgaggggcccgtggacctgcgcacccggcccaaggccgccggactcccgggcgccgcgctgccgctccgcaagcgcccgctgcgcgcgccctccccggagcccgccgctccccgcggcgctgcgggccttgtcgtccccctggaccctctgcgcggcggctgcgacctgccggcggtccccgggcccccccacggcctggcccggccggaggcgctttactaccccggagccttactgcctttgtaccccactcgggccatgggctccccgtttcctctggtgaacctgcctacacccctataccccatgatgtgccccatggaacaccccctttctgctgacatcgccatggccacccgtgcagatgaggacggagacacgcctctccatattgctgtggtgcagggtaacctgccagctgtgcaccggctggtcaacctcttccagcaggggggccgggagctcgacatctacaacaacctacggcagacaccgctccacctggctgtgatcaccacattaccgtctgtggtccggctcctggtgacagctggtgccagccccatggcgctggaccgccatggccagacggccgctcacctggcgtgcgagcaccgcagcccgacctgcctgcgagccctgctggacagcgcagctccgggcacgttggacctggaggcccgcaattatgacgggctcaccgccctgcacgtggcagtgaacaccgagtgccaagaaaccgtgcagctcttgctagagcgcggtgccgacatcgacgcagtggacattaagagcggccgctccccgctcatccacgccgtggaaaacaacagccttagcatggtgcagctgctgctgcagcacggcgccaacgtgaacgcgcaaatgtactccggcagctccgccctgcactcagcgtccggccgcgggctcctcccgctggtgcgcacgctggtccgcagcggcgctgacagcagcctcaagaactgccacaacgacacgccgctcatggtggcgcgcagccgcagggtcatcgacatcctgagggggaaggccacccggcctgcttccacctcccagccagacccctcccctgaccggagcgccaacacctcccccgagagcagcagccgcctcagctccaatggtcttctctccgcatcaccatcctcctcaccctcccagtctccccccagggacccccctggattccccatggctcctcccaatttcttccttccttccccatctccacccgccttcctgccctttgctggggtcctccgaggccctggccggccggtgcccccctccccagctccaggaggcagctgagggggatgggggggcagatcttggactcatgaggaggggcccccctgccctgtggggtcaacccttctggaaactgtgaagatctcactctgccccccccccccatcttcgggaccaggatttgcacagaagcacatgcacctacccatacaccccctcttctgagcacagatgttcccccatctcgctccctcccaggactctgaccccagcattctcaggcaccagtccctgtccggaatgccacccacatcttccatttccatgtcccctcccagagctggtggacccagggaacagccactcccctccactctctaccagataactgaggaggggagaggtgggccgtaacgggcacggatcacgatgtaaattattaagcattttggttggatttcttttgtaataaactatttttgtaccata

SEQ ID NO: 3212 - DNA, 1714 bp, Homo sapiens
  source 1..1714: mol_type = unassigned DNA
aaactgctccccgctcctgcagcaccggcctcggtcgcgctgactctggcctggtgtccgtgtctcttgctatctctctttctctcaagatctctgcgcctgtctccatgtctctttctctctgtgcacctaggattttccgagcacccaccccggtgccccgcgggccccggctgggggcagggcccccaacgagtgcagagacacaatcagtggagcgctccccaccctcaccccacccccagcccctttagacccacagctgatgaggcacgtggagtggcagagatggaagaggggagggagaggaatcgttcctggccgcctgccgagtgccagtccctgccccgggtgcgtctcttcactcccactaaggaggaaacggctcagagaggggaagtgtttggccaaggtcacccagcgagagccttactgcctttgtaccccactcgggccatgggctccccgtttcctctggtgaacctgcctacacccctataccccatgatgtgccccatggaacaccccctttctgctgacatcgccatggccacccgtgcagatgaggacggagacacgcctctccatattgctgtggtgcagggtaacctgccagctgtgcaccggctggtcaacctcttccagcaggggggccgggagctcgacatctacaacaacctacggcagacaccgctccacctggctgtgatcaccacattaccgtctgtggtccggctcctggtgacagctggtgccagccccatggcgctggaccgccatggccagacggccgctcacctggcgtgcgagcaccgcagcccgacctgcctgcgagccctgctggacagcgcagctccgggcacgttggacctggaggcccgcaattatgacgggctcaccgccctgcacgtggcagtgaacaccgagtgccaagaaaccgtgcagctcttgctagagcgcggtgccgacatcgacgcagtggacattaagagcggccgctccccgctcatccacgccgtggaaaacaacagccttagcatggtgcagctgctgctgcagcacggcgccaacgtgaacgcgcaaatgtactccggcagctccgccctgcactcagcgtccggccgcgggctcctcccgctggtgcgcacgctggtccgcagcggcgctgacagcagcctcaagaactgccacaacgacacgccgctcatggtggcgcgcagccgcagggtgagccggggcagctgtggacatgccccttgcacacgtgtgtccgcgggctggttgcaggcgagtgtgccagagcgcagaggagtgagggtgtctgtgccgttgcgtggaggggagtgggtgagcctctgaaagcgcgggtgtgagttccagaaatgaggagagactggcaccaagaaaaaaagtgccttgcccatcttttcatactgagaagtggagaggccaccacctggatccagtgagctaggagggatgggagagaggactgtgaggcatgggtggctctatggtcacgcccatcttcctacaggtcatcgacatcctgagggggaaggccacccggcctgcttccacctcccagccagacccctcccctgaccggagcgccaacacctcccccgagagcagcagccgcctcagctccaatggtcttctctccgcatcaccatcctcctcaccctcccagtctccccccagggacccccct

SEQ ID NO: 3213 - DNA, 3525 bp, Homo sapiens
  source 1..3525: mol_type = unassigned DNA
gagaccccgccccccttaagaagagaagccgcggcccctgcaggacgggggcctgtgtcgctatgggttcccccgccgccccggagggagcgctgggctacgtccgcgagttcactcgccactcctccgacgtgctgggcaacctcaacgagctgcgcctgcgcgggatcctcactgacgtcacgctgctggttggcgggcaacccctcagagcacacaaggcagttctcatcgcctgcagtggcttcttctattcaattttccggggccgtgcgggagtcggggtggacgtgctctctctgcccgggggtcccgaagcgagaggcttcgcccctctattggacttcatgtacacttcgcgcctgcgcctctctccagccactgcaccagcagtcctagcggccgccacctatttgcagatggagcacgtggtccaggcatgccaccgcttcatccaggccagctatgaacctctgggcatctccctgcgccccctggaagcagaacccccaacacccccaacggcccctccaccaggtagtcccaggcgctccgaaggacacccagacccacctactgaatctcgaagctgcagtcaaggcccccccagtccagccagccctgaccccaaggcctgcaactggaaaaagtacaagtacatcgtgctaaactctcaggcctcccaagcagggagcctggtcggggagagaagttctggtcaaccttgcccccaagccaggctccccagtggagacgaggcctccagcagcagcagcagcagcagcagcagcagtgaagaaggacccattcctggtccccagagcaggctctctccaactgctgccactgtgcagttcaaatgtggggctccagccagtaccccctacctcctcacatcccaggctcaagacacctctggatcaccctctgaacgggctcgtccactaccgggaagtgaatttttcagctgccagaactgtgaggctgtggcagggtgctcatcggggctggactccttggttcctggggacgaagacaaaccctataagtgtcagctgtgccggtcttcgttccgctacaagggcaaccttgccagtcatcgtacagtgcacacaggggaaaagccttaccactgctcaatctgcggagcccgttttaaccggccagcaaacctgaaaacgcacagccgcatccattcgggagagaagccgtataagtgtgagacgtgcggctcgcgctttgtacaggtggcacatctgcgggcgcacgtgctgatccacaccggggagaagccctacccttgccctacctgcggaacccgcttccgccacctgcagaccctcaagagccacgttcgcatccacaccggagagaagccttaccactgcgacccctgtggcctgcatttccggcacaagagtcaactgcggctgcatctgcgccagaaacacggagctgctaccaacaccaaagtgcactaccacattctcggggggccctagctgagcgcaggcccaggccccacttgcttcctgcgggtgggaaagctgcaggcccaggccttgcttccctatcaggcttgggcataggggtgtgccaggccactttggtatcagaaattgccaccctcttaatttctcactggggagagcaggggtggcagatcctggctagatctgcctctgttttgctggtcaaaacctcttccccacaagccagattgtttctgaggagagagctagctaggggctgggaaaggggagagattggagtcctggtctccctaagggaatagccctccacctgtggcccccattgcattcagtttatctgtaaatataatttattgaggcctttgggtggcaccggggccttcattcgattgcatttcccactcccctcttccacaagtgtgattaaaagtgaccagaaacacagaaggtgagatcacagctctgctggcagagattactagcccttggctctctcgtttggcttgggtattttatattatttctgtcataacttttatctttagaattgttctttctcctgtttgtttgcttgttagtttgtttaaaatggaaaaaggggttctctgtgttctgcccctgtaattctaggtctggaacctttatttgttctagggcagctctgggaacatgcgggattgtggaattgggtcaggaaccctctctggtattctggatgttgtaggttctctagcagtctagaaatggatacagacatttctctgttcttcaagggtgataggaaccattatgttgagcccaaaatggaagtaataataaatgcctcctggaggctgtgggtgtgggggattctgtatctggattccgtatcactccaagtggaggctggcaggtttttctgcaagatggtccagaatctaaaatgtcccattaatctggtcacttgggtttggctctgctgtatccatctatagtggtagagacccaccagggctcaagtggagtccatcatcctcccacgggggcctgttcttagcactgagttgatcgctccatgggggagagatcagacattccttatcagagatgatgtgaccttttctgactctgcccagtctctatgaatgttatggcctagggaagaatcatgaaactctttagcttgattagatggtaaacagtgttaacccatcctttactacagaggcatatgggtttgaatgttacctggggttctctctattgagttgagccccttcttcctttagtgggttttggacatcttctggcaagtgtccagatgccagaaccttcttttcctctagaagggatggtgcttggtaaccttaccttttaaaagctgggtctgtgacctggtcttcccatccctgcattcctgtctggaaccagtgaatgcattagaaccttccataggaaaagaaaaggggctgagttccattctgggtttgctgtagtttggttgggattattgttggcattacagatgtaaaagattgactagcccataggccaaaggcctgttctagttgaccaagtttcaagtaggattaagaggttggttgaggggtgcagtttctggtgtaggccaggtaggtagaaagtgaggaacagggttgcctcttggctgggtggagtctctgaaatgttagaagaagcgctgaagccttgattgatagttctgccccttgttgccctggggcttatctgattatgggacgagggtagaaagtaagaagcacttttgaatttgtggggtagaacttcaacaataagtcagttctagtggctgtcgcctggggactagtgagaaagctactcttctccctcttccctctttctccccatggccccactgcagaattaaagaaggaagaagggaaggcggaggagtctataagaaggaatcatgatttctatttagcagattggatgggcaggtggagaatgcctgggggtagaaatgttagatcttgcaacatcagatccttggaataaagaagcctctctgtgc

SEQ ID NO: 3214 - DNA, 475 bp, Homo sapiens
  source 1..475: mol_type = unassigned DNA
tgctcatcggggctggactccttggttcctggggacgaagacaaaccctataagtgtcagctgtgccggtcttcgttccgctacaagggcaaccttgccagtcatcgtacagtgcacacaggggaaaagccttaccactgctcaatctgcggagcccgttttaaccggccagcaaacctgaaaacgcacagccgcatccattcgggagagaagccgtataagtgtgagacgtgcggctcgcgctttgtacaggtggcacatctgcgggcgcacgtgctgatccacaccggggagaagccctacccttgccctacctgcggaacccgcttccgccacctgcagaccctcaagagccacgttcgcatccacaccggagagaagccttaccacgaaccagtgacttcatgaagtttctccggagccacctgcatcctgctgctctgaagtcacttcctgcctgaggtgtggaggctgc

SEQ ID NO: 3215 - DNA, 2581 bp, Homo sapiens
  source 1..2581: mol_type = unassigned DNA
actgggccaggcgcgcggcggccccgggctttgtgtgtgtgtgtatgtgtgtgtgtgtgtgtgtgtgtgtgtgagtgtgtgcgtgtgagagtgcgagtgtctgtgcgcgagtgagtgagcggcgggcgggcgcgagtgtggccgccgcggagcgcgagcaggacccggcgggcgcgctccccagcctccgtctccccgccggaaccatgtcgggcaggtcggttcgagccgagacgaggagccgggccaaagatgatatcaagagggtcatggcggcgatcgagaaagtgcgcaaatgggagaagaaatgggtgaccgttggtgacacatccctacgaatctacaaatgggtccctgtgacggagcccaaggttgatgacaaaaacaagaataagaaaaaaggcaaggacgagaagtgtggctcagaggtgaccactccggagaacagttcctccccagggatgatggacatgcatgacgataacagcaaccagagctccatcgcagatgcctcccccatcaaacaggagaacagcagcaactccagccccgctccagagcccaactcggctgtgcccagcgacggcaccgaggccaaggtggatgaggcccaggctgatgggaaggagcacccaggagctgaagatgcttctgatgagcagaattcacagtcctcgatggaacattcgatgaacagctcagagaaagtagatcggcagccgtctggagactcgggtctggccgcagagacgtctgcaatctctcaggatttggaaggagtgccaccctctaaaaagatgaaactggaggcctctcaacaaaactccgaagagatgtagacgatgctttaaagcctccgatccatgttccatggaaggtacatcagcaattaattctagagcaactttgccccagcgattcctcttgggtgcgaacagaactactaacgtttcaagtttaccaagtgcaaatccaagaagacccagaacggcgtcacttctcagacactgaagaactctgctgtgaagcaaaacactcaaacctttaagggactgtccttggggaggcaggcggggctgacagctcaggagtgtctgcacactgtctcggaagccaggattccatttgtgttgctgctgtattttccccccacttctctatgtaacgatataagctatcggagggtggtaccgatcaggaacgctttttggcggggctttccactgttcaaccgattccttccgctttctttttttgtgccttgtgcccttgaggtgacctctggcatgtatcctggtggttcttacatccccctctgcaaagtgccctcttggtttggttcgggcggcggctgccaccctactcaccgctctcctccctgccccaggacttcatcggagcaggcagggtggagcgaaggagctccttagcccacctggtttgcaggtgcagggggaccttaggcacgccccaagcaccaggcaccagggcccaaggacgcgcaggtgttggggcacagtccccaagggctcggccccttggatcaggctgggcactcgctgtgctctcccctccttggggcgtttaggactgggcgtctccaagcccaccatggcccagatggacgtgcaaagcccttggaattttctggcacttcctctctattgcccccaccaccaccacccccatcactgctttctcccagacctccgaatacgaaatggcttctctggctgactgcaaggctgtctccttaaggcactgagtgggccggggaggctgggagccggcggcaggattagctggtgctgaactttctctcataggacgtcgcttggatttcaaatccacggtcacctgctgccctttgcctcccccgacgccccagcctgtgccccggagaggcaggatcgcagtggtcagaatccacgtgctttcctattctcaggctgttctgactctgagccaacagctggaccgtgtctcatccccagaacatgccgtctgtccccaccggggagtgggccttgatggccgggcctcgaaggccacaaacaaggcgtcgaggaattggaaagatttgcacaccctccagaaaggagagacgcaatctcccctccctcccatcccccaccttcgctggaacagcttcctctcactgaacggagacgcccccttggacgaactgcctaatcgtttggttctgaggcctggtttgctcttaattaatatatgaactcctcagaccttaaaccttttcctaagctttctttactgcactggagttctgactccctttgagttgtgtgttactgggggtggggtggggtcatgggttttgttgtttttgggggctaattggtgcatattcaggtaccacctttgacgtgtggctctttctcctgaccatcatgggaagtgtctgctggattccattttctaagagtttctgagggtgaggctcttatttttttttttaagggatcctgtctatttcctgcacttcgagaagaatcaaaatgttcctgaatttcaaatacctcatgcaaaatgtctcctgaaataagggaaaaaaaaaaaa

SEQ ID NO: 3216 - DNA, 6245 bp, Homo sapiens
  source 1..6245: mol_type = unassigned DNA
cccagcctagatttctttttattatgatcaaatacacataaaattgaccattgtaaccatttaaaagtgtacaattcagcgtcattaagtacattcacattgttctgcaaccatcaccactatctcattccagaactttcctatcactccgaaaggaaaccccacatccgttagcagtcactcctgctctccctcccccttgcctctggcaaccaccaatctgatatctgtctttatggattcgcctagttgtagatatctcccgcaaatggacttacgcatatttatccttttgtgactggcttctttcacttagcgtgtttcaaggttcacccatgttgtagcatgtattcattcccttttatggctgaataatattccattgtgtggatagacacatttatctgttcctcagtcactatttgaattctgacataatattttcctattttaaattttaagatacatttttttaaagtttcatgtggcccaaagcacatacctattgatctcacatatctctgtgagatctgttttatgacctgctgttgcatattttcccagaaaattctcggaacgattctctgaagtccttctttctctttctcttttttttctttttctttctctctttctttttttgttttgttttgttttattttgttttgttttgtttttttgagattcagttttgctctgttgcccaggctggagtgcaatggcatgatcattgcacctctgcctcccaggttcaagcattttcctgcctcagcctcccgcgtagctcagattacaggcctgcaccaccacgcccagctaatttttgtatttttagtagagacagggtttctccatgttggccaggctggtctcgaactcctgacctcgtgatctgcccacttcggcctccaaagtgctgggattacaggcatgaaccaccgcgcccggccttttttttttttctgagacagggtctcactctgtctcccaggctggagtgcagtggctggatctctgctcactgcaacctccgtctcccaggttcaagcgagtctcctgcctcagactcccgagtagctgcgattacaggagcccaccaccgcgcccggctaatttttgtatttttagtagagacggggtttcacccaccatgttggccaggctggtatcgaactcttaacctcaagtgatccacccgcctcggcctcccaaagtgctggtattacaggcatgagccaccgcgcccggccagtatttgttcttttcttcatttttcacgtcaggagactgcgtttcagaatagtaaaaacaaatgcctaggaaaaggcctgcggtctctccatttccacagtagcgtgttccccaaagaccaaaccctcaggggaaacgtctagaatgagtaacaacttaaggctgcaaccttaaactttcccaggactcagtttccccagctgtgaaatggctgctgtcgggctgtcatctccaggcccggggcgctgacatttgggccactctcggtctccctcttcattctgggcgcgcattagctctggtccggccggttccgctgcagctgaacagcaagatgcggcacccaggttaccctgatcatcgcagatttctccccggggctctgttctgaggcctcaaaagtgctccttgtagatgggaccaggggtcatttgggcagtagcagcgcctggtctcagtctggtactgaagtcaggaatggcttaaggtgaaatcgtggtcctctggtgaagctcagcgaagaccccctcgccttgtttatgacaagagaacttctgggggcgggaggaagagtccctgttacgatgctgatcatcattgagcttttgctgagcagaaaactctttagtactcaaggtcgagagtctctggtggtctgcctggcaccaggcaccttcctacaaccctagttttccaaaaggacaaagcctggggcaggcgacgtcctagctcgcatttgaacagggccgcgggccagcagagatgcgcgatgcccaactctttccaagagcacctcgcgtcccgaaccggtgccttcaactcggagaagtcaagagacccgcaagaaacttgcacgactgcacccgccgccgcgctctgggggctgggcaggggcagctgggctggctcccggggaacgcgacccccccgcgccccgcagaccggctgtctcccatggacccctcggcacctgcagcctccgaggaagggtcagcgcgcgtgtccgcacgcccgcccccaccgcgcgcccagagccgggggtcgccgtgcgcccttcgccacctccccaggagggcgtccggggcgtcccctctgggggcgcaggaggcccgggggcgctgcccggtggccgcggcgcccggaggccgcactgccggcggcggcggcggcgcggctccccctgctctgtgcagctgccgcccggcgcttgcgcactgggccaggcgcgcggcggccccgggctttgtgtgtgtgtgtatgtgtgtgtgtgtgtgtgtgtgtgtgtgagtgtgtgcgtgtgagagtgcgagtgtctgtgcgcgagtgagtgagcggcgggcgggcgcgagtgtggccgccgcggagcgcgagcaggacccggcgggcgcgctccccagcctccgtctccccgccggaaccatgtcgggcaggtcggttcgagccgagacgaggagccgggccaaagatgatatcaagagggtcatggcggcgatcgagaaagtgcgcaaatgggagaagaaatgggtgaccgttggtgacacatccctacgaatctacaaatgggtccctgtgacggagcccaaggttgatgacaaaaacaagaataagaaaaaaggcaaggacgagaagtgtggctcagaggtgaccactccggagaacagttcctccccagggatgatggacatgcatgacgataacagcaaccagagctccatcgcagatgcctcccccatcaaacaggagaacagcagcaactccagccccgctccagagcccaactcggctgtgcccagcgacggcaccgaggccaaggtggatgaggcccaggctgatgggaaggagcacccaggagctgaagatgcttctgatgagcagaattcacagtcctcgatggaacattcgatgaacagctcagagaaagtagatcggcagccgtctggagactcgggtctggccgcagagacgtctgcaatctctcaggtacctcgctcgaggtctcagaggggcagccagatcggccgggagcccattgggttgtcgggggatttggaaggagtgccaccctctaaaaagatgaaactggaggcctctcaacaaaactccgaagagatgtagacgatgctttaaagcctccgatccatgttccatggaaggtacatcagcaattaattctagagcaactttgccccagcgattcctcttgggtgcgaacagaactactaacgtttcaagtttaccaagtgcaaatccaagaagacccagaacggcgtcacttctcagacactgaagaactctgctgtgaagcaaaacactcaaacctttaagggactgtccttggggaggcaggcggggctgacagctcaggagtgtctgcacactgtctcggaagccaggattccatttgtgttgctgctgtattttccccccacttctctatgtaacgatataagctatcggagggtggtaccgatcaggaacgctttttggcggggctttccactgttcaaccgattccttccgctttctttttttgtgccttgtgcccttgaggtgacctctggcatgtatcctggtggttcttacatccccctctgcaaagtgccctcttggtttggttcgggcggcggctgccaccctactcaccgctctcctccctgccccaggacttcatcggagcaggcagggtggagcgaaggagctccttagcccacctggtttgcaggtgcagggggaccttaggcacgccccaagcaccaggcaccagggcccaaggacgcgcaggtgttggggcacagtccccaagggctcggccccttggatcaggctgggcactcgctgtgctctcccctccttggggcgtttaggactgggcgtctccaagcccaccatggcccagatggacgtgcaaagcccttggaattttctggcacttcctctctattgcccccaccaccaccacccccatcactgctttctcccagacctccgaatacgaaatggcttctctggctgactgcaaggctgtctccttaaggcactgagtgggccggggaggctgggagccggcggcaggattagctggtgctgaactttctctcataggacgtcgcttggatttcaaatccacggtcacctgctgccctttgcctcccccgacgccccagcctgtgccccggagaggcaggatcgcagtggtcagaatccacgtgctttcctattctcaggctgttctgactctgagccaacagctggaccgtgtctcatccccagaacatgccgtctgtccccaccggggagtgggccttgatggccgggcctcgaaggccacaaacaaggcgtcgaggaattggaaagatttgcacaccctccagaaaggagagacgcaatctcccctccctcccatcccccaccttcgctggaacagcttcctctcactgaacggagacgcccccttggacgaactgcctaatcgtttggttctgaggcctggtttgctcttaattaatatatgaactcctcagaccttaaaccttttcctaagctttctttactgcactggagttctgactccctttgagttgtgtgttactgggggtggggtggggtcatgggttttgttgtttttgggggctaattggtgcatattcaggtaccacctttgacgtgtggctctttctcctgaccatcatgggaagtgtctgctggattccattttctaagagtttctgagggtgaggctcttatttttttttttaagggatcctgtctatttcctgcacttcgagaagaatcaaaatgttcctgaatttcaaatacctcatgcaaaatgtctcctgaaataagggaaaaaaaaaaaaccacaactttgaaaatcttaatgttgaagttagcaatgccgaaaggtttctgtcttaaaaaaaaaaatccttgtacttatcaattttgccccttaggcagtcagttttgttgagaactgtgtcctgcatcctggcgcagaacctacctgatgcggttcctctccacgcatctcgaggcggcgttacctccagattccgtagagttagagtcacatttttctttgcagcgaaactccatcttggtgagagatgaatttggatatttatttccttctctgtttttgggaaacgagaggctacaaccaagacagctgaaggagaatgaaacacacacatccacagaaacagagaggcgtaggtggccctgccgttgaccgcagcctctctggacaggcaaggggagttggcgcaggtgaggactcagacgacgtccaccgtcccaaggctgtcactagtatttctctgaagtgcctgaaggtaggaatgggccggcgattgggaccagctgggccccaccacggccacgccaggcaaagcgccagcagccctgcactccacgctggccaagaaggccttccacgcagaatgacaagactgcaaaaatccgatgtgcttccttccctggcgcagtcgctcctcgagccgctgccccccacccaccctgcacccctcgccctccccccaccacagaatctaagacctttcagcttcgagccagggggcgggggatcccgagcaaaagccttccgtggacatcaggccccgtggcctcaagggctcccagggcaaacctaattccccccaaaacgtgaagtcggggaagctgcggctacacattccacaaagtgctggcacttacacccacaacccggaaggctgtggaccgattcctctagggtggtgacctcccattagcaaacggtgtcatggtttggaatgttcattatcgccaagaacctggttagaggcataaagaccttttttcaccgttacctaattttttcccctttcaagaattttttttttttttggtgtgttgtacagcagtataatttttcacttatttattccatcagtagatatggtttgtacaatgtacaattgtttcatttcagaaaataaaaatttcaaatcatg

SEQ ID NO: 3217 - DNA, 1975 bp, Homo sapiens
  source 1..1975: mol_type = unassigned DNA
ggaggacagagatggcgcaggagtgcggttccacagggtcaggttcctaacacgctggccagagcagggagccgacctccaaactctcagggaagagaaccaggttgcccaccggcggcacctcgcacctcgccctgaccacaagcacgtgcgcccaacccgcctcgcaccccggcccgggtagggggctcaggggactcccggggcactcaggagggacgccccgggcggggcgcgcaggcgcgctgaggccgtgagccccaaggggcgggcgggtgcgcgcgctttctcgcgcacgcgcgcacggagggggcgacggccgctgtgacgctgcggcggcggcgggcgggcggcggcgcgtgaggcgcgcgatccccggtgtcttgggagcagtgccccggcccccgccgctcccgccgccgccatgtcgggccggtcggtccgggcggagacccgcagccgggccaaggacgacatcaagaaggtgatggcggccatcgagaaagtgcggaaatgggagaagaagtgggtgactgtgggtgacacgtccctgaggatatttaagtgggttcctgtgacagacagcaaggagaaagaaaagtcaaaatcgaacagttcagcagcccgagaacctaatggctttccttctgatgcctcagccaattcctctctccttcttgaattccaggacgaaaacagcaaccagagttccgtgtctgacgtctatcagcttaaggtggacagcagcaccaactcaagccccagcccccagcagagtgagtccctgagcccagcacacacctccgacttccgcacggatgactcccagcccccaacgctgggccaggagatcctggaggagccctccctgccctcctcggaagttgctgatgaacctcctaccctcaccaaggaagaaccagttccactagagacacaggtcgttgaggaagaggaagactcaggtgccccgcccctgaagcgcttctgtgtggaccaacccacagtgccgcagacggcgtcagaaagctagcaccatcccggccctccgcctcctggccctgcctctatttattgcattctggttctggccgcgccgcgttgctggggtaagggcaagcactggggtcaagagcctgcacacatgagccttccgggctggaaggctggcgtaggacttggggctgtagcatcatcttcctgaccctggcacctgtgtctacttgctcccgagaagaggagcgctcatgtcttttttgcaccccaagttggctggagcatcggccaccccaagattcatctgtgacctccaggcagcagtctctgctccagaatctctggacggagctgctggcagcttctgcgagaagagagagatgtggaaggcaccttctagaagagagcgtgcctcaggttacttgaacttgaacggagactgtagactcccggactttcccctaggactgggggccctgtaggctgctgttggaggactgggtagagacattggagggaagggaagggcttttctccacacaagggcagagagtccgtctagatttcttgctgtcctgccagctctgcccatgcctgaggtggtcctacctctcacgggcaccctagctgctgacagccctttgtggccgccgtccccatcccctgccctcagcacacacatctgcacacacgcagctttgttctcacctctacctgtcattccagcatccctgcctcttgtcacaaactgccccagcaagaatttgaggttctgacaacagtacccatcccccacagtaccccttcagctcagtttctagaaagctcccttttctttgaaatctgcatgttgaattgaactttgtgattttattttttgtttcaaaaaagtttaagaaaatggaaatgggcaacagtgagtgaagacatattttagcactgaatagaatatttttaaaattaaactatttgaaatatg

SEQ ID NO: 3218 - DNA, 1458 bp, Homo sapiens
  source 1..1458: mol_type = unassigned DNA
tgcggcggcggcgggcgggcggcggcgcgtgaggcgcgcgatccccggtgtcttgggagcagtgccccggcccccgccgctcccgccgccgccatgtcgggccggtcggtccgggcggagacccgcagccgggccaaggacgacatcaagaaggtgatggcggccatcgagaaagtgcggaaatgggagaagaagtgggtgactgtgggtgacacgtccctgaggatatttaagtgggttcctgtgacagacagcaaggagaaagaaaagtcaaaatcgaacagttcagcagcccgagaacctaatggctttccttctgatgcctcagccaattcctctctccttcttgaattccaggagccctccctgccctcctcggaagttgctgatgaacctcctaccctcaccaaggaagaaccagttccactagagacacaggtcgttgaggaagaggaagactcaggtgccccgcccctgaagcgcttctgtgtggaccaacccacagtgccgcagacggcgtcagaaagctagcaccatcccggccctccgcctcctggccctgcctctatttattgcattctggttctggccgcgccgcgttgctggggtaagggcaagcactggggtcaagagcctgcacacatgagccttccgggctggaaggctggcgtaggacttggggctgtagcatcatcttcctgaccctggcacctgtgtctacttgctcccgagaagaggagcgctcatgtcttttttgcaccccaagttggctggagcatcggccaccccaagattcatctgtgacctccaggcagcagtctctgctccagaatctctggacggagctgctggcagcttctgcgagaagagagagatgtggaaggcaccttctagaagagagcgtgcctcaggttacttgaacttgaacggagactgtagactcccggactttcccctaggactgggggccctgtaggctgctgttggaggactgggtagagacattggagggaagggaagggcttttctccacacaagggcagagagtccgtctagatttcttgctgtcctgccagctctgcccatgcctgaggtggtcctacctctcacgggcaccctagctgctgacagccctttgtggccgccgtccccatcccctgccctcagcacacacatctgcacacacgcagctttgttctcacctctacctgtcattccagcatccctgcctcttgtcacaaactgccccagcaagaatttgaggttctgacaacagtacccatcccccacagtaccccttcagctcagtttctagaaagctcccttttctttgaaatctgcatgttgaattgaactttgtgattttattttttgtttcaaaaaagtttaagaaaatggaaatgggcaacagtgagtgaagacatattttagcactgaatagaatatttttaaaattaa

SEQ ID NO: 3219 - DNA, 953 bp, Homo sapiens
  source 1..953: mol_type = unassigned DNA
ctctggccgcccgcgccaccgggccgctccggggacaggccggggcggggcgcggcggcaggaaacggggcggggacttgcggaggcgttggggacgagagagggcgcggccaactccaggggggacggcaggccgagagcgcggcgcccgggcctggcgcggagcctgagcccgccggacgggaggcggccccgccgcgggctcggccccggccccagccccgccagcatggccggccggactgtacgggccgagacccggagccgggccaaggatgacatcaagaaggtgatggcgaccatcgagaaggtccggagatgggagaagcgatgggtgactgtgggcgacacttcccttcgtatcttcaagtgggtgccagtggtggatccccaggaggaggagcgaaggcgggcaggtggcggggcagagagatcccgtggccgggaacgtcggggcaggggcgccagtccccgagggggtggccctctcatcctgctggatcttaatgatgagaacagcaaccagagtttccattcggaaggttccctgcaaaagggcacagagcccagtcctgggggcaccccccagcccagccgccctgtgtcacctgccggacccccagaaggggtccctgaggaggctcagcccccacggctgggccaagagagagatcccgggggcataactgctggcagcaccgacgaacccccaatgctgaccaaggaggagcctgttccagaactgctggaagctgaggcccccgaagcttaccctgtctttgagccagtgccacctgtccctgaggcagcccagggtgacacagaggactcggagggtgcccccccactcaagcgcatctgcccaaatgcccctgacccctgagaagccggcctgcctgtcctgttgccccaggggcccctttggctttttacaaataaagacccttttgtaa

SEQ ID NO: 3220 - DNA, 1983 bp, Homo sapiens
  source 1..1983: mol_type = unassigned DNA
tccgtccccaactcgcgcgtccgtccccaactcccgctctcggcggcgggcagggggcgctgagcgtccaggcgctccaagggggcgggcccgggtcggggcggggccggccgggcttccaggcctgggctctggccgcccgcgccaccgggccgctccggggacaggccggggcggggcgcggcggcaggaaacggggcggggacttgcggaggcgttggggacgagagagggcgcggccaactccaggggggacggcaggccgagagcgcggcgcccgggcctggcgcggagcctgagcccgccggacgggaggcggccccgccgcgggctcggccccggccccagccccgccagcatggccggccggactgtacgggccgagacccggagccgggccaaggatgacatcaagaaggtgatggcgaccatcgagaaggtccggagatgggagaagcgatgggtgactgtgggcgacacttcccttcgtatcttcaagtgggtgccagtggtggatccccaggaggaggagcgaaggcgggcaggtggcggggcagagagatcccgtggccgggaacgtcggggcaggggcgccagtccccgagggggtggccctctcatcctgctggatcttaatgatgagaacagcaaccagagtttccattcggaaggttccctgcaaaagggcacagagcccagtcctgggggcaccccccagcccagccgccctgtgtcacctgccggacccccagaaggggtccctgaggaggctcagcccccacggctgggccaagagagagatcccgggggcataactgctggcagcaccgacgaacccccaatgctgaccaaggaggagcctgttccagaactgctggaagctgaggattcgggagtgagaatgacgaggagagcccttcacgagaaggggctgaagacagagcccctcaggaggctcctgcccaggaggggcctccggacaaatgtccggcccagttccatggcggtgccggacaccagagctcccgggggaggcagcaaggccccgagggcacccagaacaatcccccagggtaaggggaggtgagtgggctccccaagcaagccaagacccctaaagcctcccttggctgccccaagatccagccactacctgtgccccgagggcggaaagagcttcccagctcacccaccgcggtaacatcggagggcgagcggccccacacctgcccgaacctaaggccacagcacccatctggctcgccactggcgcccgaatgcatgggaagggcttagggcagaactcggaccacatccagtgcctgaggccgccttgctagaggcctaggggaggggtgcactgggctgcctcgcccacctcctcacgcacccatgcggccaccctcccagcggtctgagtgtgccatgcgaggcgcctgccaccccgggagaggcgccgagtcccgagtcctgccggcactgagcctccgggtccacagcgggcaagggccgtggcggggacaagcgcaggggacccgccggcctcccgccttctgcagcaccacgagatgcccacgtggcacctggacgtccatgcatatgttgaggcccgtgcacgcgcagagaccccagcgcagaagccgccccgcacgccagggcttatgtatgccagcgctgggagacctccagcgcccgaggacatacggcaagtggttccaccagggtgtcagcctagcaggccaacctgggaacccatgtggacaagcggcctttcagcccaggcgcccgcctcgggtggaggcgtggagacttctggcgcagccctgagctggtggcctaacctacctggaaaatcctagcccgagaagcagcgcgagtgagccttttgggtggttccaaggcccttcaccaagctctcacttcctgacttcaccgttgggtctgttgtactaggaaataataacgcctcccatttatcaaggg

SEQ ID NO: 3221 - DNA, 6278 bp, Homo sapiens
  source 1..6278: mol_type = unassigned DNA
cttccatgtgtgaaagctacttggcatgaatgcctgggccgtaccaagtgtcaccgcagcaagagggggagtcagaagaaaaacagatcagaccagagcagacaataggcccctaaagtgttccccctaagttgctttgatgttgtcctggtgtcttgataccaggaggccagggattgcaggaaaagggtcttttttgtcttcattcactttcccccctcagtttctgaaatgattctccagaatttctcctcataaaaaaggactgaatgtgggcccagttggcgtcattctgctttgacctaaacattcccatctgattgggtggcagagatcatttttggaaagttcttccgtgtcccgatgtagaagaaatagcaaattggacatattgaaagacaagggtcatctttgagaagggggttcctggactcctcacctccaggatgagcactgcagtgtcgtgacccttggggttttgtatgccctggagatgcgagattttcctctggcagcaggaggcacgcacccagagaatgctggagctgcaaggggaaaggacccacttccacagcagagaaaaacaaagaggaaaaaggcatacaggcagcgagcgctaagggacgcacccagcaagcagtgggccagtgccactgcccccagcagctgtttctgctgcaacccgagaggaactcggtgagcctgtcccgtttgtgactgcaagctcaggatttcaatcaatgcattccagtaaccctaaagtgaggagctctccatcaggaaacacacagagtagccctaagtcaaagcaggaggtgatggtccgtccccctacagtgatgtccccatctggaaacccccagctggattccaaattctccaatcagggtaaacaggggggctcagccagccaatcccagccatccccctgtgactccaagagtgggggccatacccctaaagcactccctggcccaggtgggagcatggggctgaagaatggggctggaaatggtgccaagggcaaggggaaaagggagcgaagtatttccgccgactcctttgatcagagagatcctgggactccaaacgatgactctgacattaaagaatgtaattctgctgaccacataaagtcccaggattcccagcacacaccacactcgatgaccccatcaaatgctacagcccccaggtcttctaccccctcccatggccaaactactgccacagagcccacacctgctcagaagactccagccaaagtggtgtacgtgttttctactgagatggccaataaagctgcagaagctgttttgaagggccaggttgaaactatcgtctctttccacatccagaacatttctaacaacaagacagagagaagcacagcgcctctgaacacacagatatctgcccttcggaatgatccgaaacctctcccacaacagcccccagctccggccaaccaggaccagaattcttcccagaataccagactgcagccaactccacccattccggcaccagcacccaagcctgccgcacccccacgtcccctggaccgggagagtcctggggtagaaaacaaactgattccttctgtaggaagtcctgccagctccactccactgcccccagatggtactgggcccaactcaactcccaacaatagggcagtgacccctgtctcccaggggagcaatagctcttcagcagatcccaaagcccctccgcctccaccagtgtccagtggcgagccccccacactgggagagaatcccgatggcctatctcaggagcagctggagcaccgggagcgctccttacaaactctcagagatatccagcgcatgctttttcctgatgagaaagaattcacaggagcacaaagtgggggaccgcagcagaatcctggggtattagatgggcctcagaaaaaaccagaagggccaatacaggccatgatggcccaatcccaaagcctaggtaagggacctgggccccggacagacgtgggagctccatttggccctcaaggacatagagatgtacccttttctccagatgaaatggttccaccttctatgaactcccagtctgggaccataggacccgaccaccttgaccatatgactcccgagcagatagcgtggctgaaactgcagcaggagttttatgaagagaagaggaggaagcaggaacaagtggttgtccagcagtgttccctccaggacatgatggtccatcagcacgggcctcggggagtggtccgaggacccccccctccataccagatgacccctagtgaaggctgggcacctgggggtacagagccattttctgatggtatcaacatgccacattctctgcccccgaggggcatggctccccaccccaacatgccagggagccagatgcgcctccctggatttgcaggcatgataaactctgaaatggaagggccgaatgtccccaaccctgcatctagaccaggtctttctggagtcagttggccagatgatgtgccaaaaatcccagatggtcgaaattttcctcctggccagggcattttcagcggtcctggccgaggggaacgcttcccaaacccccaaggattgtctgaagagatgtttcagcagcagctggcagagaaacagctgggtctccccccagggatggccatggaaggcatcaggcccagcatggagatgaacaggatgattccaggctcccagcgccacatggagcctgggaataaccccattttccctcgaataccagttgagggccctctgagtccttctaggggtgactttccaaaaggaattcccccacagatgggccctggtcgggaacttgagtttgggatggttcctagtgggatgaagggagatgtcaatctaaatgtcaacatgggatccaactctcagatgatacctcagaagatgagagaggctggggcgggccctgaggagatgctgaaattacgcccaggtggctcagacatgctgcctgctcagcagaagatggtgccactgccatttggtgagcacccccagcaggagtatggcatgggccccagaccattccttcccatgtctcagggtccaggcagcaacagtggcttgcggaatctcagagaaccaattgggcccgaccagaggactaacagccggctcagtcatatgccaccactacctctcaacccttccagtaaccccaccagcctcaacacagctcctccagttcagcgcggcctggggcggaagcccttggatatatctgtggcaggcagccaggtgcattccccaggcattaaccctctgaagtctcccacgatgcaccaagtccagtcaccaatgctgggctcgccctcggggaacctcaagtccccccagactccatcgcagctggcaggcatgctggcgggcccagctgctgctgcttccattaagtccccccctgttttggggtctgctgctgcttcacctgtccacctcaagtctccatcacttcctgccccgtcacctggatggacctcttctccaaaacctccccttcagagtcctgggatccctccaaaccataaagcacccctcaccatggcctccccagccatgctgggaaatgtagagtcaggtggccccccacctcctacagccagccagcctgcctctgtgaatatccctggaagtcttccctctagtacaccttataccatgcctccagagccaaccctttcccagaacccactctctattatgatgtctcgaatgtccaagtttgcaatgcccagttccaccccgttataccatgatgctatcaagactgtggccagctcagatgacgactcccctccagctcgttctcccaacttgccatcaatgaataatatgccaggaatgggcattaatacacagaatcctcgaatttcaggtccaaaccccgtggttccgatgccaaccctcagcccaatgggaatgacccagccactttctcactccaatcagatgccctctccaaatgccgtgggacccaacatacctcctcatggggtcccaatggggcctggcttgatgtcacacaatcctatcatggggcatgggtcccaggagccaccgatggtacctcaaggacggatgggcttcccccagggcttccctccagtacagtctcccccacagcaggttccattccctcacaatggccccagtggggggcagggcagcttcccaggagggatgggtttcccaggagaaggcccccttggccgccccagcaacctgccccaaagttcagcagatgcagcactttgcaagcctggaggccccgggggtcctgactccttcactgtcctggggaacagcatgccttcggtgtttacagacccagatctgcaggaggtcatccgacctggagccaccggaatacctgagtttgatctatcccgcattattccatctgagaagcccagccagacgctgcaatatttccctcgaggggaagttccaggccgtaaacagccccagggtcctggacctgggttttcacacatgcaggggatgatgggcgaacaagcccccagaatgggactagcattacctggcatgggaggtccagggccagtgggaactccggacatccctcttggtacagctccatccatgccaggccacaaccccatgagaccaccagcctttctccaacaaggcatgatgggacctcaccatcggatgatgtcaccagcacaatctacaatgcccggccagcccaccctgatgagcaatccagctgctgccgtgggcatgattcctggcaaggatcgggggcctgccgggctctacacccaccctgggcctgtgggctctccaggcatgatgatgtccatgcagggcatgatgggaccccaacagaacatcatgatccccccacagatgaggccccggggcatggctgctgacgtgggcatgggtggatttagccaaggacctggcaacccaggaaacatgatgttttaagctgctaagatgggatgtgccgatccttgtcaaaatgagattccaggtcctgagagctgctttgaggcagttccaggagtacttactattggtcatgcaataggagaacagagacccgagggctgctttgggggaggggggaactcgagaatgtatggatttacctgaaaacaaattattcatttaatcaacaggtgtgttttttttaagatttattttttaaaaattatttttgtggacttgggtatcaatgatggcacctacttttgggaatctgtagctgtgctttgagaattgccatcggtcatgtgttgcaccgttctctgtatgtttacgtcctttggactggcttctcccaggattcttttctgtttttgtttttttgatttgggctttatttttttctgtgtactgtactatattgtaaaagggattttagcagagactttagtctttggggcaagaggagaacaggaatgctgggctgtttactttaggtggagaatccatcttcagacctttggactattttctttcaactgcagtgtatagaaaaaccaaactacgacctcagagcagagtattaatgaaaagcacaaaaaaaggaactaagttcagcgaggggtggggggaggggggagatttttcttttgaaaaataatgactcttaggacatttgtttttcagttcaagtgctcttcagcactgtcttgtctcccaatataccaacccactggcacatttttctcttgttttctctctccgattttgctctgtctcctcagttaagtgtttccttcctttgtgccccccgctggtgaccctctgcttccctctctctttccctttggcagctgcaatacacagtgttattctggggaaataaatctagcaaagcctcgccttccatgccgagcgtcctcttggctctgagagggaaaggtctgtccttgggatgctctctggtcttttttccccctaagtctttctctttcccatcatacccttccctgcccaccttgttttctgttctccttttattaggaattcccaagtgaattttattaatgtgggagtggaacagatgctaaaagctatccaggattttgtttctgtttgttttaaattttgtggttccttccctttcctccccctcccatgcgtaagacgttctgtgtaacctccattaaatttggtacaaaaccactcgccagagctgtggtgtcagaaaaataaaatatattgtttcttacaaaa

SEQ ID NO: 3222 - DNA, 10005 bp, Homo sapiens
  source 1..10005: mol_type = unassigned DNA
cgtgcgtgtcttgtctccctgtccacgtgtgagctgtgagtgtgtgtgagtcagagttcgggtgtctgtgggtctctgagcctctgctggcagcacccggggctcgccaagctcttgccggctggcgcgcgcccagcccctggcgggacttgtccgtgtgtctgtccgcgcgcggggcctggagaagcacgctgcagtcctgtccgcctcccgctcgctgcctcgctggctgtcgctcgctcgctctgcctctccgcccgggctctgccgaagggggcggggtgggggtgcagggcggggggaggggaggctcctgcattcttgcggtcggggaggaatccgagccagcgttactggtctccagaagagcccagctgcagccccggggccccgccaggcctctcgctgcccgcccgggcctgctgggatgggcacgggctaggcctcgagctggggacggggcggggcgtggccccaaccccgggccccctccacggctggagcgctctgggggtggggcacgaggggtaccccaccctgggtgaggggcgcgtctgggagcaggaatccctcagggggccaggggagacctcacagccgccccacacggcacctttgctacctagccttttagtgaattctgtctctgccgcccgtcggggcggaggcttgctggagactgcaagccccctgagggcaaggtgcgggagggatggggacagggctggcctccaggatcgagaccccatctcgtaatcctctttttccagtgccaccccaccctatccagctccctagtcccagggctgttgggtcctcccttctcccctccccctctgacaccccctccccaagtcacgagttttctctttggggcttgttgctgcagtccgtgctccagtaccgagtacctggctgggccctgggcacgcacaggggccgtagccccactgtgtgtgggagccatgaggatcctggctaacaagacaaggttaccccaccccaggaggagagaagctccagggagcccgccgctgtccccccgcggtcattgcccccctgccccagccaagccaatgcacccagaaaataaattgaccaatcatggcaagacagggaatggcggggcccaatctcagcaccagaatgtgaaccaaggacccacctgcaacgtgggctcgaagggcgtgggggcggggaaccatggggccaaggccaaccagatctcgcctagcaactcaagtctgaagaacccccaggcaggggtgccccctttcagctcgctcaagggcaaggtgaagagggaccggagtgtgtctgtggactctggagagcagcgagaggctgggaccccatccctggattcagaggccaaagaggtggcgccgcggagtaagcggcgctgtgtgctggagcggaagcagccgtacagtggggacgaatggtgctctggaccggacagtgaggaggacgacaagcccattggggccacccacaattgtaatgtagcagacccagccatggcggccccacagctgggtcccggccaaaccacccaactgcccctcagcgagagcagcgtgccaggcgccccgcacggccctcctcctggccttcggcctgatgcccctgggggcgggggcgggggcgggggcgtccccggaaagcctccctcgcagttcgtatatgtcttcaccacccacctggccaacacggctgcagaggcagtgctgcagggccgggccgactccatcctcgcctaccaccagcagaacgtgccccgggccaagcttgaccaggcccctaaagtgccccccaccccagaaccgctacccctgagcacgccgtcagcaggcaccccgcagtcccagccacctccactgccgccgccgccacccccggcccctggcagtgccccgcctgctctgcccccagaggggcctcctgaggacagcagtcaggacctggcccccaactcggtgggagctgccagcacaggtggtgggactgggggcacccaccctaacaccccgacggctaccaccgccaacaaccctctgcctcctggaggagaccccagcagtgcccccggccctgccctgctgggggaggcagccgcccctggaaatgggcagcgcagcctggtgggctcagagggcttgtccaaagagcagctggagcatcgggaacggtccctccagacgctgcgagacattgagcgactgctgctccgcagcggagagactgagcccttcctcaaggggcccccaggaggagcgggtgaggggggcccaccagcacaagccccccctcccccccagcagccacccacggcccctcccagcgggctgaagaaatatgaggaacccttgcagtccatgatttcacagacacagagcctagggggccccccgctggagcatgaagtgcctgggcaccccccgggtggggacatggggcagcagatgaacatgatgatacagaggctgggccaggacagcctcacgcctgagcaggtggcctggcgcaagctgcaggaggagtactacgaagagaaacggcggaaagaggaacagattgggctgcatgggagccgtcctctgcaggacatgatgggcatggggggcatgatggtgagggggcccccgcctccttaccacagcaagcctggggatcagtggccacctggaatgggtgcgcagctgcgggggcccatggatgttcaagatcccatgcagctccggggcggacctccctttcctgggccccgtttcccaggcaaccagatacaacgggtacctgggtttgggggcatgcagagtatgcccatggaggtgcccatgaatgccatgcagaggcccgtgagaccaggcatgggctggaccgaagacttgccccctatggggggacccagcaattttgcccagaacaccatgccctacccaggtgggcagggtgaggcggagcgattcatgactccccgggtccgtgaggagctgctgcggcaccagctgctggagaagcggtcgatgggcatgcagcgccccctgggcatggcaggcagtggcatgggacagagcatggagatggagcggatgatgcaggcgcaccgacagatggatcctgccatgtttcccgggcagatggctggtggtgagggcctggcgggcactcccatgggcatggagtttggtggaggccggggcctcctgagccctcccatggggcagtctgggctgagggaggtggacccacccatggggccaggcaacctcaacatgaacatgaatgtcaacatgaacatgaacatgaacctgaacgtgcagatgaccccgcagcagcagatgctgatgtcgcagaagatgcggggccctggggacttgatggggccccagggcctcagtcctgaggagatggcccgggttcgggcccagaacagcagtggcgtgatgggcggcccgcagaagatgctgatgccttcacagtttcccaaccagggccagcagggattctctggaggccagggaccctaccaagccatgtcccaggacatgggcaatacccaagacatgttcagccctgatcagagctcaatgcccatgagcaacgtgggcaccacccggctcagccacatgcctctgccccctgcgtccaatcctcctgggaccgtgcattcagccccaaaccgggggctaggcaggcggccttcggacctcaccatcagtattaatcagatgggctcaccgggcatggggcacttgaagtcgcccacccttagccaggtgcactcacccctggtcacctcgccctctgccaacctcaagtcaccccagactccctcacagatggtgcccttgccttctgccaacccgccaggacctctcaagtcgccccaggtcctcggctcctccctcagtgtccgttcacccactggctcgcccagcaggctcaagtctccttccatggcggtgccttctccaggctgggttgcctcacctaagacggccatgcccagcccgggggtctcccagaacaagcagccgcctctcaacatgaactcttccaccaccctgagcaacatggaacagggtaccctcccgcctagcggcccccggagcagctcctcagcacctcccgccaaccctcccagcggcctcatgaaccccagcctaccattcacttcctccccagaccccacaccttcccagaaccccctgtcactgatgatgacccagatgtccaagtacgccatgcccagctccaccccgctctaccacaatgccatcaagaccatcgccacctcagacgacgagctgctgcccgaccggcccctgctgccccccccaccaccaccgcagggctccgggccagggatcagcaacagccagcccagccagatgcacctgaactcagccgctgcccagagccctatgggcatgaacctgccaggccagcagcccctgtcccatgagcccccgcccgccatgctgccctcccccacccctctgggctccaacattccactgcatcccaacgcacaggggacaggggggccccctcaaaactccatgatgatggccccagggggccccgactccctgaatgccccctgtggcccagtgcccagctcctcccagatgatgcccttcccccctcggctgcagcagccccatggtgccatggcccccactgggggtgggggcggggggcctggcctgcagcagcactacccgtcaggcatggccctgcctcccgaggacctgcccaaccagccgccaggccccatgcctccccagcagcacctgatgggcaaagccatggctgggcgcatgggcgacgcatacccaccgggtgtgctccctggggtggcatcagtgctgaacgaccccgagctgagcgaggtgatccggcccaccccaacggggatccccgagttcgacttgtcgaggatcatcccctctgagaagccaagcagcaccctccagtacttccccaagagcgagaaccagccccccaaggctcagccccctaatctgcatctcatgaacctgcagaacatgatggcggagcagactccctctcggcctcccaacctcccaggccagcagggcgtccagcgggggctcaacatgtccatgtgccaccctggacagatgtccttgctgggcaggacaggcgtgcccccacagcaggggatggtgccccatggcctgcaccagggggtcatgtcccctccacaaggcctcatgacccagcagaatttcatgctgatgaagcagcggggcgtggggggcgaggtctacagccagccgccccacatgctctccccgcagggctccctcatgggccccccgccccagcagaacctcatggtgtcccacccccttcggcagcgcagtgtgtccctggacagccagatgggctacctcccggcaccaggcggcatggccaacctgcccttctagaagtcgctgccagggctggagccggggcaatgttgcaaatacgataaccttaacaaagttcttcccctcaatgttgggatggcctgggtcgcggggtggggtggagggggtgggagggggcttgtgtagggagtggcatttgtggaaaccagatgtgctggcagcttagggggaagtggcagtgtggggtgggggattttgcattggggttggttccatttcggccaccaggactgcccctcccccactcctcccaattcctatggagcctctctattttacctctttccgtgcatccctgcacccgccacacccccttcagctatgcttttggagtcctggatgggaatctggggggagagaggaaggacaggtcaggtctcccccagccccttctgctcctgtctcctcgtgtccgcattgctggagctccacctccctcttggtttctccgcacccgcccattttccttctgtctttacctgcttcgtatcctttccctgctgatgtggctgacccctctcccacccctccctgcaggcggctggccaggtgggcaggtgccagccggagctgtaaatagagcgctgcgcttttgtgctggtttgtgcgtgtgctgtatttctgtgttttgatagaagtcacacaaaaaaaaaaggataaaagaaacccttccccccttcttcaagttattgctccctccattcccctggacccagggacatgcagccctacatggccacccactgtttgcagtgtctctgggtccctaagggataccattcctgtctcgtccccaaatggtaagatgacgtaaatgacccactcctaaactgaggtcagaccacctaggcttccacctggtgagccctagcagggctgagacccccagggcggcagcctgtctgctgctgagtgattcagggagaacatgtgtgcacgtgcatgtgtgtttgcccacaccggtgacacggggccctggctttccactttggatgcccgggcatccgctgctgctacatcttagccagaacttgaagtcttttgtcccagtttgggatgaaggaaaggaggaagaggcggtggctgtgtggcccccttgagtggagccatggaaggggtggcatggtgccactggggcctgtggctgtagtagccctgggccaggtaacctccagggccctgacttttccagaggctgctgccacctacttcttatcaaagaagggggagaacagttcatctgagtcagtgcacctcccctccagtctccactccctgaggatggaatcggggaaacagcatcctgccgcctcctctctgcctgcccactcaccggcaaggttgtccctctgcccagggctcagggccatgtaccagatctgtctgtgcccacccaggcacagccactgcctcccccttggctccctgctcctacccaggagagctccctatccgcctttggtcagagctgaagccatatacgactgggtgtttgtccccctactttggccccaggagtaaaaaaacttctccttttctcacttcctttcctgcctcgggaggtggcagggcagttccctggctgaggccttttgcgccccacctccaggaccaagggccattctagacagggtgtcttctaccaggacccgtccctagccttcctggcctggagggcctggtcttgcactggcagctgtaatacaaagggaactcgccccacttctcccagcctggtgctgtcctctcggcccaccatcggccaggtccagcgcttcctctggggctgacaacaggcccctgactcaccccggtcacctcccagggtccatggccagggcctctgtgtttggggggccacttgcccttcatcctgccaggcgctttgcccgccctgcctcagcctgggccctgtgcccttgagccctccacccctggcccaagacccccccaaactgtctgactctgtgtttcctgccctgaggagagaggggtcagattgcagcgggccgagtgccctctccgtcccctctcctcccacccacgccacaggccagcctactcttccctccatccatggccacacccccagccattttgtaccattatataaatatatatataaatataaatatataaatacaatatgtgaagacatcttcttggtttttattttgaaacaatttttaggcttgttccgggggtctctgtgctgcctgtactgtattgacctgttttataggtgcctttttattaaaaagaaaattcaaaatccagcctcttgcctctttgcatctgcttcagactcccccatcgattacccagcttgcgaggagatactcagagaaaaaagggacgtcttagggcttcctcgttgtcctgccgtgaagacactctcacgtgagccacagctgttatttccccagtggggcctcccaaggagcttggctgcttggcttgagtgggacaagggcaggggtccctgactccccacctgatcaaaggctggggaggtggtagggagcacccagaactgccggacgggcctcccacaccccaggtgagcaaacaagcacggagcagcttcctgcggttccatctgagtgacatcctcacgggggcagggcacggcttcctggggcctggggacttccctgcctcagtgtgtttcttacacttccctgcctaaggtgatgccacggaggggatggttgagatgactcccacgggccccttccagtccacctttctccgttccgactctgagtttcctcgggtctatagcttatgggaagggagtgaggaggggacaagccagcctccttccccatcaatgcccacaacctcccatcccctggacccagccaccctaggagttctccaccccaccccatctcgcctggcggaggggaccgccgggtttgattgatccatctccctccttggggttcgggaagaaagctcttttcttccctctgtcgggtttctttcttgcttctcggccttcacgcttcctcaggtcactggctggcctccaagggcacctagagtcagccctgcctgcagaccacccaggatccggtgacatggggtggacccagcgctgtttcggtcagagccaggggcagctacctgaactcaaccagtctgagcttcctgcttggtcaagatgactgcaggcttgggggcctggcagaatgtctgtgtttttagggactgagttgtccgaaggccacactctgctgccagctggcctttcctcagccttaacctccactcatcccctggtgctcagcttctggctttgtttgacaggtgggcaggaggagagaggggaagctgtggaggtcagcagcccctaagctgatggagtgtgttctgggaggggcaggcgctctccgttggcaagggcagaagtagaagttgtttcttgagcattggatgattaggatgggaggtgcgtgaggttctctcagcccaggggggtgcagatgggtaaggacagccttcactgtgcctttgagctgctttccgctccctgggctccagcctagccccagggccggcagaagagctggcagggatgttctagaaatgggggttggttcctctagctaccccaaatgaggatactcctaggacactcttagccacggtgagcccttaggatcccagctcctgttggaaggagcatccagcatcactgcctgccccaaggaaaagcagcaataaaaggggacactgggacctagaacgtggtgagagaggtggcattctctgactcagagagactgctcctgcgccagctagggaagagctggcacagggaggcagggccggtacagcccagcttcgtcaggagccgcgacaggtcactgcggaacttcacgccggcgaaagtgtagagcatggggttgaggcagcagtgggccaggcccaggaactcacacatggtgatggccacggggagagagccattcagcttgcaggtattgtccacggccttcagcctcgccagggtgtccaggaagatgacgatgtggtagggtgaccagcagaggaagaagatgcttgtcaccaggatggccaccctgactgccttctgccgctgagggcgccgctgggcctggcgcaacctgtgcactacccccacgtagcaccagcccatcaccagcatgggcagcaggaatcccgccacatggtagaggaatcgggaggtgaaccaggcatgcgtttctgcttggttctcttgggagaaggtgcaacgtggcagggagttgttgtgatggccttggctgactttggcgaagagaatctctggcaaggcaaggaggaagcccaccagccagatggtcccacaggtgatgtggatggagaggaggcggcggtggcggtaggcatggacggcgtggacaatggccaggtagcggtccacggcgatgcaggccaggagcaggctgctgcagtagaagttgactttgtgcagggcaatcacagttttgcagaggaaggtccccaggacccagcccacagagcc

SEQ ID NO: 3223 - DNA, 5153 bp, Homo sapiens
  source 1..5153: mol_type = unassigned DNA
cgtgcgtgtcttgtctccctgtccacgtgtgagctgtgagtgtgtgtgagtcagagttcgggtgtctgtgggtctctgagcctctgctggcagcacccggggctcgccaagctcttgccggctggcgcgcgcccagcccctggcgggacttgtccgtgtgtctgtccgcgcgcggggcctggagaagcacgctgcagtcctgtccgcctcccgctcgctgcctcgctggctgtcgctcgctcgctctgcctctccgcccgggctctgccgaagggggcggggtgggggtgcagggcggggggaggggaggctcctgcattcttgcggtcggggaggaatccgagccagcgttactggtctccagaagagcccagctgcagccccggggccccgccaggcctctcgctgcccgcccgggcctgctgggatgggcacgggctaggcctcgagctggggacggggcggggcgtggccccaaccccgggccccctccacggctggagcgctctgggggtggggcacgaggggtaccccaccctgggtgaggggcgcgtctgggagcaggaatccctcagggggccaggggagacctcacagccgccccacacggcacctttgctacctagccttttagtgaattctgtctctgccgcccgtcggggcggaggcttgctggagactgcaagccccctgagggcaaggtgcgggagggatggggacagggctggcctccaggatcgagaccccatctcgtaatcctctttttccagtgccaccccaccctatccagctccctagtcccagggctgttgggtcctcccttctcccctccccctctgacaccccctccccaagtcacgagttttctctttggggcttgttgctgcagtccgtgctccagtaccgagtacctggctgggccctgggcacgcacaggggccgtagccccactgtgtgtgggagccatgaggatcctggctaacaagacaaggttaccccaccccaggaggagagaagctccagggagcccgccgctgtccccccgcggtcattgcccccctgccccagccaagccaatgcacccagaaaataaattgaccaatcatggcaagacagggaatggcggggcccaatctcagcaccagaatgtgaaccaaggacccacctgcaacgtgggctcgaagggcgtgggggcggggaaccatggggccaaggccaaccagatctcgcctagcaactcaagtctgaagaacccccaggcaggggtgccccctttcagctcgctcaagggcaaggtgaagagggaccggagtgtgtctgtggactctggagagcagcgagaggctgggaccccatccctggattcagaggccaaagaggtggcgccgcggagtaagcggcgctgtgtgctggagcggaagcagccgtacagtggggacgaatggtgctctggaccggacagtgaggaggacgacaagcccattggggccacccacaattgtaatgtagcagacccagccatggcggccccacagctgggtcccggccaaaccacccaactgcccctcagcgagagcagcgtgccaggcgccccgcacggccctcctcctggccttcggcctgatgcccctgggggcgggggcgggggcgggggcgtccccggaaagcctccctcgcagttcgtatatgtcttcaccacccacctggccaacacggctgcagaggcagtgctgcagggccgggccgactccatcctcgcctaccaccagcagaacgtgccccgggccaagcttgaccaggcccctaaagtgccccccaccccagaaccgctacccctgagcacgccgtcagcaggcaccccgcagtcccagccacctccactgccgccgccgccacccccggcccctggcagtgccccgcctgctctgcccccagaggggcctcctgaggacagcagtcaggacctggcccccaactcggtgggagctgccagcacaggtggtgggactgggggcacccaccctaacaccccgacggctaccaccgccaacaaccctctgcctcctggaggagaccccagcagtgcccccggccctgccctgctgggggaggcagccgcccctggaaatgggcagcgcagcctggtgggctcagagggcttgtccaaagagcagctggagcatcgggaacggtccctccagacgctgcgagacattgagcgactgctgctccgcagcggagagactgagcccttcctcaaggggcccccaggaggagcgggtgaggggggcccaccagcacaagccccccctcccccccagcagccacccacggcccctcccagcgggctgaagaaatatgaggaacccttgcagtccatgatttcacagacacagagcctagggggccccccgctggagcatgaagtgcctgggcaccccccgggtggggacatggggcagcagatgaacatgatgatacagaggctgggccaggacagcctcacgcctgagcaggtggcctggcgcaagctgcaggaggagtactacgaagagaaacggcggaaagaggaacagattgggctgcatgggagccgtcctctgcaggacatgatgggcatggggggcatgatggtgagggggcccccgcctccttaccacagcaagcctggggatcagtggccacctggaatgggtgcgcagctgcgggggcccatggatgttcaagatcccatgcagctccggggcggacctccctttcctgggccccgtttcccaggcaaccagatacaacgggtacctgggtttgggggcatgcagagtatgcccatggaggtgcccatgaatgccatgcagaggcccgtgagaccaggcatgggctggaccgaagacttgccccctatggggggacccagcaattttgcccagaacaccatgccctacccaggtgggcagggtgaggcggagcgattcatgactccccgggtccgtgaggagctgctgcggcaccagctgctggagaagcggtcgatgggcatgcagcgccccctgggcatggcaggcagtggcatgggacagagcatggagatggagcggatgatgcaggcgcaccgacagatggatcctgccatgtttcccgggcagatggctggtggtgagggcctggcgggcactcccatgggcatggagtttggtggaggccggggcctcctgagccctcccatggggcagtctgggctgagggaggtggacccacccatggggccaggcaacctcaacatgaacatgaatgtcaacatgaacatgaacatgaacctgaacgtgcagatgaccccgcagcagcagatgctgatgtcgcagaagatgcggggccctggggacttgatggggccccagggcctcagtcctgaggagatggcccgggttcgggcccagaacagcagtggcgtgatgggcggcccgcagaagatgctgatgccttcacagtttcccaaccagggccagcagggattctctggaggccagggaccctaccaagccatgtcccaggacatgggcaatacccaagacatgttcagccctgatcagagctcaatgcccatgagcaacgtgggcaccacccggctcagccacatgcctctgccccctgcgtccaatcctcctgggaccgtgcattcagccccaaaccgggggctaggcaggcggccttcggacctcaccatcagtattaatcagatgggctcaccgggcatggggcacttgaagtcgcccacccttagccaggtgcactcacccctggtcacctcgccctctgccaacctcaagtcaccccagactccctcacagatggtgcccttgccttctgccaacccgccaggacctctcaagtcgccccaggtcctcggctcctccctcagtgtccgttcacccactggctcgcccagcaggctcaagtctccttccatggcggtgccttctccaggctgggttgcctcacctaagacggccatgcccagcccgggggtctcccagaacaagcagccgcctctcaacatgaactcttccaccaccctgagcaacatggaacagggtaccctcccgcctagcggcccccggagcagctcctcagcacctcccgccaaccctcccagcggcctcatgaaccccagcctaccattcacttcctccccagaccccacaccttcccagaaccccctgtcactgatgatgacccagatgtccaagtacgccatgcccagctccaccccgctctaccacaatgccatcaagaccatcgccacctcagacgacgagctgctgcccgaccggcccctgctgccccccccaccaccaccgcagggctccgggccagggatcagcaacagccagcccagccagatgcacctgaactcagccgctgcccagagccctatgggcatgaacctgccaggccagcagcccctgtcccatgagcccccgcccgccatgctgccctcccccacccctctgggctccaacattccactgcatcccaacgcacaggggacaggggggccccctcaaaactccatgatgatggccccagggggccccgactccctgaatgccccctgtggcccagtgcccagctcctcccagatgatgcccttcccccctcggctgcagcagccccatggtgccatggcccccactgggggtgggggcggggggcctggcctgcagcagcactacccgtcaggcatggccctgcctcccgaggacctgcccaaccagccgccaggccccatgcctccccagcagcacctgatgggcaaagccatggctgggcgcatgggcgacgcatacccaccgggtgtgctccctggggtggcatcagtgctgaacgaccccgagctgagcgaggtgatccggcccaccccaacggggatccccgagttcgacttgtcgaggatcatcccctctgagtttctccgcacccgcccattttccttctgtctttacctgcttcgtatcctttccctgctgatgtggctgacccctctcccacccctccctgcaggcggctggccaggtgggcaggtgccagccggagctgtaaatagagcgctgcgcttttgtgctggtttgtgcgtgtgctgtatttctgtgttttga

SEQ ID NO: 3224 - DNA, 5330 bp, Homo sapiens
  source 1..5330: mol_type = unassigned DNA
cgtgcgtgtcttgtctccctgtccacgtgtgagctgtgagtgtgtgtgagtcagagttcgggtgtctgtgggtctctgagcctctgctggcagcacccggggctcgccaagctcttgccggctggcgcgcgcccagcccctggcgggacttgtccgtgtgtctgtccgcgcgcggggcctggagaagcacgctgcagtcctgtccgcctcccgctcgctgcctcgctggctgtcgctcgctcgctctgcctctccgcccgggctctgccgaagggggcggggtgggggtgcagggcggggggaggggaggctcctgcattcttgcggtcggggaggaatccgagccagcgttactggtctccagaagagcccagctgcagccccggggccccgccaggcctctcgctgcccgcccgggcctgctgggatgggcacgggctaggcctcgagctggggacggggcggggcgtggccccaaccccgggccccctccacggctggagcgctctgggggtggggcacgaggggtaccccaccctgggtgaggggcgcgtctgggagcaggaatccctcagggggccaggggagacctcacagccgccccacacggcacctttgctacctagccttttagtgaattctgtctctgccgcccgtcggggcggaggcttgctggagactgcaagccccctgagggcaaggtgcgggagggatggggacagggctggcctccaggatcgagaccccatctcgtaatcctctttttccagtgccaccccaccctatccagctccctagtcccagggctgttgggtcctcccttctcccctccccctctgacaccccctccccaagtcacgagttttctctttggggcttgttgctgcagtccgtgctccagtaccgagtacctggctgggccctgggcacgcacaggggccgtagccccactgtgtgtgggagccatgaggatcctggctaacaagacaaggttaccccaccccaggaggagagaagctccagggagcccgccgctgtccccccgcggtcattgcccccctgccccagccaagccaatgcacccagaaaataaattgaccaatcatggcaagacagggaatggcggggcccaatctcagcaccagaatgtgaaccaaggacccacctgcaacgtgggctcgaagggcgtgggggcggggaaccatggggccaaggccaaccagatctcgcctagcaactcaagtctgaagaacccccaggcaggggtgccccctttcagctcgctcaagggcaaggtgaagagggaccggagtgtgtctgtggactctggagagcagcgagaggctgggaccccatccctggattcagaggccaaagaggtggcgccgcggagtaagcggcgctgtgtgctggagcggaagcagccgtacagtggggacgaatggtgctctggaccggacagtgaggaggacgacaagcccattggggccacccacaattgtaatgtagcagacccagccatggcggccccacagctgggtcccggccaaaccacccaactgcccctcagcgagagcagcgtgccaggcgccccgcacggccctcctcctggccttcggcctgatgcccctgggggcgggggcgggggcgggggcgtccccggaaagcctccctcgcagttcgtatatgtcttcaccacccacctggccaacacggctgcagaggcagtgctgcagggccgggccgactccatcctcgcctaccaccagcagaacgtgccccgggccaagcttgaccaggcccctaaagtgccccccaccccagaaccgctacccctgagcacgccgtcagcaggcaccccgcagtcccagccacctccactgccgccgccgccacccccggcccctggcagtgccccgcctgctctgcccccagaggggcctcctgaggacagcagtcaggacctggcccccaactcggtgggagctgccagcacaggtggtgggactgggggcacccaccctaacaccccgacggctaccaccgccaacaaccctctgcctcctggaggagaccccagcagtgcccccggccctgccctgctgggggaggcagccgcccctggaaatgggcagcgcagcctggtgggctcagagggcttgtccaaagagcagctggagcatcgggaacggtccctccagacgctgcgagacattgagcgactgctgctccgcagcggagagactgagcccttcctcaaggggcccccaggaggagcgggtgaggggggcccaccagcacaagccccccctcccccccagcagccacccacggcccctcccagcgggctgaagaaatatgaggaacccttgcagtccatgatttcacagacacagagcctagggggccccccgctggagcatgaagtgcctgggcaccccccgggtggggacatggggcagcagatgaacatgatgatacagaggctgggccaggacagcctcacgcctgagcaggtggcctggcgcaagctgcaggaggagtactacgaagagaaacggcggaaagaggaacagattgggctgcatgggagccgtcctctgcaggacatgatgggcatggggggcatgatggtgagggggcccccgcctccttaccacagcaagcctggggatcagtggccacctggaatgggtgcgcagctgcgggggcccatggatgttcaagatcccatgcagctccggggcggacctccctttcctgggccccgtttcccaggcaaccagatacaacgggtacctgggtttgggggcatgcagagtatgcccatggaggtgcccatgaatgccatgcagaggcccgtgagaccaggcatgggctggaccgaagacttgccccctatggggggacccagcaattttgcccagaacaccatgccctacccaggtgggcagggtgaggcggagcgattcatgactccccgggtccgtgaggagctgctgcggcaccagctgctggagaagcggtcgatgggcatgcagcgccccctgggcatggcaggcagtggcatgggacagagcatggagatggagcggatgatgcaggcgcaccgacagatggatcctgccatgtttcccgggcagatggctggtggtgagggcctggcgggcactcccatgggcatggagtttggtggaggccggggcctcctgagccctcccatggggcagtctgggctgagggaggtggacccacccatggggccaggcaacctcaacatgaacatgaatgtcaacatgaacatgaacatgaacctgaacgtgcagatgaccccgcagcagcagatgctgatgtcgcagaagatgcggggccctggggacttgatggggccccagggcctcagtcctgaggagatggcccgggttcgggcccagaacagcagtggcgtgatgggcggcccgcagaagatgctgatgccttcacagtttcccaaccagggccagcagggattctctggaggccagggaccctaccaagccatgtcccaggacatgggcaatacccaagacatgttcagccctgatcagagctcaatgcccatgagcaacgtgggcaccacccggctcagccacatgcctctgccccctgcgtccaatcctcctgggaccgtgcattcagccccaaaccgggggctaggcaggcggccttcggacctcaccatcagtattaatcagatgggctcaccgggcatggggcacttgaagtcgcccacccttagccaggtgcactcacccctggtcacctcgccctctgccaacctcaagtcaccccagactccctcacagatggtgcccttgccttctgccaacccgccaggacctctcaagtcgccccaggtcctcggctcctccctcagtgtccgttcacccactggctcgcccagcaggctcaagtctccttccatggcggtgccttctccaggctgggttgcctcacctaagacggccatgcccagcccgggggtctcccagaacaagcagccgcctctcaacatgaactcttccaccaccctgagcaacatggaacagggtaccctcccgcctagcggcccccggagcagctcctcagcacctcccgccaaccctcccagcggcctcatgaaccccagcctaccattcacttcctccccagaccccacaccttcccagaaccccctgtcactgatgatgacccagatgtccaagtacgccatgcccagctccaccccgctctaccacaatgccatcaagaccatcgccacctcagacgacgagctgctgcccgaccggcccctgctgccccccccaccaccaccgcagggctccgggccagggatcagcaacagccagcccagccagatgcacctgaactcagccgctgcccagagccctatgggcatgaacctgccaggccagcagcccctgtcccatgagcccccgcccgccatgctgccctcccccacccctctgggctccaacattccactgcatcccaacgcacaggggacaggggggccccctcaaaactccatgatgatggccccagggggccccgactccctgaatgccccctgtggcccagtgcccagctcctcccagatgatgcccttcccccctcggctgcagcagccccatggtgccatgatggctgggcgcatgggcgacgcatacccaccgggtgtgctccctggggtggcatcagtgctgaacgaccccgagctgagcgaggtgatccggcccaccccaacggggatccccgagttcgacttgtcgaggatcatcccctctgagaagccaagcagcaccctccagtacttccccaagagcgagaaccagccccccaaggctcagccccctaatctgcatctcatgaacctgcagaacatgatggcggagcagactccctctcggcctcccaacctcccaggccagcagggcgtccagcgggggctcaacatgtccatgtgccaccctggacagatgtccttgctgggcaggacaggcgtgcccccacagcaggggatggtgccccatggcctgcaccagggggtcatgtcccctccacaaggcctcatgacccagcagaatttcatgctgatgaagcagcggggcgtggggggcgaggtctacagccagccgccccacatgctctccccgcagggctccctcatgggccccccgccccagcagaacctcatggtgtcccacccccttcggcagcgcagtgtgtccctggacagccagatgggctacctcccggcaccaggcggcatggccaacctgcccttctag

SEQ ID NO: 3225 - DNA, 1784 bp, Homo sapiens
  source 1..1784: mol_type = unassigned DNA
gcagcctgcactctcagaaatcagacttgagtggccggaacccttgagaccagaggcttaccatgctgctccctaggagggccaggaactgctgacgtgaccactggacagttattcgtgtctcttacaattaccaaacagaatggacaagcttaataaaataaccgtccccgccagtcagaagttgaggcagcttcaaaagatggtccatgatattaaaaacaatgaaggtggaataatgaataaaatcaaaaagctaaaagtcaaagcacctccaagtgttcctcgaagggactacgcttcagagagccctgctgacgaagaggagcagtggtccgatgactttgacagcgactatgaaaatccagatgagcactcggactcagagatgtacgtgatgcccgccgaggagaacgctgatgacagctacgagccgcctccagtagagcaggaaaccaggccggttcacccagccctgcccttcgccagaggcgagtatatagacaatcgatcaagccagaggcattccccacccttcagcaagacacttcccagtaagcccagctggccttcagagaaagcaaggctcacctccaccctgccggccctgactgctttgcagaaacctcaagtcccacccaaacccaaaggcctccttgaggatgaggctgattatgtggtccccgtggaagataatgatgaaaactatattcatcccacagaaagcagttcacctccacctgaaaaagctcccatggtgaatagatcaaccaagccaaattcctcaacgcccgcctctcctccaggaacagcttcaggtcgaaacagtggggcctgggaaaccaagtcacctccaccagctgcaccatccccgttgccacgggccgggaaaaaaccaacgacaccactgaagacaactccagttgcctctcaacagaatgcttcaagtgtttgtgaagaaaaacctatacctgctgaacgccaccgagggtcaagtcacagacaagaagctgtgcagtcaccagtgtttcctcctgcccagaaacaaatccaccaaaaacccatacctctgccaagatttacagaagggggaaacccaactgtggatgggcccctacccagcttttcatctaattccactatttcagaacaggaagctggcgttctctgcaagccatggtatgctggagcctgtgatcgaaagtctgctgaagaggcattgcacagatcaaacaaggatggatcatttcttattcggaaaagctctggccatgattccaaacaaccatatacactagttgtattctttaataagcgagtatataatattcctgtgcgatttattgaagcaacaaaacaatatgccttgggcagaaagaaaaatggtgaagagtactttggaagtgttgctgaaatcatcaggaatcatcaacatagtcctttggttcttattgacagtcagaataacacaaaagattccaccagactgaagtatgcagttaaagtttcataaagggggaaaaaaaagatcaataccattgcttcagacactttcccaaagtttctccttttgagaaaaagtcccaaaacttcatattttggattatgaatcatccagtaataaaatggaagatggagtcagctattgaagtggtcatccatttctttttaagaagctcatgtggacttgttctattgcctgacctgatgaactgttaatatctggtgaggttgagttatcatgctactaatattttccaaataaatatttttatttttaaaaa

SEQ ID NO: 3226 - DNA, 1715 bp, Homo sapiens
  source 1..1715: mol_type = unassigned DNA
gcagcctgcactctcagaaatcagacttgagtggccggaacccttgagaccagaggcttaccatgctgctccctaggagggccaggaactgctgacgtgaccactggacagttattcgtgtctcttacaattaccaaacagaatggacaagcttaataaaataaccgtccccgccagtcagaagttgaggcagcttcaaaagatggtccatgatattaaaaacaatgaaggtggaataatgaataaaatcaaaaagctaaaagtcaaagcacctccaagtgttcctcgaagggactacgcttcagagagccctgctgacgaagaggagcagtggtccgatgactttgacagcgactatgaaaatccagatgagcactcggactcagagatgtacgtgatgcccgccgaggagaacgctgatgacagctacgagccgcctccagtagagcaggaaaccaggccggttcacccagccctgcccttcgccagaggcgagtatatagacaatcgatcaagccagaggcattccccacccttcagcaagacacttcccagtaagcccagctggccttcagagaaagcaaggctcacctccaccctgccggccctgactgctttgcagaaacctcaagtcccacccaaacccaaaggcctccttgaggatgaggctgattatgtggtccccgtggaagataatgatgaaaactatattcatcccacagaaagcagttcacctccacctgaaaaaggtcgaaacagtggggcctgggaaaccaagtcacctccaccagctgcaccatccccgttgccacgggccgggaaaaaaccaacgacaccactgaagacaactccagttgcctctcaacagaatgcttcaagtgtttgtgaagaaaaacctatacctgctgaacgccaccgagggtcaagtcacagacaagaagctgtgcagtcaccagtgtttcctcctgcccagaaacaaatccaccaaaaacccatacctctgccaagatttacagaagggggaaacccaactgtggatgggcccctacccagcttttcatctaattccactatttcagaacaggaagctggcgttctctgcaagccatggtatgctggagcctgtgatcgaaagtctgctgaagaggcattgcacagatcaaacaaggatggatcatttcttattcggaaaagctctggccatgattccaaacaaccatatacactagttgtattctttaataagcgagtatataatattcctgtgcgatttattgaagcaacaaaacaatatgccttgggcagaaagaaaaatggtgaagagtactttggaagtgttgctgaaatcatcaggaatcatcaacatagtcctttggttcttattgacagtcagaataacacaaaagattccaccagactgaagtatgcagttaaagtttcataaagggggaaaaaaaagatcaataccattgcttcagacactttcccaaagtttctccttttgagaaaaagtcccaaaacttcatattttggattatgaatcatccagtaataaaatggaagatggagtcagctattgaagtggtcatccatttctttttaagaagctcatgtggacttgttctattgcctgacctgatgaactgttaatatctggtgaggttgagttatcatgctactaatattttccaaataaatatttttatttttaaaaa

SEQ ID NO: 3227 - DNA, 992 bp, Homo sapiens
  source 1..992: mol_type = unassigned DNA
aagttttacttctccctagagcaggggtgtttgccagcagcctgcactctcagaaatcagacttgagtggccggaacccttgagaccagaggcttaccatgctgctccctaggagggccaggaactgctgacgtgaccactggacagttattcgtgtctcttacaattaccaaacagaatggacaagcttaataaaataaccgtccccgccagtcagaagttgaggcagcttcaaaagatggtccatgatattaaaaacaatgaaggtggaataatgaataaaatcaaaaagctaaaagtcaaagcacctccaagtgttcctcgaagggactacgcttcagagagccctgctgacgaagaggagcagtggtccgatgactttgacagcgactatgaaaatccagatgagcactcggactcagagatgtacgtgatgcccgccgaggagaacgctgatgacagctacgagccgcctccagtagagcaggaaaccaggccggttcacccagccctgcccttcgccagaggcgagtatataatattcctgtgcgatttattgaagcaacaaaacaatatgccttgggcagaaagaaaaatggtgaagagtactttggaagtgttgctgaaatcatcaggaatcatcaacatagtcctttggttcttattgacagtcagaataacacaaaagattccaccagactgaagtatgcagttaaagtttcataaagggggaaaaaaaagatcaataccattgcttcagacactttcccaaagtttctccttttgagaaaaagtcccaaaacttcatattttggattatgaatcatccagtaataaaatggaagatggagtcagctattgaagtggtcatccatttctttttaagaagctcatgtggacttgttctattgcctgacctgatgaactgttaatatctggtgaggttgagttatcatgctactaatattttccaaataaatatttttattttt

SEQ ID NO: 3228 - DNA, 1002 bp, Homo sapiens
  source 1..1002: mol_type = unassigned DNA
aagttttacttctccctagagcaggggtgtttgccagcagcctgcactctcagaaatcagacttgagtggccggaacccttgagaccagaggcttaccatgctgctccctaggagggccaggaactgctgacgtgaccactggacagttattcgtgtctcttacaattaccaaacagaatggacaagcttaataaaataaccgtccccgccagtcagaagttgaggcagcttcaaaagatggtccatgatattaaaaacaatgaaggtggaataatgaataaaatcaaaaagctaaaagtcaaagcacctccaagtgttcctcgaagggactacgcttcagagagccctgctgacgaagaggagcagtggtccgatgactttgacagcgactatgaaaatccagatgagcactcggactcagagatgtacgtgatgcccgccgaggagaacgctgatgacagctacgagccgcctccagtagagcaggaaaccaggccggttcacccagccctgcccttcgccagaggcgagtatatagacaatcgatcaagccagaggcattccccacccttcagcaagacacttcccagtaagcccagctggccttcagagaaatactttggaagtgttgctgaaatcatcaggaatcatcaacatagtcctttggttcttattgacagtcagaataacacaaaagattccaccagactgaagtatgcagttaaagtttcataaagggggaaaaaaaagatcaataccattgcttcagacactttcccaaagtttctccttttgagaaaaagtcccaaaacttcatattttggattatgaatcatccagtaataaaatggaagatggagtcagctattgaagtggtcatccatttctttttaagaagctcatgtggacttgttctattgcctgacctgatgaactgttaatatctggtgaggttgagttatcatgctactaatattttccaaataaatatttttattttt

SEQ ID NO: 3229 - DNA, 1724 bp, Homo sapiens
  source 1..1724: mol_type = unassigned DNA
aagttttacttctccctagagcaggggtgtttgccagcagcctgcactctcagaaatcagacttgagtggccggaacccttgagaccagaggcttaccatgctgctccctaggagggccaggaactgctgacgtgaccactggacagttattcgtgtctcttacaattaccaaacagaatggacaagcttaataaaataaccgtccccgccagtcagaagttgaggcagcttcaaaagatggtccatgatattaaaaacaatgaaggtggaataatgaataaaatcaaaaagacagcgactatgaaaatccagatgagcactcggactcagagatgtacgtgatgcccgccgaggagaacgctgatgacagctacgagccgcctccagtagagcaggaaaccaggccggttcacccagccctgcccttcgccagaggcgagtatatagacaatcgatcaagccagaggcattccccacccttcagcaagacacttcccagtaagcccagctggccttcagagaaagcaaggctcacctccaccctgccggccctgactgctttgcagaaacctcaagtcccacccaaacccaaaggcctccttgaggatgaggctgattatgtggtccccgtggaagataatgatgaaaactatattcatcccacagaaagcagttcacctccacctgaaaaagctcccatggtgaatagatcaaccaagccaaattcctcaacgcccgcctctcctccaggaacagcttcaggtcgaaacagtggggcctgggaaaccaagtcacctccaccagctgcaccatccccgttgccacgggccgggaaaaaaccaacgacaccactgaagacaactccagttgcctctcaacagaatgcttcaagtgtttgtgaagaaaaacctatacctgctgaacgccaccgagggtcaagtcacagacaagaagctgtgcagtcaccagtgtttcctcctgcccagaaacaaatccaccaaaaacccatacctctgccaagatttacagaagggggaaacccaactgtggatgggcccctacccagcttttcatctaattccactatttcagaacaggaagctggcgttctctgcaagccatggtatgctggagcctgtgatcgaaagtctgctgaagaggcattgcacagatcaaacaaggatggatcatttcttattcggaaaagctctggccatgattccaaacaaccatatacactagttgtattctttaataagcgagtatataatattcctgtgcgatttattgaagcaacaaaacaatatgccttgggcagaaagaaaaatggtgaagagtactttggaagtgttgctgaaatcatcaggaatcatcaacatagtcctttggttcttattgacagtcagaataacacaaaagattccaccagactgaagtatgcagttaaagtttcataaagggggaaaaaaaagatcaataccattgcttcagacactttcccaaagtttctccttttgagaaaaagtcccaaaacttcatattttggattatgaatcatccagtaataaaatggaagatggagtcagctattgaagtggtcatccatttctttttaagaagctcatgtggacttgttctattgcctgacctgatgaactgttaatatctggtgaggttgagttatcatgctactaatattttccaaataaatatttttattttt

SEQ ID NO: 3230 - DNA, 1659 bp, Homo sapiens
  source 1..1659: mol_type = unassigned DNA
aagttttacttctccctagagcaggggtgtttgccagcagcctgcactctcagaaatcagacttgagtggccggaacccttgagaccagaggcttaccatgctgctccctaggagggccaggaactgctgacgtgaccactggacagttattcgtgtctcttacaattaccaaacagaatggacaagcttaataaaataaccgtccccgccagtcagaagttgaggcagcttcaaaagatggtccatgatattaaaaacaatgaaggtggaataatgaataaaatcaaaaagctaaaagtcaaagcacctccaagtgttcctcgaagggactacgcttcagagagccctgctgacgaagaggagcagtggtccgatgactttgacagcgactatgaaaatccagatgagcactcggactcagagatgtacgtgatgcccgccgaggagaacgctgatgacagctacgagccgcctccagtagagcaggaaaccaggccggttcacccagccctgcccttcgccagaggcgagtatatagacaatcgatcaagccagaggcattccccacccttcagcaagacacttcccagtaagcccagctggccttcagagaaagcaaggctcacctccaccctgccggccctgactgctttgcagaaacctcaagtcccacccaaacccaaaggcctccttgaggatgaggctgattatgtggtccccgtggaagataatgatgaaaactatattcatcccacagaaagcagttcacctccacctgaaaaagctcccatggtgaatagatcaaccaagccaaattcctcaacgcccgcctctcctccaggaacagcttcaggtcgaaacagtggggcctgggaaaccaagtcacctccaccagctgcaccatccccgttgccacgggccgggaaaaaaccaacgacaccactgaagacaactccagttgcctctcaacagaatgcttcaagtgtttgtgaagaaaaacctatacctgctgaacgccaccgagggtcaagtcacagacaagaagctgtgcagtcaccagtgtttcctcctgcccagaaacaaatccaccaaaaacccatacctctgccaagatttacagaagggggaaacccaactgtggatgggcccctacccagcttttcatctaattccactatttcagaacaggaagctggcgttctctgcaagccatggtatgctggagcctgtgatcgaaagtctgctgaagaggcattgcacagatcaaacaagtactttggaagtgttgctgaaatcatcaggaatcatcaacatagtcctttggttcttattgacagtcagaataacacaaaagattccaccagactgaagtatgcagttaaagtttcataaagggggaaaaaaaagatcaataccattgcttcagacactttcccaaagtttctccttttgagaaaaagtcccaaaacttcatattttggattatgaatcatccagtaataaaatggaagatggagtcagctattgaagtggtcatccatttctttttaagaagctcatgtggacttgttctattgcctgacctgatgaactgttaatatctggtgaggttgagttatcatgctactaatattttccaaataaatatttttattttt

SEQ ID NO: 3231 - DNA, 1710 bp, Homo sapiens
  source 1..1710: mol_type = unassigned DNA
aagttttacttctccctagagcaggggtgtttgccagcagcctgcactctcagaaatcagacttgagtggccggaacccttgagaccagaggcttaccatgctgctccctaggagggccaggaactgctgacgtgaccactggacagttattcgtgtctcttacaattaccaaacagaatggacaagcttaataaaataaccgtccccgccagtcagaagttgaggcagcttcaaaagatggtccatgatattaaaaacaatgaaggtggaataatgaataaaatcaaaaagctaaaagtcaaagcacctccaagtgttcctcgaagggactacgcttcagagagccctgctgacgaagaggagcagtggtccgatgactttgacagcgactatgaaaatccagatgagcactcggactcagagatgtacgtgatgcccgccgaggagaacgctgatgacagctacgagccgcctccagtagagcaggaaaccaggccggttcacccagccctgcccttcgccagaggcgagtatatagacaatcgatcaagccagaggcattccccacccttcagcaagacacttcccagtaagcccagctggccttcagagaaagcaaggctcacctccaccctgccggccctgactgctttgcagaaacctcaagtcccacccaaacccaaaggcctccttgaggatgaggctgattatgtggtccccgtggaagataatgatgaaaactatattcatcccacagaaagcagttcacctccacctgaaaaagctcccatggtgaatagatcaaccaagccaaattcctcaacgcccgcctctcctccaggaacagcttcaggtcgaaacagtggggcctgggaaaccaagtcacctccaccagctgcaccatccccgttgccacgggccgggaaaaaaccaacgacaccactgaagacaactccagttgcctctcaacagaatgcttcaagtgtttgtgaagaaaaacctatacctgctgaacgccaccgagggtcaagtcacagacaagaagctgtgcagtcaccagtgtttcctcctgcccagaaacaaatccaccaaaaacccatacctctgccaagatttacagaagggggaaacccaactgtggatgggcccctacccagcttttcatctaattccactatttcagaacaggaagctggcgttctctgcaagccatggtatgctggagcctgtgatcgaaagtctgctgaagaggcattgcacagatcaaacaaggacccacagcctccactgccctccaaacagtgggagacgagaaagctccagtactttggaagtgttgctgaaatcatcaggaatcatcaacatagtcctttggttcttattgacagtcagaataacacaaaagattccaccagactgaagtatgcagttaaagtttcataaagggggaaaaaaaagatcaataccattgcttcagacactttcccaaagtttctccttttgagaaaaagtcccaaaacttcatattttggattatgaatcatccagtaataaaatggaagatggagtcagctattgaagtggtcatccatttctttttaagaagctcatgtggacttgttctattgcctgacctgatgaactgttaatatctggtgaggttgagttatcatgctactaatattttccaaataaatatttttattttt

SEQ ID NO: 3232 - DNA, 1676 bp, Homo sapiens
  source 1..1676: mol_type = unassigned DNA
aagttttacttctccctagagcaggggtgtttgccagcagcctgcactctcagaaatcagacttgagtggccggaacccttgagaccagaggcttaccatgctgctccctaggagggccaggaactgctgacgtgaccactggacagttattcgtgtctcttacaattaccaaacagaatggacaagcttaataaaataaccgtccccgccagtcagaagttgaggcagcttcaaaagatggtccatgatattaaaaacaatgaaggtggaataatgaataaaatcaaaaagctaaaagtcaaagcacctccaagtgttcctcgaagggactacgcttcagagagccctgctgacgaagaggagcagtggtccgatgactttgacagcgactatgaaaatccagatgagcactcggactcagagatgtacgtgatgcccgccgaggagaacgctgatgacagctacgagccgcctccagtagagcaggaaaccaggccggttcacccagccctgcccttcgccagaggcgagtatatagacaatcgatcaagccagaggcattccccacccttcagcaagacacttcccagtaagcccagctggccttcagagaaagcaaggctcacctccaccctgccggccctgactgctttgcagaaacctcaagtcccacccaaacccaaaggcctccttgaggatgaggctgattatgtggtccccgtggaagataatgatgaaaactatattcatcccacagaaagcagttcacctccacctgaaaaaggaaaaaaccaacgacaccactgaagacaactccagttgcctctcaacagaatgcttcaagtgtttgtgaagaaaaacctatacctgctgaacgccaccgagggtcaagtcacagacaagaagctgtgcagtcaccagtgtttcctcctgcccagaaacaaatccaccaaaaacccatacctctgccaagatttacagaagggggaaacccaactgtggatgggcccctacccagcttttcatctaattccactatttcagaacaggaagctggcgttctctgcaagccatggtatgctggagcctgtgatcgaaagtctgctgaagaggcattgcacagatcaaacaaggatggatcatttcttattcggaaaagctctggccatgattccaaacaaccatatacactagttgtattctttaataagcgagtatataatattcctgtgcgatttattgaagcaacaaaacaatatgccttgggcagaaagaaaaatggtgaagagtactttggaagtgttgctgaaatcatcaggaatcatcaacatagtcctttggttcttattgacagtcagaataacacaaaagattccaccagactgaagtatgcagttaaagtttcataaagggggaaaaaaaagatcaataccattgcttcagacactttcccaaagtttctccttttgagaaaaagtcccaaaacttcatattttggattatgaatcatccagtaataaaatggaagatggagtcagctattgaagtggtcatccatttctttttaagaagctcatgtggacttgttctattgcctgacctgatgaactgttaatatctggtgaggttgagttatcatgctactaatattttccaaataaatatttttattttt

SEQ ID NO: 3233 - DNA, 1344 bp, Homo sapiens
  source 1..1344: mol_type = unassigned DNA
aagttttacttctccctagagcaggggtgtttgccagcagcctgcactctcagaaatcagacttgagtggccggaacccttgagaccagaggcttaccatgctgctccctaggagggccaggaactgctgacgtgaccactggacagttattcgtgtctcttacaattaccaaacagaatggacaagcttaataaaataaccgtccccgccagtcagaagttgaggcagcttcaaaagatggtccatgatattaaaaacaatgaaggtggaataatgaataaaatcaaaaagctaaaagtcaaagcacctccaagtgttcctcgaagggactacgcttcagagagccctgctgacgaagaggagcagtggtccgatgactttgacagcgactatgaaaatccagatgagcactcggactcagagatgtacgtgatgcccgccgaggagaacgctgatgacagctacgagccgcctccagtagagcaggaaaccaggccggttcacccagccctgcccttcgccagaggcgagtatataggtcgaaacagtggggcctgggaaaccaagtcacctccaccagctgcaccatccccgttgccacgggccgggaaaaaaccaacgacaccactgaagacaactccagttgcctctcaacagaatgcttcaagtgtttgtgaagaaaaacctatacctgctgaacgccaccgagggtcaagtcacagacaagaagctgtgcagtcaccagtgtttcctcctgcccagaaacaaatccaccaaaaacccatacctctgccaagatttacagaagggggaaacccaactgtggatgggcccctacccagcttttcatctaattccactatttcagaacaggaagctggcgttctctgcaagccatggtatgctggagcctgtgatcgaaagtctgctgaagaggcattgcacagatcaaacaagtactttggaagtgttgctgaaatcatcaggaatcatcaacatagtcctttggttcttattgacagtcagaataacacaaaagattccaccagactgaagtatgcagttaaagtttcataaagggggaaaaaaaagatcaataccattgcttcagacactttcccaaagtttctccttttgagaaaaagtcccaaaacttcatattttggattatgaatcatccagtaataaaatggaagatggagtcagctattgaagtggtcatccatttctttttaagaagctcatgtggacttgttctattgcctgacctgatgaactgttaatatctggtgaggttgagttatcatgctactaatattttccaaataaatatttttattttt

SEQ ID NO: 3234 - DNA, 3372 bp, Homo sapiens
  source 1..3372: mol_type = unassigned DNA
aaaccaaagcggccttttgagaagggatgtaagagcaggcccctgagcagtttcacttcctctgggcgcccagcagagcggagccctggccttgcgggcatgagccccggggctgcgtttcctgagacctggccgcagcctccgcgggtggcaagcgggctggggagagccgagggccaaaggaagagaaaatcgcggggagtctctggccgggagagtccaggtagcgctcggcgggcagcagtgcgcaggcccctcggcttcaaccgccacaatgctgccagcagcgccaggcaaggggcttgggagcccggaccccgccccctgcggcccagcgcccccaggaaatacaaaagatataataatgatatatgaagaagatgctgaggaatgggctctgtacttgacagaagtatttttacatgttgtgaaaagggaagccatcctgttatatcgcttggagaatttctcttttcggcatttggagttgctgaacttaacgtcttacaaatgtaaacttttgatattatcaaatagcctgcttagagacctaactccaaagaaatgtcagtttctggaaaagatacttcattcaccaaaaagtgtagttactttgctttgtggagtgaagagttcagatcagctctatgaattactaaatatctctcaaagcagatgggagatctcaactgaacaggaacctgaagactacatctctgtaatccagagtatcatattcaaagattctgaagactactttgaggtcaacattccaacagacctacgagcaaaacattctggggaaataagtgagagaaaggaaattgaagaactatcagaagcttcaagaaacaccataccactagcagtggtgcttcccactgaaattccatgtgagaatcctggtgaaatattcataattttgagagatgaagtaattggtgatactgtagaggttgaatttacatcaagtaataagcgcattagaacacggccagccctttggaataagaaagtctggtgcatgaaagctttagagtttcctgctggttcagtccatgtcaatgtctactgtgatggaatcgttaaagctacaaccaaaattaagtactacccaacagcaaaggcaaaggaatgcctattcagaatggcagattcaggagagagtttgtgccagaatagcattgaagaacttgatggtgtccttacatccatattcaaacatgagataccatattatgagttccagtctcttcaaactgaaatttgttctcaaaacaaatatactcatttcaaagaacttccaactcttctccactgtgcagcaaaatttggcttaaagaacctggctattcatttgcttcaatgttcaggagcaacctgggcatctaagatgaaaaatatggagggttcagaccccgcacatattgctgaaaggcatggtcacaaagaactcaagaaaatcttcgaagacttttcaatccaagaaattgacataaataatgagcaagaaaatgattatgaagaggatattgcctcattttccacatatattccttccacacagaacccagcatttcatcatgaaagcaggaagacatacgggcagagtgcagatggagctgaggcaaatgaaatggaaggggaaggaaaacagaatggatcaggcatggagaccaaacacagcccactagaggttggcagtgagagttctgaagaccagtatgatgacttgtatgtgttcattcctggtgctgatccagaaaataattcacaagagccactcatgagcagcagacctcctctccccccgccgcgacctgtagctaatgccttccaactggaaagacctcacttcaccttaccagggacaatggtggaaggccaaatggaaagaagtcaaaactggggtcatcctggtgttagacaagaaacaggagatgaacccaaaggagaaaaagagaagaaagaagaggaaaaagagcaggaggaggaagaagacccatatacttttgctgagattgatgacagtgaatatgacatgatattggccaatctgagtataaagaaaaaaactgggagtcggtctttcattataaatagacctcctgcccccacaccccgacccacaagtatacctccaaaagaggaaactacaccttacatagctcaagtgtttcaacaaaagacagccagaagacaatctgatgatgacaagttctgtggtcttcctaagaaacaagacagagctcggatagagagtccagccttttctactctcaggggctgtctaactgatggtcaggaagaactcatcctcctgcaggagaaagtaaagaatgggaaaatgtctatggatgaagctctggagaaatttaaacactggcagatgggaaaaagtggcctggaaatgattcagcaggagaaattacgacaactacgagactgcattattgggaaaaggccagaagaagaaaatgtctataataaactcaccattgtgcaccatccaggtggtaaggaaactgcccacaatgaaaataagttttataatgtacacttcagcaataagcttcctgctcgaccccaagttgaaaaggaatttggtttctgttgcaagaaagatcattaaagaaggttattataatgaaactcacgaatctacggacattttgctttcagggtgaagcaagcttgaatttggattgcctgctctctttaaagcgaattcatactatgacagcagaaacaaaacttcagatttcagaatttgttattggcaaaatttattctcattatacctgcttcatatgggtatattactattaaaacagaataccatagagtaattgcattatttgaaaattctctcattttacaatgcacttcaccaatgaaacagctaatttccattttgaaaattaaaagaaaacagcacagagaagttaaatgcggtgtagcaaagttatggggtctgcttgagggcactaacctcaacagattattcctcctctccttagaataaccatgaaaatacaaatttacttagcacatttttgctttttaagtagctggttcattttctgaatttctcacattcagagttccagtcattattgttacatcatgtttgcagaaaccttgtcttatttagtgtctatttgcatataaccctgaaaacattattatttgaaaacttttctatatctcaaattaatatacattttcataacctacctttgtattaagacttgcaattttatcaatctattatttcttagaaacaatttactagcttagaatagaaagcaatgttatcgtcatataattttcatgtacaaatgccacaaataaattgaatgtttaaagcta

SEQ ID NO: 3235 - DNA, 3044 bp, Homo sapiens
  source 1..3044: mol_type = unassigned DNA
aaaccaaagcggccttttgagaagggatgtaagagcaggcccctgagcagtttcacttcctctgggcgcccagcagagcggagccctggccttgcgggcatgagccccggggctgcgtttcctgagacctggccgcagcctccgcgggtggcaagcgggctggggagagccgagggccaaaggaagagaaaatcgcggggagtctctggccgggagagtccaggtagcgctcggcgggcagcagtgcgcaggcccctcggcttcaaccgccacaatgctgccagcagcgccaggcaaggggcttgggagcccggaccccgccccctgcggcccagcgcccccagattctgaagactactttgaggtcaacattccaacagacctacgagcaaaacattctggggaaataagtgagagaaaggaaattgaagaactatcagaagcttcaagaaacaccataccactagcagtggtgcttcccactgaaattccatgtgagaatcctggtgaaatattcataattttgagagatgaagtaattggtgatactgtagaggttgaatttacatcaagtaataagcgcattagaacacggccagccctttggaataagaaagtctggtgcatgaaagctttagagtttcctgctggttcagtccatgtcaatgtctactgtgatggaatcgttaaagctacaaccaaaattaagtactacccaacagcaaaggcaaaggaatgcctattcagaatggcagattcaggagagagtttgtgccagaatagcattgaagaacttgatggtgtccttacatccatattcaaacatgagataccatattatgagttccagtctcttcaaactgaaatttgttctcaaaacaaatatactcatttcaaagaacttccaactcttctccactgtgcagcaaaatttggcttaaagaacctggctattcatttgcttcaatgttcaggagcaacctgggcatctaagatgaaaaatatggagggttcagaccccgcacatattgctgaaaggcatggtcacaaagaactcaagaaaatcttcgaagacttttcaatccaagaaattgacataaataatgagcaagaaaatgattatgaagaggatattgcctcattttccacatatattccttccacacagaacccagcatttcatcatgaaagcaggaagacatacgggcagagtgcagatggagctgaggcaaatgaaatggaaggggaaggaaaacagaatggatcaggcatggagaccaaacacagcccactagaggttggcagtgagagttctgaagaccagtatgatgacttgtatgtgttcattcctggtgctgatccagaaaataattcacaagagccactcatgagcagcagacctcctctccccccgccgcgacctgtagctaatgccttccaactggaaagacctcacttcaccttaccagggacaatggtggaaggccaaatggaaagaagtcaaaactggggtcatcctggtgttagacaagaaacaggagatgaacccaaaggagaaaaagagaagaaagaagaggaaaaagagcaggaggaggaagaagacccatatacttttgctgagattgatgacagtgaatatgacatgatattggccaatctgagtataaagaaaaaaactgggagtcggtctttcattataaatagacctcctgcccccacaccccgacccacaagtatacctccaaaagaggaaactacaccttacatagctcaagtgtttcaacaaaagacagccagaagacaatctgatgatgacaagttctgtggtcttcctaagaaacaagacagagctcggatagagagtccagccttttctactctcaggggctgtctaactgatggtcaggaagaactcatcctcctgcaggagaaagtaaagaatgggaaaatgtctatggatgaagctctggagaaatttaaacactggcagatgggaaaaagtggcctggaaatgattcagcaggagaaattacgacaactacgagactgcattattgggaaaaggccagaagaagaaaatgtctataataaactcaccattgtgcaccatccaggtggtaaggaaactgcccacaatgaaaataagttttataatgtacacttcagcaataagcttcctgctcgaccccaagttgaaaaggaatttggtttctgttgcaagaaagatcattaaagaaggttattataatgaaactcacgaatctacggacattttgctttcagggtgaagcaagcttgaatttggattgcctgctctctttaaagcgaattcatactatgacagcagaaacaaaacttcagatttcagaatttgttattggcaaaatttattctcattatacctgcttcatatgggtatattactattaaaacagaataccatagagtaattgcattatttgaaaattctctcattttacaatgcacttcaccaatgaaacagctaatttccattttgaaaattaaaagaaaacagcacagagaagttaaatgcggtgtagcaaagttatggggtctgcttgagggcactaacctcaacagattattcctcctctccttagaataaccatgaaaatacaaatttacttagcacatttttgctttttaagtagctggttcattttctgaatttctcacattcagagttccagtcattattgttacatcatgtttgcagaaaccttgtcttatttagtgtctatttgcatataaccctgaaaacattattatttgaaaacttttctatatctcaaattaatatacattttcataacctacctttgtattaagacttgcaattttatcaatctattatttcttagaaacaatttactagcttagaatagaaagcaatgttatcgtcatataattttcatgtacaaatgccacaaataaattgaatgtttaaagctatgtctgagtttttaaagtaaatttataagaattagccaataaaattgcttctcggccttttggctaagatc

SEQ ID NO: 3236 - DNA, 3141 bp, Homo sapiens
  source 1..3141: mol_type = unassigned DNA
ctggccaacaagggctgcagaggatgcacacatcaggaagagggtgggggactacttgcttgctggttttgcttgcatctgatgagtagaaattcagcctattctttgttttggaaatacaaaagatataataatgatatatgaagaagatgctgaggaatgggctctgtacttgacagaagtatttttacatgttgtgaaaagggaagccatcctgttatatcgcttggagaatttctcttttcggcatttggagttgctgaacttaacgtcttacaaatgtaaacttttgatattatcaaatagcctgcttagagacctaactccaaagaaatgtcagtttctggaaaagatacttcattcaccaaaaagtgtagttactttgctttgtggagtgaagagttcagatcagctctatgaattactaaatatctctcaaagcagatgggagatctcaactgaacaggaacctgaagactacatctctgtaatccagagtatcatattcaaagattctgaagactactttgaggtcaacattccaacagacctacgagcaaaacattctggggaaataagtgagagaaaggaaattgaagaactatcagaagcttcaagaaacaccataccactagcagtggtgcttcccactgaaattccatgtgagaatcctggtgaaatattcataattttgagagatgaagtaattggtgatactgtagaggttgaatttacatcaagtaataagcgcattagaacacggccagccctttggaataagaaagtctggtgcatgaaagctttagagtttcctgctggttcagtccatgtcaatgtctactgtgatggaatcgttaaagctacaaccaaaattaagtactacccaacagcaaaggcaaaggaatgcctattcagaatggcagattcaggagagagtttgtgccagaatagcattgaagaacttgatggtgtccttacatccatattcaaacatgagataccatattatgagttccagtctcttcaaactgaaatttgttctcaaaacaaatatactcatttcaaagaacttccaactcttctccactgtgcagcaaaatttggcttaaagaacctggctattcatttgcttcaatgttcaggagcaacctgggcatctaagatgaaaaatatggagggttcagaccccgcacatattgctgaaaggcatggtcacaaagaactcaagaaaatcttcgaagacttttcaatccaagaaattgacataaataatgagcaagaaaatgattatgaagaggatattgcctcattttccacatatattccttccacacagaacccagcatttcatcatgaaagcaggaagacatacgggcagagtgcagatggagctgaggcaaatgaaatggaaggggaaggaaaacagaatggatcaggcatggagaccaaacacagcccactagaggttggcagtgagagttctgaagaccagtatgatgacttgtatgtgttcattcctggtgctgatccagaaaataattcacaagagccactcatgagcagcagacctcctctccccccgccgcgacctgtagctaatgccttccaactggaaagacctcacttcaccttaccagggacaatggtggaaggccaaatggaaagaagtcaaaactggggtcatcctggtgttagacaagaaacaggagatgaacccaaaggagaaaaagagaagaaagaagaggaaaaagagcaggaggaggaagaagacccatatacttttgctgagattgatgacagtgaatatgacatgatattggccaatctgagtataaagaaaaaaactgggagtcggtctttcattataaatagacctcctgcccccacaccccgacccacaagtatacctccaaaagaggaaactacaccttacatagctcaagtgtttcaacaaaagacagccagaagacaatctgatgatgacaagttctgtggtcttcctaagaaacaagacagagctcggatagagagtccagccttttctactctcaggggctgtctaactgatggtcaggaagaactcatcctcctgcaggagaaagtaaagaatgggaaaatgtctatggatgaagctctggagaaatttaaacactggcagatgggaaaaagtggcctggaaatgattcagcaggagaaattacgacaactacgagactgcattattgggaaaaggccagaagaagaaaatgtctataataaactcaccattgtgcaccatccaggtggtaaggaaactgcccacaatgaaaataagttttataatgtacacttcagcaataagcttcctgctcgaccccaagttgaaaaggaatttggtttctgttgcaagaaagatcattaaagaaggttattataatgaaactcacgaatctacggacattttgctttcagggtgaagcaagcttgaatttggattgcctgctctctttaaagcgaattcatactatgacagcagaaacaaaacttcagatttcagaatttgttattggcaaaatttattctcattatacctgcttcatatgggtatattactattaaaacagaataccatagagtaattgcattatttgaaaattctctcattttacaatgcacttcaccaatgaaacagctaatttccattttgaaaattaaaagaaaacagcacagagaagttaaatgcggtgtagcaaagttatggggtctgcttgagggcactaacctcaacagattattcctcctctccttagaataaccatgaaaatacaaatttacttagcacatttttgctttttaagtagctggttcattttctgaatttctcacattcagagttccagtcattattgttacatcatgtttgcagaaaccttgtcttatttagtgtctatttgcatataaccctgaaaacattattatttgaaaacttttctatatctcaaattaatatacattttcataacctacctttgtattaagacttgcaattttatcaatctattatttcttagaaacaatttactagcttagaatagaaagcaatgttatcgtcatataattttcatgtacaaatgccacaaataaattgaatgtttaaagcta

SEQ ID NO: 3237 - DNA, 3544 bp, Homo sapiens
  source 1..3544: mol_type = unassigned DNA
tttggtttctcttcaagaattaacaaaccacttactcttgaattctcttctagttaacacaggcatcactacttccaattgatctcaggatgtgggatcctcatacacattttgaacaaaatcctctgtttcagcaaggaattcatatttgcatatggtgaagatggtttctgaagtgagatcagaagtagagcttctaatgacccccagaagcactgagtgaccaagtgacatacctgccaggcccattgtgtccatcgctctcagagcagctggggattgtgcttggctcccagagctatggtgcaaaaggcggggtcgctagggccactcagggaaagagaacccagaaacatggcatgctgacaaaaggtagtctctgcttatccagcttcactttctgctgatttagttacccatggtcaactgccatctgaaaataggaaatacaaaagatataataatgatatatgaagaagatgctgaggaatgggctctgtacttgacagaagtatttttacatgttgtgaaaagggaagccatcctgttatatcgcttggagaatttctcttttcggcatttggagttgctgaacttaacgtcttacaaatgtaaacttttgatattatcaaatagcctgcttagagacctaactccaaagaaatgtcagtttctggaaaagatacttcattcaccaaaaagtgtagttactttgctttgtggagtgaagagttcagatcagctctatgaattactaaatatctctcaaagcagatgggagatctcaactgaacaggaacctgaagactacatctctgtaatccagagtatcatattcaaagattctgaagactactttgaggtcaacattccaacagacctacgagcaaaacattctggggaaataagtgagagaaaggaaattgaagaactatcagaagcttcaagaaacaccataccactagcagtggtgcttcccactgaaattccatgtgagaatcctggtgaaatattcataattttgagagatgaagtaattggtgatactgtagaggttgaatttacatcaagtaataagcgcattagaacacggccagccctttggaataagaaagtctggtgcatgaaagctttagagtttcctgctggttcagtccatgtcaatgtctactgtgatggaatcgttaaagctacaaccaaaattaagtactacccaacagcaaaggcaaaggaatgcctattcagaatggcagattcaggagagagtttgtgccagaatagcattgaagaacttgatggtgtccttacatccatattcaaacatgagataccatattatgagttccagtctcttcaaactgaaatttgttctcaaaacaaatatactcatttcaaagaacttccaactcttctccactgtgcagcaaaatttggcttaaagaacctggctattcatttgcttcaatgttcaggagcaacctgggcatctaagatgaaaaatatggagggttcagaccccgcacatattgctgaaaggcatggtcacaaagaactcaagaaaatcttcgaagacttttcaatccaagaaattgacataaataatgagcaagaaaatgattatgaagaggatattgcctcattttccacatatattccttccacacagaacccagcatttcatcatgaaagcaggaagacatacgggcagagtgcagatggagctgaggcaaatgaaatggaaggggaaggaaaacagaatggatcaggcatggagaccaaacacagcccactagaggttggcagtgagagttctgaagaccagtatgatgacttgtatgtgttcattcctggtgctgatccagaaaataattcacaagagccactcatgagcagcagacctcctctccccccgccgcgacctgtagctaatgccttccaactggaaagacctcacttcaccttaccagggacaatggtggaaggccaaatggaaagaagtcaaaactggggtcatcctggtgttagacaagaaacaggagatgaacccaaaggagaaaaagagaagaaagaagaggaaaaagagcaggaggaggaagaagacccatatacttttgctgagattgatgacagtgaatatgacatgatattggccaatctgagtataaagaaaaaaactgggagtcggtctttcattataaatagacctcctgcccccacaccccgacccacaagtatacctccaaaagaggaaactacaccttacatagctcaagtgtttcaacaaaagacagccagaagacaatctgatgatgacaagttctgtggtcttcctaagaaacaagacagagctcggatagagagtccagccttttctactctcaggggctgtctaactgatggtcaggaagaactcatcctcctgcaggagaaagtaaagaatgggaaaatgtctatggatgaagctctggagaaatttaaacactggcagatgggaaaaagtggcctggaaatgattcagcaggagaaattacgacaactacgagactgcattattgggaaaaggccagaagaagaaaatgtctataataaactcaccattgtgcaccatccaggtggtaaggaaactgcccacaatgaaaataagttttataatgtacacttcagcaataagcttcctgctcgaccccaagttgaaaaggaatttggtttctgttgcaagaaagatcattaaagaaggttattataatgaaactcacgaatctacggacattttgctttcagggtgaagcaagcttgaatttggattgcctgctctctttaaagcgaattcatactatgacagcagaaacaaaacttcagatttcagaatttgttattggcaaaatttattctcattatacctgcttcatatgggtatattactattaaaacagaataccatagagtaattgcattatttgaaaattctctcattttacaatgcacttcaccaatgaaacagctaatttccattttgaaaattaaaagaaaacagcacagagaagttaaatgcggtgtagcaaagttatggggtctgcttgagggcactaacctcaacagattattcctcctctccttagaataaccatgaaaatacaaatttacttagcacatttttgctttttaagtagctggttcattttctgaatttctcacattcagagttccagtcattattgttacatcatgtttgcagaaaccttgtcttatttagtgtctatttgcatataaccctgaaaacattattatttgaaaacttttctatatctcaaattaatatacattttcataacctacctttgtattaagacttgcaattttatcaatctattatttcttagaaacaatttactagcttagaatagaaagcaatgttatcgtcatataattttcatgtacaaatgccacaaataaattgaatgtttaaagctatgtctgagtttttaaagtaaatttataagaattagccaataaaattgcttctcggccttttggctaagatcaa

SEQ ID NO: 3238 - DNA, 2115 bp, Homo sapiens
  source 1..2115: mol_type = unassigned DNA
gagacctggccgcagcctccgcgggtggcaagcgggctggggagagccgagggccaaaggaagagaaaatcgcggggagtctctggccgggagagtccaggtagcgctcggcgggcagcagtgcgcaggcccctcggcttcaaccgccacaatgctgccagcagcgccaggcaaggggcttgggagcccggaccccgccccctgcggcccagcgcccccagattctgaagactactttgaggtcaacattccaacagacctacgagcaaaacattctggggaaataagtgagagaaaggaaattgaagaactatcagaagcttcaagaaacaccataccactagcagtggtgcttcccactgaaattccatgtgagaatcctggtgaaatattcataattttgagagatgaagtaattggtgatactgtagaggttgaatttacatcaagtaataagcgcattagaacacggccagccctttggaataagaaagtctggtgcatgaaagctttagagtttcctgctggttcagtccatgtcaatgtctactgtgatggaatcgttaaagctacaaccaaaattaagtactacccaacagcaaaggcaaaggaatgcctattcagaatggcagattcaggagagagtttgtgccagaatagcattgaagaacttgatggtgtccttacatccatattcaaacatgagataccatattatgagttccagtctcttcaaactgaaatttgttctcaaaacaaatatactcatttcaaagaacttccaactcttctccactgtgcagcaaaatttggcttaaagaacctggctattcatttgcttcaatgttcaggagcaacctgggcatctaagatgaaaaatatggagggttcagaccccgcacatattgctgaaaggcatggtcacaaagaactcaagaaaatcttcgaagacttttcaatccaagaaattgacataaataatgagcaagaaaatgattatgaagaggatattgcctcattttccacatatattccttccacacagaacccagcatttcatcatgaaagcaggaagacatacgggcagagtgcagatggagctgaggcaaatgaaatggaaggggaaggaaaacagaatggatcaggcatggagaccaaacacagcccactagaggttggcagtgagagttctgaagaccagtatgatgacttgtatgtgttcattcctggtgctgatccagaaaataattcacaagagccactcatgagcagcagacctcctctccccccgccgcgacctgtagctaatgccttccaactggaaagacctcacttcaccttaccagggacaatggtggaaggccaaatggaaagaagtcaaaactggggtcatcctggtgttagacaagaaacaggagatgaacccaaaggagaaaaagagaagaaagaagaggaaaaagagcaggaggaggaagaagacccatatacttttgctgagattgatgacagtgaatatgacatgatattggccaatctgagtataaagaaaaaaactgggagtcggtctttcattataaatagacctcctgcccccacaccccgacccacaagtatacctccaaaagaggaaactacaccttacatagctcaagtgtttcaacaaaagacagccagaagacaatctgatgatgacaagttctgtggtcttcctaagaaacaagacagagctcggatagagagtccagccttttctactctcaggggctgtctaactgatggtcaggaagaactcatcctcctgcaggagaaagtaaagaatgggaaaatgtctatggatgaagctctggagaaatttaaacactggcagatgggaaaaagtggcctggaaatgattcagcaggagaaattacgacaactacgagactgcattattgggaaaaggccagaagaagaaaatgtctataataaactcaccattgtgcaccatccaggtggtaaggaaactgcccacaatgaaaataagttttataatgtacacttcagcaataagcttcctgctcgaccccaagttgaaaaggaatttggtttctgttgcaagaaagatcattaaagaag

SEQ ID NO: 3239 - DNA, 2448 bp, Homo sapiens
  source 1..2448: mol_type = unassigned DNA
acttccttttcgtggcactataaagggtgctgcacggcgcttgcatctcttcgcctctcggagctggaaatgcagctattgagatcttcgaatgctgcggagctggaggcggaggcagctggggaggtccgagcgatgtgaccaggccgccatcgctcgtctcttcctctctcctgccgcctcctgtctcgaaaataacttttttagtctaaagaaagaaagacaaaagtagtcgtccgcccctcacgccctctcttcctctcagccttccgcccggtgaggaagcccggggtggctgctccgccgtcggggccgcgccgccgagccccagccgccccgggccgcccccgcacgccgcccccatgcatcccttctacacccgggccgccaccatgataggcgagatcgccgccgccgtgtccttcatctccaagtttctccgcaccaaggggctcacgagcgagcgacagctgcagaccttcagccagagcctgcaggagctgctggcagaacattataaacatcactggttcccagaaaagccatgcaagggatcgggttaccgttgtattcgcatcaaccataaaatggatcctctgattggacaggcagcacagcggattggactgagcagtcaggagctgttcaggcttctcccaagtgaactcacactctgggttgacccctatgaagtgtcctacagaattggagaggatggctccatctgtgtgctgtatgaagcctcaccagcaggaggtagcactcaaaacagcaccaacgtgcaaatggtagacagccgaatcagctgtaaggaggaacttctcttgggcagaacgagcccttccaaaaactacaatatgatgactgtatcaggttaagatatagtctgtggatggatcatctgatgatgatggataaatttgatttttgctttgggtgggctcctcttggggatggattatggaatttaaaccatgtcacagctgtgaagatctggcacaagatagaatggtaaaaaaaaaaaaaattttaagtgacagtgccatagtttggacagtacctttcaatgattaattttaatagcctgtgagtccaagtaaatgatcactttatttgctagggagggaagtcctagggtggtttcagtttctcccagacatacctaaatttttacatcaatccttttaaagaaaatctgtatttcaaagaatctttctctgcagtaaatctcgcaggggaatttgcactattacacttgaaagttgttattgttaaccttttcggcagcttttaataggaaagttaaacgttttaaacatggtagtactggaaattttacaagacttttacctagcacttaaatatgtataaatgtacataaagacaaactagtaagcatgacctggggaaatggtcagaccttgtattgtgtttttggccttgaaagtagcaagtgaccagaatctgccatggcaacaggctttaaaaaagacccttaaaaagacactgtctcaactgtggtgttagcaccagccagctctctgtacatttgctagcttgtagttttctaagactgagtaaacttcttatttttagaaagtggaggtctggtttgtaactttccttgtacttaattgggtaaaagtcttttccacaaaccaccatctattttgtgaactttgttagtcatcttttatttggtaaattatgaactggtgtaaatttgtacagttcatgtatattgattgtggcaaagttgtacagatttctatattttggatgagaaatttttcttctctctataataaatcgtttcttatcttggcattttaatcaatctcttgtcatgattatagaggtttagctaaaagtattttttcttagaagacaggttctataaactgaatctctgttgcacactggtcatgctggaaaaacatttgatgaggaatgaagatgctctgtatatacatgtttaggttttacaggaaacacaggagtagcatgttttaaaaatttctaaagtcaaaacatggacacattcacaggctaatgatctcatgaaataaggataagagaccacggtagcatctaccaaaaatgtgatactcaaaggattacatttcattgcttccctgttgaagtgaagatataaatgttccattctgacccacctttgaaaaacaattactttgccccatggattctttgttcaattagaaatttccccggggcaggtgacccatagtcttaaagaacaggctaaacaccacagagagattggttgctttttgcttttcatcacctgcaagatgtacataaaaatcacataagctggaattcaacaaaaggtatgtttatgaacttttattctcaaaagttgaaatgctgactttctcgattcctcattttcagacttttatttcagataaatactaaaaacctaag

SEQ ID NO: 3240 - DNA, 1018 bp, Homo sapiens
  source 1..1018: mol_type = unassigned DNA
cctgaagggcctccaagggagacgcctagaagatggaggcccagattcttgagacgtttctctttctgatctagcaggagggacaaagagctcctccactccctcattccccaagaaggcccccagcctacccagtttccgtgaccattccgccctgggaaagcggcttcccagacctccttatctatttttcttgaatcatgagagatgaaattgcaacaacagttttctttgtcacaagattggtgaaaaaacatgataaactaagtaaacagcaaatagaagactttgcagaaaagctgatgacgatcttgtttgaaacatacagaagtcactggcactctgattgcccttctaaagggcaagccttcaggtgcatcaggataaacaacaatcagaataaagatcccattctagaaagggcatgtgtggaaagtaatgtagatttttctcacctgggacttccgaaggagatgaccatatgggtagatccctttgaagtatgctgtaggtatggtgagaaaaaccatccatttacagttgcttcttttaaaggcagatgggaggaatgggaactatatcaacaaatcagttatgccgttagtagagcctcatcagacgtttcctctggcacttcctgcgatgaagaaagttgtagcaaggaacctcgtgtcattcctaaagtcagcaatccgaagagtatttatcaggttgaaaacttgaaacagccctttcaatcttggttacaaatcccccgcaaaaagaatgtggtggacggccgtgttggcctcctgggaaacacttaccatggctcgcagaagcatcctaagtgttacaggcctgctatgcaccggctggacagaattttataacccacatctgggaatgaatttgcagcacctggtagaagaaggcaccttggaaggcactgccttgggcttccatggcaggaagatgagaagaaatcttcagggtgatttctggagcctgaaaagaataaaaaacaaaaccaaaccta

SEQ ID NO: 3241 - DNA, 754 bp, Homo sapiens
  source 1..754: mol_type = unassigned DNA
ccaagggagacgcctagaagatggaggcccagattcttgagacgtttctctttctgatctagcaggagggacaaagagctcctccactccctcattccccaagaaggcccccagcctacccagtttccgtgaccattccgccctgggaaagcggcttcccagttgaagtcacgaggagttctccaagaaaggtctgctggctgattcttcattgacctaccagtccctgctatcaaggacactagaacctccttatctatttttcttgaatcatgagagatgaaattgcaacaacagttttctttgtcacaagattggtgaaaaaacatgataaactaagtaaacagcaaatagaagactttgcagaaaagctgatgacgatcttgtttgaaacatacagaagtcactggcactctgattgcccttctaaagggcaagccttcaggtgcatcaggataaacaacaatcagaataaagatcccattctagaaagggcatgtgtggaaagtaatgtagatttttctcacctgggacttccgaaggagatgaccatatgggtagatccctttgaagtatgctgtaggtatggtgagaaaaaccatccatttacagttgcttcttttaaaggcagatgggaggaatgggaactatatcaacaaatcagttatgccgttagtagagcctcatcagacgtttcctctggcacttcctgcgatgaagaaagttgtagcaaggaacctcgtgtcattcctaa

SEQ ID NO: 3242 - DNA, 4288 bp, Homo sapiens
  source 1..4288: mol_type = unassigned DNA
atggagccatctcagtgtgtggaggagctggaggatgatgtgttccaaccagaggatggggagccggtgacccaacccgggagcttgctctctgctgacctgtttgcccagagcctactggactgccccctcagccgacttcagctcttccctctcacccactgctgtggccctggccttcgacccaccagccaggaagacaaagctacccagactctcagcccagcctcccccagccaaggtgtcatgctgccttgtggggtgactgaggaaccccagcgactcttttatgcaccagcagaaccaaaatcgtgtgtggtggcagatcctcctcttcctgcacaaccttgctttgaatggagaagagaacaggaacggggcaggccctaggtgagggtgggctgccctcttcacatggggcaccaggaacaccgtctggaacaggaaggacatcgggcaggactgacactgtgtcttgtgaaattgtttttttgttgttattttgtgttttaattttttttaatttctctctgagtgtacatacaacatactcaagcgggaccttctttctctgtcaggcccttgacctggaatgggggcctttgtcaaacactgttgaaggagaggctgatgtgtctgtgatggtgagaattcccaagggctctgacaagtagattcttcgactgaggaatctaccagttgtcgaagatgatccgttagtgatgttctctgggaagtggactgtggtttttccagaggaactcagttaagaaatcgagagtggattagactcccagttccaccaaacctatgagccttccactgtggatgggggccgtgatcctgatggtcacattgctttaacccagcagggcttcggccaggggctttccacttgaggatagcagcttcactaggctggccggccagctccacatctgactgggttcttacttctcagccagtacctgccccatgggctcaaggattcctggccagctcctgccacctccagcagacctcagggagggttgagtttctctaaggacccctcaaacatgtcgcaaaatgaaccaaacttctggctaggcctcaaaactgacttggtcccacttggaggccccaggattggtcctgaggtacagagccactgccaccactggcggcctgggaccagctgggtgtcagccacggatgagccgaatagccagtcagcatgttgctgctggcagcctgtgcctttgtcagctcttctttcaaaagaccccaccgacagaccgcattccacccccaacatcggcactgagggacatcgggggcaagtttgcagtggggccggaaaatatggtggccaccctaccatgagagtcagccgtaggggaccccagaccccttggtttccttggaaacaacatacctcttcccccttatccccagtcctttttcatacctagtgggatacagaagaagccaggacagtggctttgccagctaagtgacttttagagtaacagataacgattagagtggggaaccgtcaaagctgggtacacatttcctatcttcctccagcttccagctaggccagaagggcatgctctggaacccagcaggatcacagctgcctgtgcacgtcttcccttctctccctgctgcggcacttatggagaggatctaaagcagccggtgtggcagctccgatagcaggcacagggaatctgttaaccagacgctagaaactaaattataacttttgcatatgtgagaaaagacaacattggtgctaacagtgaagtaaggcccaaaggaaagacggcttccctggacaaagaagacctcagggctacccaaggaaataggaggagtctagagtagactcacaaatctgaacaagcccaagtcttccagttctgaggagaggaggtcttcagtactattgaaggagacattgatcttctggatgtacagttgtgcaggttgttcactgcacaagggcacctgcagctaatggaggctggaattcagcttgtgttctgctcactaagctgtgtgcgtgccctggtgtggggctacttctcccaagaagaaggggtgcctttcctaatttgcaaaggtgccatatgggctcacagcaccctggaggagaagggcctcaaactgtgcatgtaagcctttgttttgttctgctcagatattctggatattacctcttcttggtcagaattctattctcagggtgtgtaccatgatttgtctgctaagaagacgggttcctgctttgcagagaaggagccggggaccagcttgaagactggctctgggacacactgaccattgtgaaattcagccttccctgtgggtctccataccattttatgatgtgtatgggacatacgttgttctcccctctctggatcaaggtggtgacaggcagcctgctgccgtatgcttcagtggcacacaccaaaaaaccgggattatttacagcagccactattcaccccttttggcagactctccacctgagttcagtgagagagaaaatgatttagatcttggtgctggggcaaggccatcagcttcagagaccttgccaggcccaggctgggtgccctgtggcctgagaactgagcccagactttgacaaacccacctcaacatcaagcctggggcaggtggaaggtggtctgactgcactgtctccatcttatgcaaagccaggaactcactcactgtcttaagtgagccagggcaaaatttacacccctcacgtttccctctcccttcttccccaccaacaaaacccaggaggtagctggcagagtagctgtcaggaaggagaaaggttctttctggctggttgtttttaattggcttagtgatctaaactggccccttcctcctctgcctggtgagttggcctaaacattcctcaagtctagcctcaggagacctgcccctcccccccgacctccaccccctcagactccatcccccacccccaggagcctggctgtctctagcgaggggtggagaatcagatttagagggagggagagtctgacctggatcctgacctgtaaccagctgaagacggtggaggctttgtggcttgctgagggtgggggttgggagagggactggaaaccttcctcctcgggaaagaaatgcctgggaggaagggaagcctgatattcagggtcaaaacagcccttctaattcacaaccccaaagcaggggtttctagaagttggtcaacagatctggtgagggaagtccccaggccagacgctggactcctgcaatgagggtggaggactcagcctggcctctgcctggcctgtttcaaagtctgggccactggcagccttctcttgctcaatccgaggtggaaaaagatcacctcccagtgacctccctcagcccccaggggagtaggtctgtgtccaaagctatgtggcaggcttgtttgaaggacccagaggggcccagctgacctgtctcactgctcctggcagcccagccccatcggcaggtggcccctgcctgggggttattcgggatggttcagccagggcctcccaggaagagtgctgtggagccacggtgactgtcctggacagcaaggagcatgctaccccagtgagcacttctttttgagggacttgatggggaggtggggtaggcagaagggacgtggcagaagcgggaagactttggtcaccatggctctgcaggccttctgcaaatcagtgctggcctgggctggaaacagctctgtgtgtgaaggtgaggactcttggaagcaggccatcctggccagacaccctagcaggaaggggctcacctgtcacccttaggcagcctgagggctggtggggacttttgagtcttgaggggatagcggaaaaagctgagctcataggtgcccagccagcctcccagctaaaggtgctcagagccccactgccccctctctctgtgcaggtggccagtgcccctccctgctctgggagcattgctagccttctaccccatccctggatccacaggggctatcgaggagacccagtgagaatgtagcattttgttcatccccagggtagctgccctggggtctgggcactctgcctctgggagagaggaagaagaaaggggccccattttttaaaaaactgtacagagcctttggctttatgtgtttatgttcttcacatgcatatgtgtgtatgtgtgtatatctttccccccatcaattggtacaatttttaataaaatcatttaaagc

SEQ ID NO: 3243 - DNA, 4687 bp, Homo sapiens
  source 1..4687: mol_type = unassigned DNA
ggaaacaataccgcaccgtgcggagtggcctcctcccgccccggcctgtgcccgccgccgccgccgcccctgcctgcgcctcccgcctcctgccgcagcccgctgggctttttccctccttcccaatcgagtctgggcgtccagcccccgagtgctcgtcacgctggaccctggcgcggagccctggcatcacgactcggaggccgagactctctcctggagtcacccaggagagatggagccatctcagtgtgtggaggagctggaggatgatgtgttccaaccagaggatggggagccggtgacccaacccgggagcttgctctctgctgacctgtttgcccagagcctactggactgccccctcagccgacttcagctcttccctctcacccactgctgtggccctggccttcgacccaccagccaggaagacaaagctacccagactctcagcccagcctcccccagccaaggtgtcatgctgccttgtggggtgactgaggaaccccagcgactcttttatggcaatgctggctatcggcttcctctccctgccagtttcccagcagtcttgcccattggggagcagccccccgaagggcagtggcaacatcaagcagaggtacagattgcccgaaagcttcagtgcattgcagaccagttccaccggcttcatgtgcagcaacaccagcagaaccaaaatcgtgtgtggtggcagatcctcctcttcctgcacaaccttgctttgaatggagaagagaacaggaacggggcaggccctaggtgagggtgggctgccctcttcacatggggcaccaggaacaccgtctggaacaggaaggacatcgggcaggactgacactgtgtcttgtgaaattgtttttttgttgttattttgtgttttaattttttttaatttctctctgagtgtacatacaacatactcaagcgggaccttctttctctgtcaggcccttgacctggaatgggggcctttgtcaaacactgttgaaggagaggctgatgtgtctgtgatggtgagaattcccaagggctctgacaagtagattcttcgactgaggaatctaccagttgtcgaagatgatccgttagtgatgttctctgggaagtggactgtggtttttccagaggaactcagttaagaaatcgagagtggattagactcccagttccaccaaacctatgagccttccactgtggatgggggccgtgatcctgatggtcacattgctttaacccagcagggcttcggccaggggctttccacttgaggatagcagcttcactaggctggccggccagctccacatctgactgggttcttacttctcagccagtacctgccccatgggctcaaggattcctggccagctcctgccacctccagcagacctcagggagggttgagtttctctaaggacccctcaaacatgtcgcaaaatgaaccaaacttctggctaggcctcaaaactgacttggtcccacttggaggccccaggattggtcctgaggtacagagccactgccaccactggcggcctgggaccagctgggtgtcagccacggatgagccgaatagccagtcagcatgttgctgctggcagcctgtgcctttgtcagctcttctttcaaaagaccccaccgacagaccgcattccacccccaacatcggcactgagggacatcgggggcaagtttgcagtggggccggaaaatatggtggccaccctaccatgagagtcagccgtaggggaccccagaccccttggtttccttggaaacaacatacctcttcccccttatccccagtcctttttcatacctagtgggatacagaagaagccaggacagtggctttgccagctaagtgacttttagagtaacagataacgattagagtggggaaccgtcaaagctgggtacacatttcctatcttcctccagcttccagctaggccagaagggcatgctctggaacccagcaggatcacagctgcctgtgcacgtcttcccttctctccctgctgcggcacttatggagaggatctaaagcagccggtgtggcagctccgatagcaggcacagggaatctgttaaccagacgctagaaactaaattataacttttgcatatgtgagaaaagacaacattggtgctaacagtgaagtaaggcccaaaggaaagacggcttccctggacaaagaagacctcagggctacccaaggaaataggaggagtctagagtagactcacaaatctgaacaagcccaagtcttccagttctgaggagaggaggtcttcagtactattgaaggagacattgatcttctggatgtacagttgtgcaggttgttcactgcacaagggcacctgcagctaatggaggctggaattcagcttgtgttctgctcactaagctgtgtgcgtgccctggtgtggggctacttctcccaagaagaaggggtgcctttcctaatttgcaaaggtgccatatgggctcacagcaccctggaggagaagggcctcaaactgtgcatgtaagcctttgttttgttctgctcagatattctggatattacctcttcttggtcagaattctattctcagggtgtgtaccatgatttgtctgctaagaagacgggttcctgctttgcagagaaggagccggggaccagcttgaagactggctctgggacacactgaccattgtgaaattcagccttccctgtgggtctccataccattttatgatgtgtatgggacatacgttgttctcccctctctggatcaaggtggtgacaggcagcctgctgccgtatgcttcagtggcacacaccaaaaaaccgggattatttacagcagccactattcaccccttttggcagactctccacctgagttcagtgagagagaaaatgatttagatcttggtgctggggcaaggccatcagcttcagagaccttgccaggcccaggctgggtgccctgtggcctgagaactgagcccagactttgacaaacccacctcaacatcaagcctggggcaggtggaaggtggtctgactgcactgtctccatcttatgcaaagccaggaactcactcactgtcttaagtgagccagggcaaaatttacacccctcacgtttccctctcccttcttccccaccaacaaaacccaggaggtagctggcagagtagctgtcaggaaggagaaaggttctttctggctggttgtttttaattggcttagtgatctaaactggccccttcctcctctgcctggtgagttggcctaaacattcctcaagtctagcctcaggagacctgcccctcccccccgacctccaccccctcagactccatcccccacccccaggagcctggctgtctctagcgaggggtggagaatcagatttagagggagggagagtctgacctggatcctgacctgtaaccagctgaagacggtggaggctttgtggcttgctgagggtgggggttgggagagggactggaaaccttcctcctcgggaaagaaatgcctgggaggaagggaagcctgatattcagggtcaaaacagcccttctaattcacaaccccaaagcaggggtttctagaagttggtcaacagatctggtgagggaagtccccaggccagacgctggactcctgcaatgagggtggaggactcagcctggcctctgcctggcctgtttcaaagtctgggccactggcagccttctcttgctcaatccgaggtggaaaaagatcacctcccagtgacctccctcagcccccaggggagtaggtctgtgtccaaagctatgtggcaggcttgtttgaaggacccagaggggcccagctgacctgtctcactgctcctggcagcccagccccatcggcaggtggcccctgcctgggggttattcgggatggttcagccagggcctcccaggaagagtgctgtggagccacggtgactgtcctggacagcaaggagcatgctaccccagtgagcacttctttttgagggacttgatggggaggtggggtaggcagaagggacgtggcagaagcgggaagactttggtcaccatggctctgcaggccttctgcaaatcagtgctggcctgggctggaaacagctctgtgtgtgaaggtgaggactcttggaagcaggccatcctggccagacaccctagcaggaaggggctcacctgtcacccttaggcagcctgagggctggtggggacttttgagtcttgaggggatagcggaaaaagctgagctcataggtgcccagccagcctcccagctaaaggtgctcagagccccactgccccctctctctgtgcaggtggccagtgcccctccctgctctgggagcattgctagccttctaccccatccctggatccacaggggctatcgaggagacccagtgagaatgtagcattttgttcatccccagggtagctgccctggggtctgggcactctgcctctgggagagaggaagaagaaaggggccccattttttaaaaaactgtacagagcctttggctttatgtgtttatgttcttcacatgcatatgtgtgtatgtgtgtatatctttccccccatcaattggtacaatttttaataaaatcatttaaagcaaa

SEQ ID NO: 3244 - DNA, 4545 bp, Homo sapiens
  source 1..4545: mol_type = unassigned DNA
attttcccaggtaccctgcatgcatatagctgctgattctactcctgctattgctcacaaccctcagagtcaaactttgtgaccggcctaggagagatggagccatctcagtgtgtggaggagctggaggatgatgtgttccaaccagaggatggggagccggtgacccaacccgggagcttgctctctgctgacctgtttgcccagagcctactggactgccccctcagccgacttcagctcttccctctcacccactgctgtggccctggccttcgacccaccagccaggaagacaaagctacccagactctcagcccagcctcccccagccaaggtgtcatgctgccttgtggggtgactgaggaaccccagcgactcttttatggcaatgctggctatcggcttcctctccctgccagtttcccagcagtcttgcccattggggagcagccccccgaagggcagtggcaacatcaagcagaggtacagattgcccgaaagcttcagtgcattgcagaccagttccaccggcttcatgtgcagcaacaccagcagaaccaaaatcgtgtgtggtggcagatcctcctcttcctgcacaaccttgctttgaatggagaagagaacaggaacggggcaggccctaggtgagggtgggctgccctcttcacatggggcaccaggaacaccgtctggaacaggaaggacatcgggcaggactgacactgtgtcttgtgaaattgtttttttgttgttattttgtgttttaattttttttaatttctctctgagtgtacatacaacatactcaagcgggaccttctttctctgtcaggcccttgacctggaatgggggcctttgtcaaacactgttgaaggagaggctgatgtgtctgtgatggtgagaattcccaagggctctgacaagtagattcttcgactgaggaatctaccagttgtcgaagatgatccgttagtgatgttctctgggaagtggactgtggtttttccagaggaactcagttaagaaatcgagagtggattagactcccagttccaccaaacctatgagccttccactgtggatgggggccgtgatcctgatggtcacattgctttaacccagcagggcttcggccaggggctttccacttgaggatagcagcttcactaggctggccggccagctccacatctgactgggttcttacttctcagccagtacctgccccatgggctcaaggattcctggccagctcctgccacctccagcagacctcagggagggttgagtttctctaaggacccctcaaacatgtcgcaaaatgaaccaaacttctggctaggcctcaaaactgacttggtcccacttggaggccccaggattggtcctgaggtacagagccactgccaccactggcggcctgggaccagctgggtgtcagccacggatgagccgaatagccagtcagcatgttgctgctggcagcctgtgcctttgtcagctcttctttcaaaagaccccaccgacagaccgcattccacccccaacatcggcactgagggacatcgggggcaagtttgcagtggggccggaaaatatggtggccaccctaccatgagagtcagccgtaggggaccccagaccccttggtttccttggaaacaacatacctcttcccccttatccccagtcctttttcatacctagtgggatacagaagaagccaggacagtggctttgccagctaagtgacttttagagtaacagataacgattagagtggggaaccgtcaaagctgggtacacatttcctatcttcctccagcttccagctaggccagaagggcatgctctggaacccagcaggatcacagctgcctgtgcacgtcttcccttctctccctgctgcggcacttatggagaggatctaaagcagccggtgtggcagctccgatagcaggcacagggaatctgttaaccagacgctagaaactaaattataacttttgcatatgtgagaaaagacaacattggtgctaacagtgaagtaaggcccaaaggaaagacggcttccctggacaaagaagacctcagggctacccaaggaaataggaggagtctagagtagactcacaaatctgaacaagcccaagtcttccagttctgaggagaggaggtcttcagtactattgaaggagacattgatcttctggatgtacagttgtgcaggttgttcactgcacaagggcacctgcagctaatggaggctggaattcagcttgtgttctgctcactaagctgtgtgcgtgccctggtgtggggctacttctcccaagaagaaggggtgcctttcctaatttgcaaaggtgccatatgggctcacagcaccctggaggagaagggcctcaaactgtgcatgtaagcctttgttttgttctgctcagatattctggatattacctcttcttggtcagaattctattctcagggtgtgtaccatgatttgtctgctaagaagacgggttcctgctttgcagagaaggagccggggaccagcttgaagactggctctgggacacactgaccattgtgaaattcagccttccctgtgggtctccataccattttatgatgtgtatgggacatacgttgttctcccctctctggatcaaggtggtgacaggcagcctgctgccgtatgcttcagtggcacacaccaaaaaaccgggattatttacagcagccactattcaccccttttggcagactctccacctgagttcagtgagagagaaaatgatttagatcttggtgctggggcaaggccatcagcttcagagaccttgccaggcccaggctgggtgccctgtggcctgagaactgagcccagactttgacaaacccacctcaacatcaagcctggggcaggtggaaggtggtctgactgcactgtctccatcttatgcaaagccaggaactcactcactgtcttaagtgagccagggcaaaatttacacccctcacgtttccctctcccttcttccccaccaacaaaacccaggaggtagctggcagagtagctgtcaggaaggagaaaggttctttctggctggttgtttttaattggcttagtgatctaaactggccccttcctcctctgcctggtgagttggcctaaacattcctcaagtctagcctcaggagacctgcccctcccccccgacctccaccccctcagactccatcccccacccccaggagcctggctgtctctagcgaggggtggagaatcagatttagagggagggagagtctgacctggatcctgacctgtaaccagctgaagacggtggaggctttgtggcttgctgagggtgggggttgggagagggactggaaaccttcctcctcgggaaagaaatgcctgggaggaagggaagcctgatattcagggtcaaaacagcccttctaattcacaaccccaaagcaggggtttctagaagttggtcaacagatctggtgagggaagtccccaggccagacgctggactcctgcaatgagggtggaggactcagcctggcctctgcctggcctgtttcaaagtctgggccactggcagccttctcttgctcaatccgaggtggaaaaagatcacctcccagtgacctccctcagcccccaggggagtaggtctgtgtccaaagctatgtggcaggcttgtttgaaggacccagaggggcccagctgacctgtctcactgctcctggcagcccagccccatcggcaggtggcccctgcctgggggttattcgggatggttcagccagggcctcccaggaagagtgctgtggagccacggtgactgtcctggacagcaaggagcatgctaccccagtgagcacttctttttgagggacttgatggggaggtggggtaggcagaagggacgtggcagaagcgggaagactttggtcaccatggctctgcaggccttctgcaaatcagtgctggcctgggctggaaacagctctgtgtgtgaaggtgaggactcttggaagcaggccatcctggccagacaccctagcaggaaggggctcacctgtcacccttaggcagcctgagggctggtggggacttttgagtcttgaggggatagcggaaaaagctgagctcataggtgcccagccagcctcccagctaaaggtgctcagagccccactgccccctctctctgtgcaggtggccagtgcccctccctgctctgggagcattgctagccttctaccccatccctggatccacaggggctatcgaggagacccagtgagaatgtagcattttgttcatccccagggtagctgccctggggtctgggcactctgcctctgggagagaggaagaagaaaggggccccattttttaaaaaactgtacagagcctttggctttatgtgtttatgttcttcacatgcatatgtgtgtatgtgtgtatatctttccccccatcaattggtacaatttttaataaaatcatttaaagc

SEQ ID NO: 3245 - DNA, 492 bp, Homo sapiens
  source 1..492: mol_type = unassigned DNA
atggagccatctcagtgtgtggaggagctggaggatgatgtgttccaaccagaggatggggagccggtgacccaacccgggagcttgctctctgctgacctgtttgcccagagcctactggactgccccctcagccgacttcagctcttccctctcacccactgctgtggccctggccttcgacccaccagccaggaagacaaagctacccagactctcagcccagcctcccccagccaaggtgtcatgctgccttgtggggtgactgaggaaccccagcgactcttttatggcaatgctggctatcggcttcctctccctgccagtttcccagcagtcttgcccattggggagcagccccccgaagggcagtggcaacatcaagcagagcaccagcagaaccaaaatcgtgtgtggtggcagatcctcctcttcctgcacaaccttgctttgaatggagaagagaacaggaacggggcaggccctaggtga

SEQ ID NO: 3246 - DNA, 505 bp, Homo sapiens
  source 1..505: mol_type = unassigned DNA
attttggaaacaataccgcaccgtgcggagtggcctcctcccgccccggcctgtgcccgccgccgccgccgcccctgcctgcgcctcccgcctcctgccgcagcccgctgggctttttccctccttcccaatcgagtctgggcgtccagcccccgagtgctcgtcacgctggaccctggcgcggagccctggcatcacgactcggaggccgagactctctcctggagtcacccaggtaccctgcatgcatatagctgctgattctactcctgctattgctcacaaccctcagagtcaaactttgtgaccggcctaggagagatggagccatctcagtgtgtggaggagctggaggatgatgtgttccaaccagaggatggggagccggtgacccaacccgggagcttgctctctgctgacctgtttgcccagagcctactggactgccccctcagccgacttcagctcttccctctcacccactgctgtggccctggccttcgac

SEQ ID NO: 3247 - DNA, 630 bp, Homo sapiens
  source 1..630: mol_type = unassigned DNA
attttggaaacaataccgcaccgtgcggagtggcctcctcccgccccggcctgtgcccgccgccgccgccgcccctgcctgcgcctcccgcctcctgccgcagcccgctgggctttttccctccttcccaatcgagtctgggcgtccagcccccgagtgctcgtcacgctggaccctggcgcggagccctggcatcacgactcggaggccgagactctctcctggagtcacccaggagagatggagccatctcagtgtgtggaggagctggaggatgatgtgttccaaccagaggatggggagccggtgacccaacccgggagcttgctctctgctgacctgtttgcccagagcctactggactgccccctcagccgacttcagctcttccctctcacccactgctgtggccctggccttcgacccaccagccaggaagacaaagctacccagactctcagcccagcctcccccagccaaggtgtcatgctgccttgtggggtgactgaggaaccccagcgactcttttatgcaccagcagaaccaaaatcgtgtgtggtggcagatcctcctcttcctgcacaaccttgctttgaatggagaagagaacaggaacggggcaggccctag

SEQ ID NO: 3248 - DNA, 490 bp, Homo sapiens
  source 1..490: mol_type = unassigned DNA
ggagtcgcgctgcgcacgggggcccgggaagggtttgggctgcggacgtctggggtgaccatgaagaactggggcgctggggtgagggaacggggtgcagaacccacagttgggtgcgctgctccaagagggaacttgggggtagcatttgggactcgaaggagttgggtccaggtaggcaggggaacctggggtgcactgctgagcagacctgggcgcccgagaacggcccagcctctgggtctgactttgggataggacaggagctgtggggcatcctgcctctctgcggagtctgaaggctcctctccttaacagctgggctttttccctccttcccaatcgagtctgggcgtccagcccccgagtgctcgtcacgctggaccctggcgcggagccctggcatcacgactcggaggccgagactctctcctggagtcacccaggagagatggagccatctcagtgtgtggaggagctggaggatgat

SEQ ID NO: 3249 - DNA, 747 bp, Homo sapiens
  source 1..747: mol_type = unassigned DNA
tagctgctgattctactcctgctattgctcacaaccctcagagtcaaactttgtgaccggcctaggtcagaaaacgtgatcaagaaaaagggtggttccaggcgggcccagggaagaggagagatggagccatctcagtgtgtggaggagctggaggatgatgtgttccaaccagaggatggggagccggtgacccaacccgggagcttgctctctgctgacctgtttgcccagagcctactggactgccccctcagccgacttcagctcttccctctcacccactgctgtggccctggccttcgacccaccagccaggaagacaaagctacccagactctcagcccagcctcccccagccaaggtgtcatgctgccttgtggggtgactgaggaaccccagcgactcttttatggcaatgctggctatcggcttcctctccctgccagtttcccagcagtcttgcccattggggagcagccccccgaagggcagtggcaacatcaagcagaggtacagattgcccgaaagcttcagtgcattgcagaccagttccaccggcttcatgtgcagcaacaccagcagaaccaaaatcgtgtgtggtggcagatcctcctcttcctgcacaaccttgctttgaatggagaagagaacaggaacggggcaggccctaggtgagggtgggctgccctcttcacatggggcaccaggaacaccgtctggaacaggaaggacatcgggcaggac

SEQ ID NO: 3250 - DNA, 735 bp, Homo sapiens
  source 1..735: mol_type = unassigned DNA
gctgtcctaggattgctggcttttgtttttgctgctgagcctggagctcagctcagactgagaggagagatggagccatctcagtgtgtggaggagctggaggatgatgtgttccaaccagaggatggggagccggtgacccaacccgggagcttgctctctgctgacctgtttgcccagagcctactggactgccccctcagccgacttcagctcttccctctcacccactgctgtggccctggccttcgacccaccagccaggaagacaaagctacccagactctcagcccagcctcccccagccaaggtgtcatgctgccttgtggggtgactgaggaaccccagcgactcttttatggcaatgctggctatcggcttcctctccctgccagtttcccagcagtcttgcccattggggagcagccccccgaagggcagtggcaacatcaagcagaggtacagattgcccgaaagcttcagtgcattgcagaccagttccaccggcttcatgtgcagcaacaccagcagaaccaaaatcgtgtgtggtggcagatcctcctcttcctgcacaaccttgctttgaatggagaagagaacaggaacggggcaggccctaggtgagggtgggctgccctcttcacatggggcaccaggaacaccgtctggaacaggaaggacatcgggcaggactgacactgtgtcttgtgaaattgtttttttgttgttattttg

SEQ ID NO: 3251 - DNA, 1160 bp, Homo sapiens
  source 1..1160: mol_type = unassigned DNA
ctccgctcagtccgggagcgcagctgggccgcggcgctccgacctccgctttcccaccgcccgcagctgaagcacatcccgcagcccggcgcggactccgatcgccgcagttgccctctggcgccatgtcgcagaacggagcgcccgggatgcaggaggagagcctgcagggctcctgggtagaactgcacttcagcaataatgggaacgggggcagcgttccagcctcggtttctatttataatggagacatggaaaaaatactgctggacgcacagcatgagtctggacggagtagctccaagagctctcactgtgacagcccacctcgctcgcagacaccacaagataccaacagagcttctgaaacagatacccatagcattggagagaaaaacagctcacagtctgaggaagatgatattgaaagaaggaaagaagttgaaagcatcttgaagaaaaactcagattggatatgggattggtcaagtcggccggaaaatattccccccaaggagttcctctttaaacacccgaagcgcacggccaccctcagcatgaggaacacgagcgtcatgaagaaagggggcatattctctgcagaatttctgaaagttttccttccatctctgctgctctctcatttgctggccatcggattggggatctatattggaaggcgtctgacaacctccaccagcaccttttgatgaagaactggagtctgacttggttcgttagtggattacttctgagcttgcaacatagctcactgaagagctgttagatcctggggtggccacgtcacttgtgtttatttgttctgtaaatgctgcgttcctaatttagtaaaataaaagaatagacactaaaatcatgttgatctataattacacctatgggatcaataagcatgtcagactgattaatgtctactgtgaaaatttggtagtaaattttcatttgatattagatataaatatctgaatataaataattttaatatactagtcatgatgtgtgttgtattttaaaaattatctgcaaccttaattcagctgaagtactttatatttcaaaagaatgaataacattgataataaaatcgctactttaaggggtttgtccaaaataaatattgtggccttatatatcacact

SEQ ID NO: 3252 - DNA, 1607 bp, Homo sapiens
  source 1..1607: mol_type = unassigned DNA
agtccgggagcgcagctgggccgcggcgctccgacctccgctttcccaccgcccgcagctgaagcacatcccgcagcccggcgcggactccgatcgccgcagttgccctctggcgccatgtcgcagaacggagcgcccgggatgcaggaggagagcctgcagggctcctgggtagaactgcacttcagcaataatgggaacgggggcagcgttccagcctcggtttctatttataatggagacatggaaaaaatactgctggacgcacagcatgagtctggacggagtagctccaagagctctcactgtgacagcccacctcgctcgcagacaccacaagataccaacagagcttctgaaacagatacccatagcattggagagaaaaacagctcacagtctgaggaagatgatattgaaagaaggaaagaagttgaaagcatcttgaagaaaaactcagattggatatgggattggtcaagtcggccggaaaatattccccccaaggagttcctctttaaacacccgaagcgcacggccaccctcagcatgaggaacacgagcgtcatgaagaaagggggcatattctctgcagaatttctgaaagttttccttccatctctgctgctctctcatttgctggccatcggattggggtaggtgatgtgactgtgtgactcctgtcatggcatgtcgtggggcgattctgggttgcagtgatttattcgtaacctgtttcctgaagtccagatcatcagttacagcttggtgcattttcacaaacacccacgtagtcactgttcaggtccagaaaccaccagcctgcagcccccaaaggccccagcacaggcgccctgtggtgctgctgtctggcctgacgagtctgcctgttgctcactgaatataaacggagtcaaagcagggcttcttaggtctgacctctttgtcctgtgtgtaggtgaaagcagtctcatttctgtgtagtactgtggcgggaatgcacccagctctgctgtaggtggagggtctcagttacctgctgtacttcctccagacaggactgttgttctagtaactctcagcaatgaaggaaccaatgcagtctccgactttactggcttgagtttcgctcttgttgcccaggctgagtgcaggggcgtgatctcggctcactgcagcctctgcctcctgggttcaagcgactctcctgcctcagcctcctgggtagctgggattacaggtgcccaccaccaggcctggctaatttttgtatttttaatagagacggggcttcgccacgttgcccaggctgatctcgaactcaagggatggctcacctcggcctccaaagtgctgggattacaggcgtgagccaccgcgcctggcctttcctggctgcttatactcactcaccctgcagaaaacacagagaccaggcaggcgccgctgtgggttctgaagagcgttcgccgcagcggtggtgaagagccagagcgggaagccaaaacggctcctcctcgggctggtcccagcctctcagcggggaggagggctctagtcctggcgtgcagacagtgttctgtggctgccgtgtgttggacagactg

SEQ ID NO: 3253 - DNA, 3779 bp, Homo sapiens
  source 1..3779: mol_type = unassigned DNA
gggggtggggcgatgcttaagtgtccacgcatccgtagtgcgacgcacgcaggcgtagtacggtcccccgggcgacagcggtggcggctcctcggggtgctcggctccctcccacctaggccggccccggcccgactcgccctcagaaactcactgtttggggctgcggactttctcgtcgtgccccacaaaagtaaagcttggggacctggggggagccggaagtatcgcttcgagatccccaaatactatcggggaaacggaagtggccgtcggtggcagagacctgtcggccatggagcctaatgatagtaccagtaccgctgtggaggagcctgacagcttggaggtgttggtgaagaccttggactctcaaactcgtacctttattgtgggggcccagatgaatgtaaaagagtttaaggagcacattgctgcctctgtcagcatcccatctgaaaaacaacggctcatttaccagggacgagttctgcaagatgataagaagcttcaggaatacaatgttgggggaaaggttatccacctggtggaacgggctcctcctcagactcacctcccttctggggcatcttctgggacggggtctgcctcagccactcatggtgggggatccccccctggtactcgggggcctggggcctctgttcatgaccggaatgccaacagctatgtcatggttggaaccttcaatcttcctagtgacggctctgctgtggatgttcacatcaacatggaacaggccccgattcagagtgagccccgggtacggctggtgatggctcagcacatgatcagggatatacagaccttactatcccggatggagtgtcgaggagggccccaaccgcagcacagtcagccgcccccgcagccaccggctgtgaccccggagccagtagccttgagctctcaaacatcagaaccagttgaaagtgaagcacctccccgggagcccatggaggcagaagaagtggaggagcgtgccccagcccagaacccggagctcactcctggcccagccccagcgggcccaacacctgccccggaaacaaatgcacccaaccatccttcccctgcggagtatgtcgaggtgctccaggagctacagcggctggagagtcgcctccagcccttcttgcagcgctactacgaggttctgggtgctgctgccaccacggactacaataacaatcacgagggccgggaggaggatcagcggttgatcaacttggtaggggagagcctgcgactgctgggcaacacctttgttgcactgtctgacctgcgctgcaatctggcctgcacgcccccacgacacctgcatgtggtccggcctatgtctcactacaccacccccatggtgctccagcaggcagccattcccatacagatcaatgtgggaaccactgtgaccatgacaggaaatgggactcggccccccccaactcccaatgcagaggcacctccccctggtcctgggcaggcctcatccgtggctccgtcttctaccaatgtcgagtcctcagctgagggggctcccccgccaggtccagctcccccgccagccaccagccacccgagggtcatccggatttcccaccagagtgtggaacccgtggtcatgatgcacatgaacattcaagattctggcacacagcctggtggtgttccgagtgctcccactggccccctgggaccccctggtcatggccaaaccctgggacagcaggtgccaggcttcccaacagctccaacccgggtggtgattgcccggcccactcctccacaggctcggccttcccatcctggagggcccccagtctctgggacactgcagggcgccggtctgggtaccaatgcctcgttggcccagatggtgagcggccttgtggggcagcttcttatgcagccagtccttgtggctcaggggaccccaggtatggctccaccgccagcccctgccactgcttctgccagtgctggcaccaccaacacagctaccacagctggccccgctcctggggggcctgcccagcctccacccacccctcaaccctccatggctgatcttcagttctctcagcttctggggaacctgctagggcctgcagggccaggggctggagggtctggtgtggcttctcccaccatcactgtggcgatgcctggtgtccctgcctttctccaaggcatgactgacttcttgcaggcaacacagacagcccctccaccacccccacctcctccacccccaccacctgccccagagcagcagaccatgcccccaccaggctccccttctggtggcgcagggagtcctggaggcctgggtcttgagagcctgtcaccggagttttttacctcagtggtgcagggtgtgctcagctccctgctgggctccctgggggctcgggctggcagcagtgaaagtattgctgccttcatacaacgcctcagtggatccagcaacatctttgagcctggagctgatggggcccttggattctttggggccttgctttctcttctgtgccagaacttctctatggtggacgtagtgatgcttctccatgggcatttccagccactacaacggctccagccccagctgcgatccttcttccaccagcactacctgggtggtcaggagcccacacccagtaacatccggatggcaacccacacattgatcacggggctagaagagtatgtgcgggagagtttttccttggtgcaggttcagccaggtgtggacatcatccggacaaacctggaatttctccaagagcagtttaatagcattgctgcgcatgtgctgcattgcacagatagtggatttggggcccggttgctggagttgtgtaaccaaggcctgtttgaatgcctggccctaaacctgcactgcttggggggacagcagatggagcttgctgctgttatcaatggccgaattcgtcgtatgtctcgtggggtgaatccctccttggtgagctggctgaccactatgatgggactgaggcttcaggtggtactggagcacatgcctgtaggccctgatgccattctcagatacgttcgcagggttggtgatcccccccagccacttcctgaggagccaatggaagttcagggagcagaaagagcttcccctgagcctcagcgggagaatgcttccccagcccctggaacaacagcagaagaggccatgtcccgaggtccacctcctgctcctgaggggggctcccgggatgaacaggatggagcttcagctgagacagaaccttgggcagctgcagtccccccagaatgggtccctattatccagcaggacattcagagccagcggaaggtgaaaccgcagccccctctgagtgatgcctacctcagtggtatgcctgccaagagacgcaagacgatgcagggtgagggcccccagctgcttctctcagaggctgtgagccgggcagctaaggcagccggagctcggcccctgacgagccccgagagcctgagccgggacctggaggcaccagaggttcaggagagctacaggcagcagctccggtctgatatacaaaaacgactgcaggaagaccccaactacagtccccagcgcttccccaatgcccagcgggcctttgctgatgatccttagctctttgctctatggcccttcctcatcaggggaccgtttcccccctcttccttcacagtatttaagaaataaaagtcggatttttctggctgctttctctcta

SEQ ID NO: 3254 - DNA, 3755 bp, Homo sapiens
  source 1..3755: mol_type = unassigned DNA
ggcgacagcggtggcggctcctcggggtgctcggctccctcccacctaggccggccccggcccgactcgccctcagaaactcactgtttggggctgcggactttctcgtcgtgccccacaaaagtaaagcttggggacctggggggagccggaagtatcgcttcgagatccccaaatactatcggggaaacggaagtggccgtcggtggcaggtttgggggagaccggaagtgacgagacctgtcggccatggagcctaatgatagtaccagtaccgctgtggaggagcctgacagcttggaggtgttggtgaagaccttggactctcaaactcgtacctttattgtgggggcccagatgaatgtaaaagagtttaaggagcacattgctgcctctgtcagcatcccatctgaaaaacaacggctcatttaccagggacgagttctgcaagatgataagaagcttcaggaatacaatgttgggggaaaggttatccacctggtggaacgggctcctcctcagactcacctcccttctggggcatcttctgggacggggtctgcctcagccactcatggtgggggatccccccctggtactcgggggcctggggcctctgttcatgaccggaatgccaacagctatgtcatggttggaaccttcaatcttcctagtgacggctctgctgtggatgttcacatcaacatggaacaggccccgattcagagtgagccccgggtacggctggtgatggctcagcacatgatcagggatatacagaccttactatcccggatggagactctcccctaccttcagtgtcgaggagggccccaaccgcagcacagtcagccgcccccgcagccaccggctgtgaccccggagccagtagccttgagctctcaaacatcagaaccagttgaaagtgaagcacctccccgggagcccatggaggcagaagaagtggaggagcgtgccccagcccagaacccggagctcactcctggcccagccccagcgggcccaacacctgccccggaaacaaatgcacccaaccatccttcccctgcggagtatgtcgaggtgctccaggagctacagcggctggagagtcgcctccagcccttcttgcagcgctactacgaggttctgggtgctgctgccaccacggactacaataacaatcacgagggccgggaggaggatcagcggttgatcaacttggtaggggagagcctgcgactgctgggcaacacctttgttgcactgtctgacctgcgctgcaatctggcctgcacgcccccacgacacctgcatgtggtccggcctatgtctcactacaccacccccatggtgctccagcaggcagccattcccatacagatcaatgtgggaaccactgtgaccatgacaggaaatgggactcggccccccccaactcccaatgcagaggcacctccccctggtcctgggcaggcctcatccgtggctccgtcttctaccaatgtcgagtcctcagctgagggggctcccccgccaggtccagctcccccgccagccaccagccacccgagggtcatccggatttcccaccagagtgtggaacccgtggtcatgatgcacatgaacattcaagattctggcacacagcctggtggtgttccgagtgctcccactggccccctgggaccccctggtcatggccaaaccctgggacagcaggtgccaggcttcccaacagctccaacccgggtggtgattgcccggcccactcctccacaggctcggccttcccatcctggagggcccccagtctctgggacactgcagggcgccggtctgggtaccaatgcctcgttggcccagatggtgagcggccttgtggggcagcttcttatgcagccagtccttgtggctcaggggaccccaggtatggctccaccgccagcccctgccactgcttctgccagtgctggcaccaccaacacagctaccacagctggccccgctcctggggggcctgcccagcctccacccacccctcaaccctccatggctgatcttcagttctctcagcttctggggaacctgctagggcctgcagggccaggggctggagggtctggtgtggcttctcccaccatcactgtggcgatgcctggtgtccctgcctttctccaaggcatgactgacttcttgcaggcaacacagacagcccctccaccacccccacctcctccacccccaccacctgccccagagcagcagaccatgcccccaccaggctccccttctggtggcgcagggagtcctggaggcctgggtcttgagagcctgtcaccggagttttttacctcagtggtgcagggtgtgctcagctccctgctgggctccctgggggctcgggctggcagcagtgaaagtattgctgccttcatacaacgcctcagtggatccagcaacatctttgagcctggagctgatggggcccttggattctttggggccttgctttctcttctgtgccagaacttctctatggtggacgtagtgatgcttctccatgggcatttccagccactacaacggctccagccccagctgcgatccttcttccaccagcactacctgggtggtcaggagcccacacccagtaacatccggatggcaacccacacattgatcacggggctagaagagtatgtgcgggagagtttttccttggtgcaggttcagccaggtgtggacatcatccggacaaacctggaatttctccaagagcagtttaatagcattgctgcgcatgtgctgcattgcacagatagtggatttggggcccggttgctggagttgtgtaaccaaggcctgtttgaatgcctggccctaaacctgcactgcttggggggacagcagatggagcttgctgctgttatcaatggccgaattcgtcgtatgtctcgtggggtgaatccctccttggtgagctggctgaccactatgatgggactgaggcttcaggtggtactggagcacatgcctgtaggccctgatgccattctcagatacgttcgcagggttggtgatcccccccagccacttcctgaggagccaatggaagttcagggagcagaaagagcttcccctgagcctcagcgggagaatgcttccccagcccctggaacaacagcagaagaggccatgtcccgaggtccacctcctgctcctgaggggggctcccgggatgaacaggatggagcttcagctgagacagaaccttgggcagctgcagtccccccagaatgggtccctattatccagcaggacattcagagccagcggaaggtgaaaccgcagccccctctgagtgatgcctacctcagtggtatgcctgccaagagacgcaagacgatgcagggtgagggcccccagctgcttctctcagaggctgtgagccgggcagctaaggcagccggagctcggcccctgacgagccccgagagcctgagccgggacctggaggcaccagaggttcaggagagctacaggcagcagctccggtctgatatacaaaaacgactgcaggaagaccccaactacagtccccagcgcttccccaatgcccagcgggcctttgctgatgatccttagctctttctttgctctatggcccttcctcatcaggggaccgtttcccccctcttccttcacagtatttaagaaataaaagtcggatttttctggctgctttctctcta

SEQ ID NO: 3255 - DNA, 3565 bp, Homo sapiens
  source 1..3565: mol_type = unassigned DNA
gtagtacggtcccccgggcgacagcggtggcggctcctcggggtgctcggctccctcccacctaggccggccccggcccgactcgccctcagaaactcactgtttggggctgcggactttctcgtcgtgccccacaaaagtaaagcttggggacctggggggagccggaagtatcgcttcgagatccccaaatactatcggggaaacggaagtggccgtcggtggcagagacctgtcggccatggagcctaatgatagtaccagtaccgctgtggaggagcctgacagcttggaggtgttggtgaagaccttggactctcaaactcgtacctttattgtgggggcccagatgaatgtaaaagagtttaaggagcacattgctgcctctgtcagcatcccatctgaaaaacaacggctcatttaccagggacgagttctgcaagatgataagaagcttcaggaatacaatgttgggggaaaggttatccacctggtggaacgggctcctcctcagactcacctcccttctggggcatcttctgggacggggtctgcctcagccactcatggtgggggatccccccctggtactcgggggcctggggcctctgttcatgaccggaatgccaacagctatgtcatggttggaaccttcaatcttcctagtgacggctctgctgtggatgttcacatcaacatggaacaggccccgattcagagtgagccccgggtacggctggtgatggctcagcacatgatcagggatatacagaccttactatcccggatggagtgtcgaggagggccccaaccgcagcacagtcagccgcccccgcagccaccggctgtgaccccggagccagtagccttgagctctcaaacatcagaaccagttgaaagtgaagcacctccccgggagcccatggaggcagaagaagtggaggagcgtgccccagcccagaacccggagctcactcctggcccagccccagcgggcccaacacctgccccggaaacaaatgcacccaaccatccttcccctgcggagtatgtcgaggtgctccaggagctacagcggctggagagtcgcctccagcccttcttgcagcgctactacgaggttctgggtgctgctgccaccacggactacaataacaatcacgagggccgggaggaggatcagcggttgatcaacttggtaggggagagcctgcgactgctgggcaacacctttgttgcactgtctgacctgcgctgcaatctggcctgcacgcccccacgacacctgcatgtggtccggcctatgtctcactacaccacccccatggtgctccagcaggcagccattcccatacagatcaatgtgggaaccactgtgaccatgacaggaaatgggactcggccccccccaactcccaatgcagaggcacctccccctggtcctgggcaggcctcatccgtggctccgtcttctaccaatgtcgagtcctcagctgagggggctcccccgccaggtccagctcccccgccagccaccagccacccgagggtcatccggatttcccaccagagtgtggaacccgtggtcatgatgcacatgaacattcaagattctggcacacagcctggtggtgttccgagtgctcccactggccccctgggaccccctggtcatggccaaaccctgggacagcaggtgccaggcttcccaacagctccaacccgggtggtgattgcccggcccactcctccacaggctcggccttcccatcctggagggcccccagtctctgggacactgcagggcgccggtctgggtaccaatgcctcgttggcccagatggtgagcggccttgtggggcagcttcttatgcagccagtccttgtggctcaggggaccccaggtatggctccaccgccagcccctgccactgcttctgccagtgctggcaccaccaacacagctaccacagctggccccgctcctggggggcctgcccagcctccacccacccctcaaccctccatggctgatcttcagttctctcagcttctggggaacctgctagggcctgcagggccaggggctggagggtctggtgtggcttctcccaccatcactgtggcgatgcctggtgtccctgcctttctccaaggcatgactgacttcttgcaggcaacacagacagcccctccaccacccccacctcctccacccccaccacctgccccagagcagcagaccatgcccccaccaggctccccttctggtggcgcagggagtcctggaggcctgggtcttgagagcctgtcaccggagttttttacctcagtggtgcagggtgtgctcagctccctgctgggctccctgggggctcgggctggcagcagtgaaagtattgctgccttcatacaacgcctcagtggatccagcaacatctttgagcctggagctgatggggcccttggattctttggggccttgctttctcttctgtgccagaacttctctatggtggacgtagtgatgcttctccatgggcatttccagccactacaacggctccagccccagctgcgatccttcttccaccagcactacctgggtggtcaggagcccacacccagtaacatccggatggcaacccacacattgatcacggggctagaagagtatgtgcgggagagtttttccttggtgcaggttcagccaggtgtggacatcatccggacaaacctggaatttctccaagagcagtttaatagcattgctgcgcatgtgctgcattgcacagatagtggatttggggcccggttgctggagttgtgtaaccaaggcctgtttgaatgcctggccctaaacctgcactgcttggggggacagcagatggagcttgctgctgttatcaatggccgaattcgtcgtatgtctcgtggggtgaatccctccttggtgagctggctgaccactatgatgggactgaggcttcaggtggtactggagcacatgcctgtaggccctgatgccattctcagatacgttcgcagggttggtgatcccccccagccacttcctgaggagccaatggaagttcagggagcagaaagagcttcccctgagcctcagcgggagaatgcttccccagcccctggaacaacagcagaagaggccatgtcccgaggtccacctcctgctcctgaggggggctcccgggatgaacaggatggagcttcagctgagacagaaccttgggcagctgcagtccccccagaatgggtccctattatccagcaggacattcagagccagcggaaggtgaaaccgcagccccctctgagtgatgcctacctcagtggtatgcctgccaagagacgcaagctccggtctgatatacaaaaacgactgcaggaagaccccaactacagtccccagcgcttccccaatgcccagcgggcctttgctgatgatccttagctctttgctctatggcccttcctcatcaggggaccgtttcccccctcttccttcacagtatttaagaaataaaagtcggatttttctggc

SEQ ID NO: 3256 - DNA, 3751 bp, Homo sapiens
  source 1..3751: mol_type = unassigned DNA
ggcgacagcggtggcggctcctcggggtgctcggctccctcccacctaggccggccccggcccgactcgccctcagaaactcactgtttggggctgcggactttctcgtcgtgccccacaaaagtaaagcttggggacctggggggagccggaagtatcgcttcgagatccccaaatactatcggggaaacggaagtggccgtcggtggcaggtttgggggagaccggaagtgacgagacctgtcggccatggagcctaatgatagtaccagtaccgctgtggaggagcctgacagcttggaggtgttggtgaagaccttggactctcaaactcgtacctttattgtgggggcccagatgaatgtaaaagagtttaaggagcacattgctgcctctgtcagcatcccatctgaaaaacaacggctcatttaccagggacgagttctgcaagatgataagaagcttcaggaatacaatgttgggggaaaggttatccacctggtggaacgggctcctcctcagactcacctcccttctggggcatcttctgggacggggtctgcctcagccactcatggtgggggatccccccctggtactcgggggcctggggcctctgttcatgaccggaatgccaacagctatgtcatggttggaaccttcaatcttcctagtgacggctctgctgtggatgttcacatcaacatggaacaggccccgattcagagtgagccccgggtacggctggtgatggctcagcacatgatcagggatatacagaccttactatcccggatggagactctcccctaccttcagtgtcgaggagggccccaaccgcagcacagtcagccgcccccgcagccaccggctgtgaccccggagccagtagccttgagctctcaaacatcagaaccagttgaaagtgaagcacctccccgggagcccatggaggcagaagaagtggaggagcgtgccccagcccagaacccggagctcactcctggcccagccccagcgggcccaacacctgccccggaaacaaatgcacccaaccatccttcccctgcggagtatgtcgaggtgctccaggagctacagcggctggagagtcgcctccagcccttcttgcagcgctactacgaggttctgggtgctgctgccaccacggactacaataacaatcacgagggccgggaggaggatcagcggttgatcaacttggtaggggagagcctgcgactgctgggcaacacctttgttgcactgtctgacctgcgctgcaatctggcctgcacgcccccacgacacctgcatgtggtccggcctatgtctcactacaccacccccatggtgctccagcaggcagccattcccatacagatcaatgtgggaaccactgtgaccatgacaggaaatgggactcggccccccccaactcccaatgcagaggcacctccccctggtcctgggcaggcctcatccgtggctccgtcttctaccaatgtcgagtcctcagctgagggggctcccccgccaggtccagctcccccgccagccaccagccacccgagggtcatccggatttcccaccagagtgtggaacccgtggtcatgatgcacatgaacattcaagattctggcacacagcctggtggtgttccgagtgctcccactggccccctgggaccccctggtcatggccaaaccctgggacagcaggtgccaggcttcccaacagctccaacccgggtggtgattgcccggcccactcctccacaggctcggccttcccatcctggagggcccccagtctctgggacactgcagggcgccggtctgggtaccaatgcctcgttggcccagatggtgagcggccttgtggggcagcttcttatgcagccagtccttgtggctcaggggaccccaggtatggctccaccgccagcccctgccactgcttctgccagtgctggcaccaccaacacagctaccacagctggccccgctcctggggggcctgcccagcctccacccacccctcaaccctccatggctgatcttcagttctctcagcttctggggaacctgctagggcctgcagggccaggggctggagggtctggtgtggcttctcccaccatcactgtggcgatgcctggtgtccctgcctttctccaaggcatgactgacttcttgcaggcaacacagacagcccctccaccacccccacctcctccacccccaccacctgccccagagcagcagaccatgcccccaccaggctccccttctggtggcgcagggagtcctggaggcctgggtcttgagagcctgtcaccggagttttttacctcagtggtgcagggtgtgctcagctccctgctgggctccctgggggctcgggctggcagcagtgaaagtattgctgccttcatacaacgcctcagtggatccagcaacatctttgagcctggagctgatggggcccttggattctttggggccttgctttctcttctgtgccagaacttctctatggtggacgtagtgatgcttctccatgggcatttccagccactacaacggctccagccccagctgcgatccttcttccaccagcactacctgggtggtcaggagcccacacccagtaacatccggatggcaacccacacattgatcacggggctagaagagtatgtgcgggagagtttttccttggtgcaggttcagccaggtgtggacatcatccggacaaacctggaatttctccaagagcagtttaatagcattgctgcgcatgtgctgcattgcacagatagtggatttggggcccggttgctggagttgtgtaaccaaggcctgtttgaatgcctggccctaaacctgcactgcttggggggacagcagatggagcttgctgctgttatcaatggccgaattcgtcgtatgtctcgtggggtgaatccctccttggtgagctggctgaccactatgatgggactgaggcttcaggtggtactggagcacatgcctgtaggccctgatgccattctcagatacgttcgcagggttggtgatcccccccagccacttcctgaggagccaatggaagttcagggagcagaaagagcttcccctgagcctcagcgggagaatgcttccccagcccctggaacaacagcagaagaggccatgtcccgaggtccacctcctgctcctgaggggggctcccgggatgaacaggatggagcttcagctgagacagaaccttgggcagctgcagtccccccagaatgggtccctattatccagcaggacattcagagccagcggaaggtgaaaccgcagccccctctgagtgatgcctacctcagtggtatgcctgccaagagacgcaagacgatgcagggtgagggcccccagctgcttctctcagaggctgtgagccgggcagctaaggcagccggagctcggcccctgacgagccccgagagcctgagccgggacctggaggcaccagaggttcaggagagctacaggcagcagctccggtctgatatacaaaaacgactgcaggaagaccccaactacagtccccagcgcttccccaatgcccagcgggcctttgctgatgatccttagctctttgctctatggcccttcctcatcaggggaccgtttcccccctcttccttcacagtatttaagaaataaaagtcggatttttctggctgctttctctcta

SEQ ID NO: 3257 - DNA, 3644 bp, Homo sapiens
  source 1..3644: mol_type = unassigned DNA
ggggaagtcgggggcggagccgcggggtggtgggtgtgtgtgtgtgtgtgtgtgtgtgtgtgtgtgtgtgtgtttggctgtgggttagttgtgccgttctgctggaacaccgtgggaaggcagtagacgcgggcagtcagctagcagagacctgtcggccatggagcctaatgatagtaccagtaccgctgtggaggagcctgacagcttggaggtgttggtgaagaccttggactctcaaactcgtacctttattgtgggggcccagatgaatgtaaaagagtttaaggagcacattgctgcctctgtcagcatcccatctgaaaaacaacggctcatttaccagggacgagttctgcaagatgataagaagcttcaggaatacaatgttgggggaaaggttatccacctggtggaacgggctcctcctcagactcacctcccttctggggcatcttctgggacggggtctgcctcagccactcatggtgggggatccccccctggtactcgggggcctggggcctctgttcatgaccggaatgccaacagctatgtcatggttggaaccttcaatcttcctagtgacggctctgctgtggatgttcacatcaacatggaacaggccccgattcagagtgagccccgggtacggctggtgatggctcagcacatgatcagggatatacagaccttactatcccggatggagtgtcgaggagggccccaaccgcagcacagtcagccgcccccgcagccaccggctgtgaccccggagccagtagccttgagctctcaaacatcagaaccagttgaaagtgaagcacctccccgggagcccatggaggcagaagaagtggaggagcgtgccccagcccagaacccggagctcactcctggcccagccccagcgggcccaacacctgccccggaaacaaatgcacccaaccatccttcccctgcggagtatgtcgaggtgctccaggagctacagcggctggagagtcgcctccagcccttcttgcagcgctactacgaggttctgggtgctgctgccaccacggactacaataacaatcacgagggccgggaggaggatcagcggttgatcaacttggtaggggagagcctgcgactgctgggcaacacctttgttgcactgtctgacctgcgctgcaatctggcctgcacgcccccacgacacctgcatgtggtccggcctatgtctcactacaccacccccatggtgctccagcaggcagccattcccatacagatcaatgtgggaaccactgtgaccatgacaggaaatgggactcggccccccccaactcccaatgcagaggcacctccccctggtcctgggcaggcctcatccgtggctccgtcttctaccaatgtcgagtcctcagctgagggggctcccccgccaggtccagctcccccgccagccaccagccacccgagggtcatccggatttcccaccagagtgtggaacccgtggtcatgatgcacatgaacattcaagattctggcacacagcctggtggtgttccgagtgctcccactggccccctgggaccccctggtcatggccaaaccctgggacagcaggtgccaggcttcccaacagctccaacccgggtggtgattgcccggcccactcctccacaggctcggccttcccatcctggagggcccccagtctctgggacactgcagggcgccggtctgggtaccaatgcctcgttggcccagatggtgagcggccttgtggggcagcttcttatgcagccagtccttgtggctcaggggaccccaggtatggctccaccgccagcccctgccactgcttctgccagtgctggcaccaccaacacagctaccacagctggccccgctcctggggggcctgcccagcctccacccacccctcaaccctccatggctgatcttcagttctctcagcttctggggaacctgctagggcctgcagggccaggggctggagggtctggtgtggcttctcccaccatcactgtggcgatgcctggtgtccctgcctttctccaaggcatgactgacttcttgcaggcaacacagacagcccctccaccacccccacctcctccacccccaccacctgccccagagcagcagaccatgcccccaccaggctccccttctggtggcgcagggagtcctggaggcctgggtcttgagagcctgtcaccggagttttttacctcagtggtgcagggtgtgctcagctccctgctgggctccctgggggctcgggctggcagcagtgaaagtattgctgccttcatacaacgcctcagtggatccagcaacatctttgagcctggagctgatggggcccttggattctttggggccttgctttctcttctgtgccagaacttctctatggtggacgtagtgatgcttctccatgggcatttccagccactacaacggctccagccccagctgcgatccttcttccaccagcactacctgggtggtcaggagcccacacccagtaacatccggatggcaacccacacattgatcacggggctagaagagtatgtgcgggagagtttttccttggtgcaggttcagccaggtgtggacatcatccggacaaacctggaatttctccaagagcagtttaatagcattgctgcgcatgtgctgcattgcacagatagtggatttggggcccggttgctggagttgtgtaaccaaggcctgtttgaatgcctggccctaaacctgcactgcttggggggacagcagatggagcttgctgctgttatcaatggccgaattcgtcgtatgtctcgtggggtgaatccctccttggtgagctggctgaccactatgatgggactgaggcttcaggtggtactggagcacatgcctgtaggccctgatgccattctcagatacgttcgcagggttggtgatcccccccagccacttcctgaggagccaatggaagttcagggagcagaaagagcttcccctgagcctcagcgggagaatgcttccccagcccctggaacaacagcagaagaggccatgtcccgaggtccacctcctgctcctgaggggggctcccgggatgaacaggatggagcttcagctgagacagaaccttgggcagctgcagtccccccagaatgggtccctattatccagcaggacattcagagccagcggaaggtgaaaccgcagccccctctgagtgatgcctacctcagtggtatgcctgccaagagacgcaagacgatgcagggtgagggcccccagctgcttctctcagaggctgtgagccgggcagctaaggcagccggagctcggcccctgacgagccccgagagcctgagccgggacctggaggcaccagaggttcaggagagctacaggcagcagctccggtctgatatacaaaaacgactgcaggaagaccccaactacagtccccagcgcttccccaatgcccagcgggcctttgctgatgatccttagctctttgctctatggcccttcctcatcaggggaccgtttcccccctcttccttcacagtatttaagaaataaaagtcggatttttctggctgctttctctcta

SEQ ID NO: 3258 - DNA, 3656 bp, Homo sapiens
  source 1..3656: mol_type = unassigned DNA
ggggaagtcgggggcggagccgcggggtggtgggtgggtgggtgtgtgtgtgtgtgtgtgtgtgtgtgtgtgtgtgtgtgtttggctgtgggttagttgtgccgttctgctggaacaccgtgggaaggcagtagacgcgggcagtcagctagcagagacctgtcggccatggagcctaatgatagtaccagtaccgctgtggaggagcctgacagcttggaggtgttggtgaagaccttggactctcaaactcgtacctttattgtgggggcccagatgaatgtaaaagagtttaaggagcacattgctgcctctgtcagcatcccatctgaaaaacaacggctcatttaccagggacgagttctgcaagatgataagaagcttcaggaatacaatgttgggggaaaggttatccacctggtggaacgggctcctcctcagactcacctcccttctggggcatcttctgggacggggtctgcctcagccactcatggtgggggatccccccctggtactcgggggcctggggcctctgttcatgaccggaatgccaacagctatgtcatggttggaaccttcaatcttcctagtgacggctctgctgtggatgttcacatcaacatggaacaggccccgattcagagtgagccccgggtacggctggtgatggctcagcacatgatcagggatatacagaccttactatcccggatggagtgtcgaggagggccccaaccgcagcacagtcagccgcccccgcagccaccggctgtgaccccggagccagtagccttgagctctcaaacatcagaaccagttgaaagtgaagcacctccccgggagcccatggaggcagaagaagtggaggagcgtgccccagcccagaacccggagctcactcctggcccagccccagcgggcccaacacctgccccggaaacaaatgcacccaaccatccttcccctgcggagtatgtcgaggtgctccaggagctacagcggctggagagtcgcctccagcccttcttgcagcgctactacgaggttctgggtgctgctgccaccacggactacaataacaatcacgagggccgggaggaggatcagcggttgatcaacttggtaggggagagcctgcgactgctgggcaacacctttgttgcactgtctgacctgcgctgcaatctggcctgcacgcccccacgacacctgcatgtggtccggcctatgtctcactacaccacccccatggtgctccagcaggcagccattcccatacagatcaatgtgggaaccactgtgaccatgacaggaaatgggactcggccccccccaactcccaatgcagaggcacctccccctggtcctgggcaggcctcatccgtggctccgtcttctaccaatgtcgagtcctcagctgagggggctcccccgccaggtccagctcccccgccagccaccagccacccgagggtcatccggatttcccaccagagtgtggaacccgtggtcatgatgcacatgaacattcaagattctggcacacagcctggtggtgttccgagtgctcccactggccccctgggaccccctggtcatggccaaaccctgggacagcaggtgccaggcttcccaacagctccaacccgggtggtgattgcccggcccactcctccacaggctcggccttcccatcctggagggcccccagtctctgggacactgcagggcgccggtctgggtaccaatgcctcgttggcccagatggtgagcggccttgtggggcagcttcttatgcagccagtccttgtggctcaggggaccccaggtatggctccaccgccagcccctgccactgcttctgccagtgctggcaccaccaacacagctaccacagctggccccgctcctggggggcctgcccagcctccacccacccctcaaccctccatggctgatcttcagttctctcagcttctggggaacctgctagggcctgcagggccaggggctggagggtctggtgtggcttctcccaccatcactgtggcgatgcctggtgtccctgcctttctccaaggcatgactgacttcttgcaggcaacacagacagcccctccaccacccccacctcctccacccccaccacctgccccagagcagcagaccatgcccccaccaggctccccttctggtggcgcagggagtcctggaggcctgggtcttgagagcctgtcaccggagttttttacctcagtggtgcagggtgtgctcagctccctgctgggctccctgggggctcgggctggcagcagtgaaagtattgctgccttcatacaacgcctcagtggatccagcaacatctttgagcctggagctgatggggcccttggattctttggggccttgctttctcttctgtgccagaacttctctatggtggacgtagtgatgcttctccatgggcatttccagccactacaacggctccagccccagctgcgatccttcttccaccagcactacctgggtggtcaggagcccacacccagtaacatccggatggcaacccacacattgatcacggggctagaagagtatgtgcgggagagtttttccttggtgcaggttcagccaggtgtggacatcatccggacaaacctggaatttctccaagagcagtttaatagcattgctgcgcatgtgctgcattgcacagatagtggatttggggcccggttgctggagttgtgtaaccaaggcctgtttgaatgcctggccctaaacctgcactgcttggggggacagcagatggagcttgctgctgttatcaatggccgaattcgtcgtatgtctcgtggggtgaatccctccttggtgagctggctgaccactatgatgggactgaggcttcaggtggtactggagcacatgcctgtaggccctgatgccattctcagatacgttcgcagggttggtgatcccccccagccacttcctgaggagccaatggaagttcagggagcagaaagagcttcccctgagcctcagcgggagaatgcttccccagcccctggaacaacagcagaagaggccatgtcccgaggtccacctcctgctcctgaggggggctcccgggatgaacaggatggagcttcagctgagacagaaccttgggcagctgcagtccccccagaatgggtccctattatccagcaggacattcagagccagcggaaggtgaaaccgcagccccctctgagtgatgcctacctcagtggtatgcctgccaagagacgcaagacgatgcagggtgagggcccccagctgcttctctcagaggctgtgagccgggcagctaaggcagccggagctcggcccctgacgagccccgagagcctgagccgggacctggaggcaccagaggttcaggagagctacaggcagcagctccggtctgatatacaaaaacgactgcaggaagaccccaactacagtccccagcgcttccccaatgcccagcgggcctttgctgatgatccttagctctttctttgctctatggcccttcctcatcaggggaccgtttcccccctcttccttcacagtatttaagaaataaaagtcggatttttctggctgctttctctcta

SEQ ID NO: 3259 - DNA, 3783 bp, Homo sapiens
  source 1..3783: mol_type = unassigned DNA
gggggtggggcgatgcttaagtgtccacgcatccgtagtgcgacgcacgcaggcgtagtacggtcccccgggcgacagcggtggcggctcctcggggtgctcggctccctcccacctaggccggccccggcccgactcgccctcagaaactcactgtttggggctgcggactttctcgtcgtgccccacaaaagtaaagcttggggacctggggggagccggaagtatcgcttcgagatccccaaatactatcggggaaacggaagtggccgtcggtggcagagacctgtcggccatggagcctaatgatagtaccagtaccgctgtggaggagcctgacagcttggaggtgttggtgaagaccttggactctcaaactcgtacctttattgtgggggcccagatgaatgtaaaagagtttaaggagcacattgctgcctctgtcagcatcccatctgaaaaacaacggctcatttaccagggacgagttctgcaagatgataagaagcttcaggaatacaatgttgggggaaaggttatccacctggtggaacgggctcctcctcagactcacctcccttctggggcatcttctgggacggggtctgcctcagccactcatggtgggggatccccccctggtactcgggggcctggggcctctgttcatgaccggaatgccaacagctatgtcatggttggaaccttcaatcttcctagtgacggctctgctgtggatgttcacatcaacatggaacaggccccgattcagagtgagccccgggtacggctggtgatggctcagcacatgatcagggatatacagaccttactatcccggatggagtgtcgaggagggccccaaccgcagcacagtcagccgcccccgcagccaccggctgtgaccccggagccagtagccttgagctctcaaacatcagaaccagttgaaagtgaagcacctccccgggagcccatggaggcagaagaagtggaggagcgtgccccagcccagaacccggagctcactcctggcccagccccagcgggcccaacacctgccccggaaacaaatgcacccaaccatccttcccctgcggagtatgtcgaggtgctccaggagctacagcggctggagagtcgcctccagcccttcttgcagcgctactacgaggttctgggtgctgctgccaccacggactacaataacaatcacgagggccgggaggaggatcagcggttgatcaacttggtaggggagagcctgcgactgctgggcaacacctttgttgcactgtctgacctgcgctgcaatctggcctgcacgcccccacgacacctgcatgtggtccggcctatgtctcactacaccacccccatggtgctccagcaggcagccattcccatacagatcaatgtgggaaccactgtgaccatgacaggaaatgggactcggccccccccaactcccaatgcagaggcacctccccctggtcctgggcaggcctcatccgtggctccgtcttctaccaatgtcgagtcctcagctgagggggctcccccgccaggtccagctcccccgccagccaccagccacccgagggtcatccggatttcccaccagagtgtggaacccgtggtcatgatgcacatgaacattcaagattctggcacacagcctggtggtgttccgagtgctcccactggccccctgggaccccctggtcatggccaaaccctgggacagcaggtgccaggcttcccaacagctccaacccgggtggtgattgcccggcccactcctccacaggctcggccttcccatcctggagggcccccagtctctgggacactgcagggcgccggtctgggtaccaatgcctcgttggcccagatggtgagcggccttgtggggcagcttcttatgcagccagtccttgtggctcaggggaccccaggtatggctccaccgccagcccctgccactgcttctgccagtgctggcaccaccaacacagctaccacagctggccccgctcctggggggcctgcccagcctccacccacccctcaaccctccatggctgatcttcagttctctcagcttctggggaacctgctagggcctgcagggccaggggctggagggtctggtgtggcttctcccaccatcactgtggcgatgcctggtgtccctgcctttctccaaggcatgactgacttcttgcaggcaacacagacagcccctccaccacccccacctcctccacccccaccacctgccccagagcagcagaccatgcccccaccaggctccccttctggtggcgcagggagtcctggaggcctgggtcttgagagcctgtcaccggagttttttacctcagtggtgcagggtgtgctcagctccctgctgggctccctgggggctcgggctggcagcagtgaaagtattgctgccttcatacaacgcctcagtggatccagcaacatctttgagcctggagctgatggggcccttggattctttggggccttgctttctcttctgtgccagaacttctctatggtggacgtagtgatgcttctccatgggcatttccagccactacaacggctccagccccagctgcgatccttcttccaccagcactacctgggtggtcaggagcccacacccagtaacatccggatggcaacccacacattgatcacggggctagaagagtatgtgcgggagagtttttccttggtgcaggttcagccaggtgtggacatcatccggacaaacctggaatttctccaagagcagtttaatagcattgctgcgcatgtgctgcattgcacagatagtggatttggggcccggttgctggagttgtgtaaccaaggcctgtttgaatgcctggccctaaacctgcactgcttggggggacagcagatggagcttgctgctgttatcaatggccgaattcgtcgtatgtctcgtggggtgaatccctccttggtgagctggctgaccactatgatgggactgaggcttcaggtggtactggagcacatgcctgtaggccctgatgccattctcagatacgttcgcagggttggtgatcccccccagccacttcctgaggagccaatggaagttcagggagcagaaagagcttcccctgagcctcagcgggagaatgcttccccagcccctggaacaacagcagaagaggccatgtcccgaggtccacctcctgctcctgaggggggctcccgggatgaacaggatggagcttcagctgagacagaaccttgggcagctgcagtccccccagaatgggtccctattatccagcaggacattcagagccagcggaaggtgaaaccgcagccccctctgagtgatgcctacctcagtggtatgcctgccaagagacgcaagacgatgcagggtgagggcccccagctgcttctctcagaggctgtgagccgggcagctaaggcagccggagctcggcccctgacgagccccgagagcctgagccgggacctggaggcaccagaggttcaggagagctacaggcagcagctccggtctgatatacaaaaacgactgcaggaagaccccaactacagtccccagcgcttccccaatgcccagcgggcctttgctgatgatccttagctctttctttgctctatggcccttcctcatcaggggaccgtttcccccctcttccttcacagtatttaagaaataaaagtcggatttttctggctgctttctctcta

SEQ ID NO: 3260 - DNA, 3881 bp, Homo sapiens
  source 1..3881: mol_type = unassigned DNA
tggggcgatgcttaagtgtccacgcatccgtagtgcgacgcacgcaggcgtagtacggtcccccgggcgacagcggtggcggctcctcggggtgctcggctccctcccacctaggccggccccggcccgactcgccctcagaaactcactgtttggggctgcggactttctcgtcgtgccccacaaaagtaaagcttggggacctggggggagccggaagtatcgcttcgagatccccaaatactatcggggaaacggaagtggccgtcggtggcagagacctgtcggccatggagcctaatgatagtaccagtaccgctgtggaggagcctgacagcttggaggtgttggtgaagaccttggactctcaaactcgtacctttattgtgggggcccagatgaatgtaaaagagtttaaggagcacattgctgcctctgtcagcatcccatctgaaaaacaacggctcatttaccagggacgagttctgcaagatgataagaagcttcaggaatacaatgttgggggaaaggttatccacctggtggaacgggctcctcctcagactcacctcccttctggggcatcttctgggacggggtctgcctcagccactcatggtgggggatccccccctggtactcgggggcctggggcctctgttcatgaccggaatgccaacagctatgtcatggttggaaccttcaatcttcctagtgacggctctgctgtggatgttcacatcaacatggaacaggccccgattcagagtgagccccgggtacggctggtgatggctcagcacatgatcagggatatacagaccttactatcccggatggagtgtcgaggagggccccaaccgcagcacagtcagccgcccccgcagccaccggctgtgaccccggagccagtagccttgagctctcaaacatcagaaccagttgaaagtgaagcacctccccgggagcccatggaggcagaagaagtggaggagcgtgccccagcccagaacccggagctcactcctggcccagccccagcgggcccaacacctgccccggaaacaaatgcacccaaccatccttcccctgcggagtatgtcgaggtgctccaggagctacagcggctggagagtcgcctccagcccttcttgcagcgctactacgaggttctgggtgctgctgccaccacggactacaataacaatcacgagggccgggaggaggatcagcggttgatcaacttggtaggggagagcctgcgactgctgggcaacacctttgttgcactgtctgacctgcgctgcaatctggcctgcacgcccccacgacacctgcatgtggtccggcctatgtctcactacaccacccccatggtgctccagcaggcagccattcccatacagatcaatgtgggaaccactgtgaccatgacaggaaatgggactcggccccccccaactcccaatgcagaggcacctccccctggtcctgggcaggcctcatccgtggctccgtcttctaccaatgtcgagtcctcagctgagggggctcccccgccaggtccagctcccccgccagccaccagccacccgagggtcatccggatttcccaccagagtgtggaacccgtggtcatgatgcacatgaacattcaagattctggcacacagcctggtggtgttccgagtgctcccactggccccctgggaccccctggtcatggccaaaccctgggctccaccctcatccagctgccctccctgccccctgagttcatgcacgccgtcgcccaccagatcactcatcaggccatggtggcagctgttgcctccgcggccgcaggacagcaggtgccaggcttcccaacagctccaacccgggtggtgattgcccggcccactcctccacaggctcggccttcccatcctggagggcccccagtctctgggacactgcagggcgccggtctgggtaccaatgcctcgttggcccagatggtgagcggccttgtggggcagcttcttatgcagccagtccttgtggctcaggggaccccaggtatggctccaccgccagcccctgccactgcttctgccagtgctggcaccaccaacacagctaccacagctggccccgctcctggggggcctgcccagcctccacccacccctcaaccctccatggctgatcttcagttctctcagcttctggggaacctgctagggcctgcagggccaggggctggagggtctggtgtggcttctcccaccatcactgtggcgatgcctggtgtccctgcctttctccaaggcatgactgacttcttgcaggcaacacagacagcccctccaccacccccacctcctccacccccaccacctgccccagagcagcagaccatgcccccaccaggctccccttctggtggcgcagggagtcctggaggcctgggtcttgagagcctgtcaccggagttttttacctcagtggtgcagggtgtgctcagctccctgctgggctccctgggggctcgggctggcagcagtgaaagtattgctgccttcatacaacgcctcagtggatccagcaacatctttgagcctggagctgatggggcccttggattctttggggccttgctttctcttctgtgccagaacttctctatggtggacgtagtgatgcttctccatgggcatttccagccactacaacggctccagccccagctgcgatccttcttccaccagcactacctgggtggtcaggagcccacacccagtaacatccggatggcaacccacacattgatcacggggctagaagagtatgtgcgggagagtttttccttggtgcaggttcagccaggtgtggacatcatccggacaaacctggaatttctccaagagcagtttaatagcattgctgcgcatgtgctgcattgcacagatagtggatttggggcccggttgctggagttgtgtaaccaaggcctgtttgaatgcctggccctaaacctgcactgcttggggggacagcagatggagcttgctgctgttatcaatggccgaattcgtcgtatgtctcgtggggtgaatccctccttggtgagctggctgaccactatgatgggactgaggcttcaggtggtactggagcacatgcctgtaggccctgatgccattctcagatacgttcgcagggttggtgatcccccccagccacttcctgaggagccaatggaagttcagggagcagaaagagcttcccctgagcctcagcgggagaatgcttccccagcccctggaacaacagcagaagaggccatgtcccgaggtccacctcctgctcctgaggggggctcccgggatgaacaggatggagcttcagctgagacagaaccttgggcagctgcagtccccccagaatgggtccctattatccagcaggacattcagagccagcggaaggtgaaaccgcagccccctctgagtgatgcctacctcagtggtatgcctgccaagagacgcaagacgatgcagggtgagggcccccagctgcttctctcagaggctgtgagccgggcagctaaggcagccggagctcggcccctgacgagccccgagagcctgagccgggacctggaggcaccagaggttcaggagagctacaggcagcagctccggtctgatatacaaaaacgactgcaggaagaccccaactacagtccccagcgcttccccaatgcccagcgggcctttgctgatgatccttagctctttgctctatggcccttcctcatcaggggaccgtttcccccctcttccttcacagtatttaagaaataaaagtcggatttttctggctgctttctctct

SEQ ID NO: 3261 - DNA, 736 bp, Homo sapiens
  source 1..736: mol_type = unassigned DNA
cccccacgacacctgcatgtggtccggcctatgtctcactacaccacccccatggtgctccagcaggcagccattcccatacagatcaatgtgggaaccactgtgaccatgacaggtccagctcccccgccagccaccagccacccgagggtcatccggatttcccaccagagtgtggaacccgtggtcatgatgcacatgaacattcaagattctggcacacagcctggtggtgttccgagtgctcccactggccccctgggaccccctggtcatggccaaaccctgggacagcaggtgccaggcttcccaacagctccaacccgggtggtgattgcccggcccactcctccacaggctcggccttcccatcctggagggcccccagtctctgggacactgcagggcgccggtctgggtaccaatgcctcgttggcccagatggtgagcggccttgtggggcagcttcttatgcagccagtccttgtggctcaggggaccccaggtatggctccaccgccagcccctgccactgcttctgccagtgctggcaccaccaacacagctaccacagctggccccgctcctggggggcctgcccagcctccacccacccctcaaccctccatggctgatcttcagttctctcagcttctggggaacctgctagggcctgcagggccaggggctggagggtctggtgtggcttctcccaccatcactgtggcgatgcctg

SEQ ID NO: 3262 - DNA, 3779 bp, Homo sapiens
  source 1..3779: mol_type = unassigned DNA
gggggtggggcgatgcttaagtgtccacgcatccgtagtgcgacgcacgcaggcgtagtacggtcccccgggcgacagcggtggcggctcctcggggtgctcggctccctcccacctaggccggccccggcccgactcgccctcagaaactcactgtttggggctgcggactttctcgtcgtgccccacaaaagtaaagcttggggacctggggggagccggaagtatcgcttcgagatccccaaatactatcggggaaacggaagtggccgtcggtggcagagacctgtcggccatggagcctaatgatagtaccagtaccgctgtggaggagcctgacagcttggaggtgttggtgaagaccttggactctcaaactcgtacctttattgtgggggcccagatgaatgtaaaagagtttaaggagcacattgctgcctctgtcagcatcccatctgaaaaacaacggctcatttaccagggacgagttctgcaagatgataagaagcttcaggaatacaatgttgggggaaaggttatccacctggtggaacgggctcctcctcagactcacctcccttctggggcatcttctgggacggggtctgcctcagccactcatggtgggggatccccccctggtactcgggggcctggggcctctgttcatgaccggaatgccaacagctatgtcatggttggaaccttcaatcttcctagtgacggctctgctgtggatgttcacatcaacatggaacaggccccgattcagagtgagccccgggtacggctggtgatggctcagcacatgatcagggatatacagaccttactatcccggatggagtgtcgaggagggccccaaccgcagcacagtcagccgcccccgcagccaccggctgtgaccccggagccagtagccttgagctctcaaacatcagaaccagttgaaagtgaagcacctccccgggagcccatggaggcagaagaagtggaggagcgtgccccagcccagaacccggagctcactcctggcccagccccagcgggcccaacacctgccccggaaacaaatgcacccaaccatccttcccctgcggagtatgtcgaggtgctccaggagctacagcggctggagagtcgcctccagcccttcttgcagcgctactacgaggttctgggtgctgctgccaccacggactacaataacaatcacgagggccgggaggaggatcagcggttgatcaacttggtaggggagagcctgcgactgctgggcaacacctttgttgcactgtctgacctgcgctgcaatctggcctgcacgcccccacgacacctgcatgtggtccggcctatgtctcactacaccacccccatggtgctccagcaggcagccattcccatacagatcaatgtgggaaccactgtgaccatgacaggaaatgggactcggccccccccaactcccaatgcagaggcacctccccctggtcctgggcaggcctcatccgtggctccgtcttctaccaatgtcgagtcctcagctgagggggctcccccgccaggtccagctcccccgccagccaccagccacccgagggtcatccggatttcccaccagagtgtggaacccgtggtcatgatgcacatgaacattcaagattctggcacacagcctggtggtgttccgagtgctcccactggccccctgggaccccctggtcatggccaaaccctgggacagcaggtgccaggcttcccaacagctccaacccgggtggtgattgcccggcccactcctccacaggctcggccttcccatcctggagggcccccagtctctgggacactgcagggcgccggtctgggtaccaatgcctcgttggcccagatggtgagcggccttgtggggcagcttcttatgcagccagtccttgtggctcaggggaccccaggtatggctccaccgccagcccctgccactgcttctgccagtgctggcaccaccaacacagctaccacagctggccccgctcctggggggcctgcccagcctccacccacccctcaaccctccatggctgatcttcagttctctcagcttctggggaacctgctagggcctgcagggccaggggctggagggcctggtgtggcttctcccaccatcactgtggcgatgcctggtgtccctgcctttctccaaggcatgactgacttcttgcaggcaacacagacagcccctccaccacccccacctcctccacccccaccacctgccccagagcagcagaccatgcccccaccaggctccccttctggtggcgcagggagtcctggaggcctgggtcttgagagcctgtcaccggagttttttacctcagtggtgcagggtgtgctcagctccctgctgggctccctgggggctcgggctggcagcagtgaaagtattgctgccttcatacaacgcctcagtggatccagcaacatctttgagcctggagctgatggggcccttggattctttggggccttgctttctcttctgtgccagaacttctctatggtggacgtagtgatgcttctccatgggcatttccagccactacaacggctccagccccagctgcgatccttcttccaccagcactacctgggtggtcaggagcccacacccagtaacatccggatggcaacccacacattgatcacggggctagaagagtatgtgcgggagagtttttccttggtgcaggttcagccaggtgtggacatcatccggacaaacctggaatttctccaagagcagtttaatagcattgctgcgcatgtgctgcattgcacagatagtggatttggggcccggttgctggagttgtgtaaccaaggcctgtttgaatgcctggccctaaacctgcactgcttggggggacagcagatggagcttgctgctgttatcaatggccgaattcgtcgtatgtctcgtggggtgaatccctccttggtgagctggctgaccactatgatgggactgaggcttcaggtggtactggagcacatgcctgtaggccctgatgccattctcagatacgttcgcagggttggtgatcccccccagccacttcctgaggagccaatggaagttcagggagcagaaagagcttcccctgagcctcagcgggagaatgcttccccagcccctggaacaacagcagaagaggccatgtcccgaggtccacctcctgctcctgaggggggctcccgggatgaacaggatggagcttcagctgagacagaaccttgggcagctgcagtccccccagaatgggtccctattatccagcaggacattcagagccagcggaaggtgaaaccgcagccccctctgagtgatgcctacctcagtggtatgcctgccaagagacgcaagacgatgcagggtgagggcccccagctgcttctctcagaggctgtgagccgggcagctaaggcagccggagctcggcccctgacgagccccgagagcctgagccgggacctggaggcaccagaggttcaggagagctacaggcagcagctccggtctgatatacaaaaacgactgcaggaagaccccaactacagtccccagcgcttccccaatgcccagcgggcctttgctgatgatccttagctctttgctctatggcccttcctcatcaggggaccgtttcccccctcttccttcacagtatttaagaaataaaagtcggatttttctggctgctttctctcta

SEQ ID NO: 3263 - DNA, 1051 bp, Homo sapiens
  source 1..1051: mol_type = unassigned DNA
agtgtggggcgaccaccgctttcgcgttgtcccaggattttccgacctctggggcgcttgtcctgccgtgaccggtgatgacactagtctctggtctcgtgcttccttcctaatctgactggctccctgcttattgtgattggcgtcgtggagcccctcccacctctcgtcctccagctccctaagccgtcgatctcctgccctttgtgtttctctccctgtgccccggaatcagaagggggatggggacagagacctgtcggccatggagcctaatgatagtaccagtaccgctgtggaggagcctgacagcttggaggtgttggtgaagaccttggactctcaaactcgtacctttattgtgggggcccagatgaatgtaaaagagtttaaggagcacattgctgcctctgtcagcatcccatctgaaaaacaacggctcatttaccagggacgagttctgcaagatgataagaagcttcaggaatacaatgttgggggaaaggttatccacctggtggaacgggctcctcctcagactcacctcccttctggggcatcttctgggacggggtctgcctcagccactcatggtgggggatccccccctggtactcgggggcctggggcctctgttcatgaccggaatgccaacagctatgtcatggttggaaccttcaatcttcctagtgacggctctgctgtggatgttcacatcaacatggaacaggccccgattcagagtgagccccgggtacggctggtgatggctcagcacatgatcagggatatacagaccttactatcccggatggagtgtcgaggagggccccaaccgcagcacagtcagccgcccccgcagccaccggctgtgaccccggagccagtagccttgagctctcaaacatcagaaccagttgaaagtgaagcacctccccgggagcccatggaggcagaagaagtggaggagcgtgccccagcccagaacccggagctcactcctggcccagccccagcgggcccaacacctgccccggaaacaaatgcaccc

SEQ ID NO: 3264 - DNA, 714 bp, Homo sapiens
  source 1..714: mol_type = unassigned DNA
tcctcagctgagggggctcccccgccaggtccagctcccccgccagccaccagccacccgagggtcatccggatttcccaccagagtgtggaacccgtggtcatgatgcacatgaacattcaagggccactgtctctgtctccctgcccagattctggcacacagcctggtggtgttccgagtgctcccactggccccctgggaccccctggtcatggccaaaccctgggacagcaggtgccaggcttcccaacagctccaacccgggtggtgattgcccggcccactcctccacaggctcggccttcccatcctggagggcccccagtctctgggacactgcagggcgccggtctgggtaccaatgcctcgttggcccagatggtgagcggccttgtggggcagcttcttatgcagccagtccttgtggctcaggggaccccaggtatggctccaccgccagcccctgccactgcttctgccagtgctggcaccaccaacacagctaccacagctggccccgctcctggggggcctgcccagcctccacccacccctcaaccctccatggctgatcttcagttctctcagcttctggggaacctgctagggcctgcagggccaggggctggagggcctggtgtggcttctcccaccatcactgtggcgatgcctggtgtccctgcctttctccaaggcatgactgacttcttg

SEQ ID NO: 3265 - DNA, 3635 bp, Homo sapiens
  source 1..3635: mol_type = unassigned DNA
ggagccgcggggtggtgggtgtgtgtgtgtgtgtgtgtgtgtgtgtgtgtgtgtgtgtgtgtgtttggctgtgggttagttgtgccgttctgctggaacaccgtgggaaggcagtagacgcgggcagtcagctagcagagacctgtcggccatggagcctaatgatagtaccagtaccgctgtggaggagcctgacagcttggaggtgttggtgaagaccttggactctcaaactcgtacctttattgtgggggcccagatgaatgtaaaagagtttaaggagcacattgctgcctctgtcagcatcccatctgaaaaacaacggctcatttaccagggacgagttctgcaagatgataagaagcttcaggaatacaatgttgggggaaaggttatccacctggtggaacgggctcctcctcagactcacctcccttctggggcatcttctgggacggggtctgcctcagccactcatggtgggggatccccccctggtactcgggggcctggggcctctgttcatgaccggaatgccaacagctatgtcatggttggaaccttcaatcttcctagtgacggctctgctgtggatgttcacatcaacatggaacaggccccgattcagagtgagccccgggtacggctggtgatggctcagcacatgatcagggatatacagaccttactatcccggatggagtgtcgaggagggccccaaccgcagcacagtcagccgcccccgcagccaccggctgtgaccccggagccagtagccttgagctctcaaacatcagaaccagttgaaagtgaagcacctccccgggagcccatggaggcagaagaagtggaggagcgtgccccagcccagaacccggagctcactcctggcccagccccagcgggcccaacacctgccccggaaacaaatgcacccaaccatccttcccctgcggagtatgtcgaggtgctccaggagctacagcggctggagagtcgcctccagcccttcttgcagcgctactacgaggttctgggtgctgctgccaccacggactacaataacaatcacgagggccgggaggaggatcagcggttgatcaacttggtaggggagagcctgcgactgctgggcaacacctttgttgcactgtctgacctgcgctgcaatctggcctgcacgcccccacgacacctgcatgtggtccggcctatgtctcactacaccacccccatggtgctccagcaggcagccattcccatacagatcaatgtgggaaccactgtgaccatgacaggaaatgggactcggccccccccaactcccaatgcagaggcacctccccctggtcctgggcaggcctcatccgtggctccgtcttctaccaatgtcgagtcctcagctgagggggctcccccgccaggtccagctcccccgccagccaccagccacccgagggtcatccggatttcccaccagagtgtggaacccgtggtcatgatgcacatgaacattcaagattctggcacacagcctggtggtgttccgagtgctcccactggccccctgggaccccctggtcatggccaaaccctgggacagcaggtgccaggcttcccaacagctccaacccgggtggtgattgcccggcccactcctccacaggctcggccttcccatcctggagggcccccagtctctgggacactgcagggcgccggtctgggtaccaatgcctcgttggcccagatggtgagcggccttgtggggcagcttcttatgcagccagtccttgtggctcaggggaccccaggtatggctccaccgccagcccctgccactgcttctgccagtgctggcaccaccaacacagctaccacagctggccccgctcctggggggcctgcccagcctccacccacccctcaaccctccatggctgatcttcagttctctcagcttctggggaacctgctagggcctgcagggccaggggctggagggcctggtgtggcttctcccaccatcactgtggcgatgcctggtgtccctgcctttctccaaggcatgactgacttcttgcaggcaacacagacagcccctccaccacccccacctcctccacccccaccacctgccccagagcagcagaccatgcccccaccaggctccccttctggtggcgcagggagtcctggaggcctgggtcttgagagcctgtcaccggagttttttacctcagtggtgcagggtgtgctcagctccctgctgggctccctgggggctcgggctggcagcagtgaaagtattgctgccttcatacaacgcctcagtggatccagcaacatctttgagcctggagctgatggggcccttggattctttggggccttgctttctcttctgtgccagaacttctctatggtggacgtagtgatgcttctccatgggcatttccagccactacaacggctccagccccagctgcgatccttcttccaccagcactacctgggtggtcaggagcccacacccagtaacatccggatggcaacccacacattgatcacggggctagaagagtatgtgcgggagagtttttccttggtgcaggttcagccaggtgtggacatcatccggacaaacctggaatttctccaagagcagtttaatagcattgctgcgcatgtgctgcattgcacagatagtggatttggggcccggttgctggagttgtgtaaccaaggcctgtttgaatgcctggccctaaacctgcactgcttggggggacagcagatggagcttgctgctgttatcaatggccgaattcgtcgtatgtctcgtggggtgaatccctccttggtgagctggctgaccactatgatgggactgaggcttcaggtggtactggagcacatgcctgtaggccctgatgccattctcagatacgttcgcagggttggtgatcccccccagccacttcctgaggagccaatggaagttcagggagcagaaagagcttcccctgagcctcagcgggagaatgcttccccagcccctggaacaacagcagaagaggccatgtcccgaggtccacctcctgctcctgaggggggctcccgggatgaacaggatggagcttcagctgagacagaaccttgggcagctgcagtccccccagaatgggtccctattatccagcaggacattcagagccagcggaaggtgaaaccgcagccccctctgagtgatgcctacctcagtggtatgcctgccaagagacgcaagacgatgcagggtgagggcccccagctgcttctctcagaggctgtgagccgggcagctaaggcagccggagctcggcccctgacgagccccgagagcctgagccgggacctggaggcaccagaggttcaggagagctacaggcagcagctccggtctgatatacaaaaacgactgcaggaagaccccaactacagtccccagcgcttccccaatgcccagcgggcctttgctgatgatccttagctctttgctctatggcccttcctcatcaggggaccgtttcccccctcttccttcacagtatttaagaaataaaagtcggatttttctggctgctttctctcta

SEQ ID NO: 3266 - DNA, 747 bp, Homo sapiens
  source 1..747: mol_type = unassigned DNA
tgtttggctgtgggttagttgtgccgttctgctggaacaccgtgggaaggcagtagacgcgggcagtcagctagcaggtccgtcgccccagacctgtcggccatggagcctaatgatagtaccagtaccgctgtggaggagcctgacagcttggaggtgttggtgaagaccttggactctcaaactcgtacctttattgtgggggcccagatgaatgtaaaagagtttaaggagcacattgctgcctctgtcagcatcccatctgaaaaacaacggctcatttaccagggacgagttctgcaagatgataagaagcttcaggaatacaatgttgggggaaaggttatccacctggtggaacgggctcctcctcagactcacctcccttctggggcatcttctgggacggggtctgcctcagccactcatggtgggggatccccccctggtactcgggggcctggggcctctgttcatgaccggaatgccaacagctatgtcatggttggaaccttcaatcttcctagtgagccccgggtacggctggtgatggctcagcacatgatcagggatatacagaccttactatcccggatggagtgtcgaggagggccccaaccgcagcacagtcagccgcccccgcagccaccggctgtgaccccggagccagtagccttgagctctcaaacatcagaaccagttgaaagtgaagcacctccccgggagcccatggaggcagaagaagtg

SEQ ID NO: 3267 - DNA, 880 bp, Homo sapiens
  source 1..880: mol_type = unassigned DNA
cgcagagtgtggggcgaccaccgctttcgcgttgtcccaggattttccgacctctggggcgcttgtcctgccgtgaccgagacctgtcggccatggagcctaatgatagtaccagtaccgctgtggaggagcctgacagcttggaggtgttggtgaagaccttggactctcaaactcgtacctttattgtgggggcccagatgaatgtaaaagagtttaaggagcacattgctgcctctgtcagcatcccatctgaaaaacaacggctcatttaccagggacgagttctgcaagatgataagaagcttcaggaatacaatgttgggggaaaggttatccacctggtggaacgggctcctcctcagactcacctcccttctggggcatcttctgggacggggtctgcctcagccactcatggtgggggatccccccctggtactcgggggcctggggcctctgttcatgaccggaatgccaacagctatgtcatggttggaaccttcaatcttcctagtgacggctctgctgtggatgttcacatcaacatggaacaggccccgattcagagtgagccccgggtacggctggtgatggctcagcacatgatcagggatatacagaccttactatcccggatggagtgtcgaggagggccccaaccgcagcacagtcagccgcccccgcagccaccggctgtgaccccggagccagtagccttgagctctcaaacatcagaaccagttgaaagtgaagcacctccccgggagcccatggaggcagaagaagtggaggagcgtgccccagcccagaacccggagctcactcctggcccagccccagcgggcccaacacctgccccggaaacaaatgcacccaa

SEQ ID NO: 3268 - DNA, 2407 bp, Homo sapiens
  source 1..2407: mol_type = unassigned DNA
cgcatccgtagtgcgacgcacgcaggcgtagtacggtcccccgggcgacagcggtggcggctcctcggggtgctcggctccctcccacctaggccggccccggcccgactcgccctcagaaactcactgtttggggctgcggactttctcgtcgtgccccacaaaaagacctgtcggccatggagcctaatgatagtaccagtaccgctgtggaggagcctgacagcttggaggtgttggtgaagaccttggactctcaaactcgtacctttattgtgggggcccagatgaatgtaaaagagtttaaggagcacattgctgcctctgtcagcatcccatctgaaaaacaacggctcatttaccagggacgagttctgcaagatgataagaagcttcaggaatacaatgttgggggaaaggttatccacctggtggaacgggctcctcctcagactcacctcccttctggggcatcttctgggacggggtctgcctcagccactcatggtgggggatccccccctggtactcgggggcctggggcctctgttcatgaccggaatgccaacagctatgtcatggttggaaccttcaatcttcctagtgacggctctgctgtggatgttcacatcaacatggaacaggccccgattcagagtgagccccgggtacggctggtgatggctcagcacatgatcagggatatacagaccttactatcccggatggagtgtcgaggagggccccaaccgcagcacagtcagccgcccccgcagccaccggctgtgaccccggagccagtagccttgagctctcaaacatcagaaccagttgaaagtgaagcacctccccgggagcccatggaggcagaagaagtggaggagcgtgccccagcccagaacccggagctcactcctggcccagccccagcgggcccaacacctgccccggaaacaaatgcacccaaccatccttcccctgcggagtatgtcgaggtgctccaggagctacagcggctggagagtcgcctccagcccttcttgcagcgctactacgaggttctgggtgctgctgccaccacggactacaataacaatcacgagggccgggaggaggatcagcggttgatcaacttggtaggggagagcctgcgactgctgggcaacacctttgttgcactgtctgacctgcgctgcaatctggcctgcacgcccccacgacacctgcatgtggtccggcctatgtctcactacaccacccccatggtgctccagcaggcagccattcccatacagatcaatgtgggaaccactgtgaccatgacaggaaatgggactcggccccccccaactcccaatgcagaggcacctccccctggtcctgggcaggcctcatccgtggctccgtcttctaccaatgtcgagtcctcagctgagggggctcccccgccaggtccagctcccccgccagccaccagccacccgagggtcatccggatttcccaccagagtgtggaacccgtggtcatgatgcacatgaacattcaagattctggcacacagcctggtggtgttccgagtgctcccactggccccctgggaccccctggtcatggccaaaccctgggctccaccctcatccagctgccctccctgccccctgagttcatgcacgccgtcgcccaccagatcactcatcaggccatggtggcagctgttgcctccgcggccgcaggacagcaggtgccaggcttcccaacagctccaacccgggtggtgattgcccggcccactcctccacaggctcggccttcccatcctggagggcccccagtctctgggacactgcagggcgccggtctgggtaccaatgcctcgttggcccagatggtgagcggccttgtggggcagcttcttatgcagccagtccttgtggctcaggggaccccaggtatggctccaccgccagcccctgccactgcttctgccagtgctggcaccaccaacacagctaccacagctggccccgctcctggggggcctgcccagcctccacccacccctcaaccctccatggctgatcttcagttctctcagcttctggggaacctgctagggcctgcagggccaggggctggagggcctggtgtggcttctcccaccatcactgtggcgatgcctggtgtccctgcctttctccaaggcatgactgacttcttgcaggcaacacagacagcccctccaccacccccacctcctccacccccaccacctgccccagagcagcagaccatgcccccaccaggctccccttctggtggcgcagggagtcctggaggcctgggtcttgagagcctgtcaccggagttttttacctcagtggtgcagggtgtgctcagctccctgct

SEQ ID NO: 3269 - DNA, 3779 bp, Homo sapiens; identical to SEQ ID NO: 3262
  source 1..3779: mol_type = unassigned DNA

SEQ ID NO: 3270 - DNA, 3644 bp, Homo sapiens
  source 1..3644: mol_type = unassigned DNA
ggggaagtcgggggcggagccgcggggtggtgggtgtgtgtgtgtgtgtgtgtgtgtgtgtgtgtgtgtgtgtttggctgtgggttagttgtgccgttctgctggaacaccgtgggaaggcagtagacgcgggcagtcagctagcagagacctgtcggccatggagcctaatgatagtaccagtaccgctgtggaggagcctgacagcttggaggtgttggtgaagaccttggactctcaaactcgtacctttattgtgggggcccagatgaatgtaaaagagtttaaggagcacattgctgcctctgtcagcatcccatctgaaaaacaacggctcatttaccagggacgagttctgcaagatgataagaagcttcaggaatacaatgttgggggaaaggttatccacctggtggaacgggctcctcctcagactcacctcccttctggggcatcttctgggacggggtctgcctcagccactcatggtgggggatccccccctggtactcgggggcctggggcctctgttcatgaccggaatgccaacagctatgtcatggttggaaccttcaatcttcctagtgacggctctgctgtggatgttcacatcaacatggaacaggccccgattcagagtgagccccgggtacggctggtgatggctcagcacatgatcagggatatacagaccttactatcccggatggagtgtcgaggagggccccaaccgcagcacagtcagccgcccccgcagccaccggctgtgaccccggagccagtagccttgagctctcaaacatcagaaccagttgaaagtgaagcacctccccgggagcccatggaggcagaagaagtggaggagcgtgccccagcccagaacccggagctcactcctggcccagccccagcgggcccaacacctgccccggaaacaaatgcacccaaccatccttcccctgcggagtatgtcgaggtgctccaggagctacagcggctggagagtcgcctccagcccttcttgcagcgctactacgaggttctgggtgctgctgccaccacggactacaataacaatcacgagggccgggaggaggatcagcggttgatcaacttggtaggggagagcctgcgactgctgggcaacacctttgttgcactgtctgacctgcgctgcaatctggcctgcacgcccccacgacacctgcatgtggtccggcctatgtctcactacaccacccccatggtgctccagcaggcagccattcccatacagatcaatgtgggaaccactgtgaccatgacaggaaatgggactcggccccccccaactcccaatgcagaggcacctccccctggtcctgggcaggcctcatccgtggctccgtcttctaccaatgtcgagtcctcagctgagggggctcccccgccaggtccagctcccccgccagccaccagccacccgagggtcatccggatttcccaccagagtgtggaacccgtggtcatgatgcacatgaacattcaagattctggcacacagcctggtggtgttccgagtgctcccactggccccctgggaccccctggtcatggccaaaccctgggacagcaggtgccaggcttcccaacagctccaacccgggtggtgattgcccggcccactcctccacaggctcggccttcccatcctggagggcccccagtctctgggacactgcagggcgccggtctgggtaccaatgcctcgttggcccagatggtgagcggccttgtggggcagcttcttatgcagccagtccttgtggctcaggggaccccaggtatggctccaccgccagcccctgccactgcttctgccagtgctggcaccaccaacacagctaccacagctggccccgctcctggggggcctgcccagcctccacccacccctcaaccctccatggctgatcttcagttctctcagcttctggggaacctgctagggcctgcagggccaggggctggagggcctggtgtggcttctcccaccatcactgtggcgatgcctggtgtccctgcctttctccaaggcatgactgacttcttgcaggcaacacagacagcccctccaccacccccacctcctccacccccaccacctgccccagagcagcagaccatgcccccaccaggctccccttctggtggcgcagggagtcctggaggcctgggtcttgagagcctgtcaccggagttttttacctcagtggtgcagggtgtgctcagctccctgctgggctccctgggggctcgggctggcagcagtgaaagtattgctgccttcatacaacgcctcagtggatccagcaacatctttgagcctggagctgatggggcccttggattctttggggccttgctttctcttctgtgccagaacttctctatggtggacgtagtgatgcttctccatgggcatttccagccactacaacggctccagccccagctgcgatccttcttccaccagcactacctgggtggtcaggagcccacacccagtaacatccggatggcaacccacacattgatcacggggctagaagagtatgtgcgggagagtttttccttggtgcaggttcagccaggtgtggacatcatccggacaaacctggaatttctccaagagcagtttaatagcattgctgcgcatgtgctgcattgcacagatagtggatttggggcccggttgctggagttgtgtaaccaaggcctgtttgaatgcctggccctaaacctgcactgcttggggggacagcagatggagcttgctgctgttatcaatggccgaattcgtcgtatgtctcgtggggtgaatccctccttggtgagctggctgaccactatgatgggactgaggcttcaggtggtactggagcacatgcctgtaggccctgatgccattctcagatacgttcgcagggttggtgatcccccccagccacttcctgaggagccaatggaagttcagggagcagaaagagcttcccctgagcctcagcgggagaatgcttccccagcccctggaacaacagcagaagaggccatgtcccgaggtccacctcctgctcctgaggggggctcccgggatgaacaggatggagcttcagctgagacagaaccttgggcagctgcagtccccccagaatgggtccctattatccagcaggacattcagagccagcggaaggtgaaaccgcagccccctctgagtgatgcctacctcagtggtatgcctgccaagagacgcaagacgatgcagggtgagggcccccagctgcttctctcagaggctgtgagccgggcagctaaggcagccggagctcggcccctgacgagccccgagagcctgagccgggacctggaggcaccagaggttcaggagagctacaggcagcagctccggtctgatatacaaaaacgactgcaggaagaccccaactacagtccccagcgcttccccaatgcccagcgggcctttgctgatgatccttagctctttgctctatggcccttcctcatcaggggaccgtttcccccctcttccttcacagtatttaagaaataaaagtcggatttttctggctgctttctctcta

SEQ ID NO: 3271 - DNA, 410 bp, Homo sapiens
  source 1..410: mol_type = unassigned DNA
gtcgtatgtctcgtggggtgaatccctccttggtgagctggctgaccactatgatgggactgaggcttcaggtggtactggagcacatgcctgtaggccctgatgccattctcagatacgttcgcagggttggtgatcccccccagccacttcctgaggagccaatggaagttcagggagcagaaagagcttcccctgagcctcaggaatgggtccctattatccagcaggacattcagagccagcggaaggtgaaaccgcagccccctctgagtgatgcctacctcagtggtatgcctgccaagagacgcaagctccggtctgatatacaaaaacgactgcaggaagaccccaactacagtccccagcgcttccccaatgcccagcgggcctttgctgatgatccttag

SEQ ID NO: 3272 - DNA, 1051 bp, Homo sapiens; identical to SEQ ID NO: 3263
  source 1..1051: mol_type = unassigned DNA

SEQ ID NO: 3273 - DNA, 766 bp, Homo sapiens
  source 1..766: mol_type = unassigned DNA
agaagggggatggggacagagacctgtcggccatggagcctaatgatagtaccagtaccgctgtggaggagcctgacagcttggaggtgttggtgaagaccttggactctcaaactcgtacctttattgtgggggcccagatgaatgtaaaagagtttaaggagcacattgctgcctctgtcagcatcccatctgaaaaacaacggctcatttaccagggacgagttctgcaagatgataagaagcttcaggaatacaatgttgggggaaaggttatccacctggtggaacgggctcctcctcagactcacctcccttctggggcatcttctgggacggggtctgcctcagccactcatggtgggggatccccccctggtactcgggggcctggggcctctgttcatgaccggaatgccaacagctatgtcatggttggaaccttcaatcttcctagtgagccccgggtacggctggtgatggctcagcacatgatcagggatatacagaccttactatcccggatggagtgtcgaggagggccccaaccgcagcacagtcagccgcccccgcagccaccggctgtgaccccggagccagtagccttgagctctcaaacatcagaaccagttgaaagtgaagcacctccccgggagcccatggaggcagaagaagtggaggagcgtgccccagcccagaacccggagctcactcctggcccagccccagcgggcccaacacctgccccggaaacaaatgcacccaa

SEQ ID NO: 3274 - DNA, 807 bp, Homo sapiens
  source 1..807: mol_type = unassigned DNA
cagctccctaagccgtcgatctcctgccctttgtgtttctctccctgtgccccggaatcagaagggggatggggacaggtgtgaatgtgtgtgtgtgcaggagaaactttttaggtattggggcagggattaatgctagggagtctttcgggtacactctggtctgggcaacagcgggccttccttccttcgttcttctttagagacctgtcggccatggagcctaatgatagtaccagtaccgctgtggaggagcctgacagcttggaggtgttggtgaagaccttggactctcaaactcgtacctttattgtgggggcccagatgaatgtaaaagagtttaaggagcacattgctgcctctgtcagcatcccatctgaaaaacaacggctcatttaccagggacgagttctgcaagatgataagaagcttcaggaatacaatgttgggggaaaggttatccacctggtggaacgggctcctcctcagactcacctcccttctggggcatcttctgggacggggtctgcctcagccactcatggtgggggatccccccctggtactcgggggcctggggcctctgttcatgaccggaatgccaacagctatgtcatggttggaaccttcaatcttcctagtgacggctctgctgtggatgttcacatcaacatggaacaggccccgattcagagtgagccccgggtacggctggtgatggctcagcacatgatcagggatatacagaccttactatcccggatggagtgtcgaggagggccccaaccgcagcacagtcagccgccc

SEQ ID NO: 3275 - DNA, 654 bp, Homo sapiens
  source 1..654: mol_type = unassigned DNA
cggaagtggccgtcggtggcagagacctgtcggccatggagcctaatgatagtaccagtaccgctgtggaggagcctgacagcttggaggtgttggtgaagaccttggactctcaaactcgtacctttattgtgggggcccagatgaatgtaaaagagtttaaggagcacattgctgcctctgtcagcatcccatctgaaaaacaacggctcatttaccagggacgagttctgcaagatgataagaagcttcaggaatacaatgttgggggaaaggttatccacctggtggaacgggctcctcctcagactcacctcccttctggggcatcttctgggacggggtctgcctcagccactcatggtgggggatccccccctggtactcgggggcctggggcctctgttcatgaccggaatgccaacagctatgtcatggttggaaccttcaatcttcctagtgagccccgggtacggctggtgatggctcagcacatgatcagggatatacagaccttactatcccggatggagtgtcgaggagggccccaaccgcagcacagtcagccgcccccgcagccaccggctgtgaccccggagccagtagccttgagctctcaaacatcagaaccagttgaaagtgaagcacctcccc

SEQ ID NO: 3276 - DNA, 766 bp, Homo sapiens; identical to SEQ ID NO: 3273
  source 1..766: mol_type = unassigned DNA

SEQ ID NO: 3277 - DNA, 3783 bp, Homo sapiens; identical to SEQ ID NO: 3259
  source 1..3783: mol_type = unassigned DNA

SEQ ID NO: 3278 - DNA, 993 bp, Homo sapiens
  source 1..993: mol_type = unassigned DNA
gtacggtcccccgggcgacagcggtggcggctcctcggggtgctcggctccctcccacctaggccggccccggcccgactcgccctcagaaactcactgtttggggctgcggactttctcgtcgtgccccacaaaagtaaagcttggggacctggggggagccggaagtatcgcttcgagatccccaaatactatcggggaaacggaagtggccgtcggtggcaggtttgggggagaccggaagtgacgagacctgtcggccatggagcctaatgatagtaccagtaccgctgtggaggagcctgacagcttggaggtgttggtgaagaccttggactctcaaactcgtacctttattgtgggggcccagatgaatgtaaaagagtttaaggagcacattgctgcctctgtcagcatcccatctgaaaaacaacggctcatttaccagggacgagttctgcaagatgataagaagcttcaggaatacaatgttgggggaaaggttatccacctggtggaacgggctcctcctcagactcacctcccttctggggcatcttctgggacggggtctgcctcagccactcatggtgggggatccccccctggtactcgggggcctggggcctctgttcatgaccggaatgccaacagctatgtcatggttggaaccttcaatcttcctagtgagccccgggtacggctggtgatggctcagcacatgatcagggatatacagaccttactatcccggatggagtgtcgaggagggccccaaccgcagcacagtcagccgcccccgcagccaccggctgtgaccccggagccagtagccttgagctctcaaacatcagaaccagttgaaagtgaagcacctccccgggagcccatggaggcagaagaagtggaggagcgtgccccagcccagaacccggagctcactcctggcccagccccagcgggcccaacacctgccccggaaacaaatgcacc

SEQ ID NO: 3279 - DNA, 714 bp, Homo sapiens
  source 1..714: mol_type = unassigned DNA
tcctcagctgagggggctcccccgccaggtccagctcccccgccagccaccagccacccgagggtcatccggatttcccaccagagtgtggaacccgtggtcatgatgcacatgaacattcaagggccactgtctctgtctccctgcccagattctggcacacagcctggtggtgttccgagtgctcccactggccccctgggaccccctggtcatggccaaaccctgggacagcaggtgccaggcttcccaacagctccaacccgggtggtgattgcccggcccactcctccacaggctcggccttcccatcctggagggcccccagtctctgggacactgcagggcgccggtctgggtaccaatgcctcgttggcccagatggtgagcggccttgtggggcagcttcttatgcagccagtccttgtggctcaggggaccccaggtatggctccaccgccagcccctgccactgcttctgccagtgctggcaccaccaacacagctaccacagctggccccgctcctggggggcctgcccagcctccacccacccctcaaccctccatggctgatcttcagttctctcagcttctggggaacctgctagggcctgcagggccaggggctggagggtctggtgtggcttctcccaccatcactgtggcgatgcctggtgtccctgcctttctccaaggcatgactgacttcttg

SEQ ID NO: 3280 - DNA, 859 bp, Homo sapiens
  source 1..859: mol_type = unassigned DNA
gggtgtgtgtgtgtgtgtgtgtgtgtgtgtgtgtgtgtttggctgtgggttagttgtgccgttctgctggaacaccgtgggaaggcagtagacgcgggcagtcagctagcagagacctgtcggccatggagcctaatgatagtaccagtaccgctgtggaggagcctgacagcttggaggtgttggtgaagaccttggactctcaaactcgtacctttattgtgggggcccagatgaatgtaaaagagtttaaggagcacattgctgcctctgtcagcatcccatctgaaaaacaacggctcatttaccagggacgagttctgcaagatgataagaagcttcaggaatacaatgttgggggaaaggttatccacctggtggaacgggctcctcctcagactcacctcccttctggggcatcttctgggacggggtctgcctcagccactcatggtgggggatccccccctggtactcgggggcctggggcctctgttcatgaccggaatgccaacagctatgtcatggttggaaccttcaatcttcctagtgagccccgggtacggctggtgatggctcagcacatgatcagggatatacagaccttactatcccggatggagtgtcgaggagggccccaaccgcagcacagtcagccgcccccgcagccaccggctgtgaccccggagccagtagccttgagctctcaaacatcagaaccagttgaaagtgaagcacctccccgggagcccatggaggcagaagaagtggaggagcgtgccccagcccagaacccggagctcactcctggcccagccccagcgggcccaacacctgccccggaaacaaatgcacccaa

SEQ ID NO: 3281 - DNA, 2407 bp, Homo sapiens
  source 1..2407: mol_type = unassigned DNA
cgcatccgtagtgcgacgcacgcaggcgtagtacggtcccccgggcgacagcggtggcggctcctcggggtgctcggctccctcccacctaggccggccccggcccgactcgccctcagaaactcactgtttggggctgcggactttctcgtcgtgccccacaaaaagacctgtcggccatggagcctaatgatagtaccagtaccgctgtggaggagcctgacagcttggaggtgttggtgaagaccttggactctcaaactcgtacctttattgtgggggcccagatgaatgtaaaagagtttaaggagcacattgctgcctctgtcagcatcccatctgaaaaacaacggctcatttaccagggacgagttctgcaagatgataagaagcttcaggaatacaatgttgggggaaaggttatccacctggtggaacgggctcctcctcagactcacctcccttctggggcatcttctgggacggggtctgcctcagccactcatggtgggggatccccccctggtactcgggggcctggggcctctgttcatgaccggaatgccaacagctatgtcatggttggaaccttcaatcttcctagtgacggctctgctgtggatgttcacatcaacatggaacaggccccgattcagagtgagccccgggtacggctggtgatggctcagcacatgatcagggatatacagaccttactatcccggatggagtgtcgaggagggccccaaccgcagcacagtcagccgcccccgcagccaccggctgtgaccccggagccagtagccttgagctctcaaacatcagaaccagttgaaagtgaagcacctccccgggagcccatggaggcagaagaagtggaggagcgtgccccagcccagaacccggagctcactcctggcccagccccagcgggcccaacacctgccccggaaacaaatgcacccaaccatccttcccctgcggagtatgtcgaggtgctccaggagctacagcggctggagagtcgcctccagcccttcttgcagcgctactacgaggttctgggtgctgctgccaccacggactacaataacaatcacgagggccgggaggaggatcagcggttgatcaacttggtaggggagagcctgcgactgctgggcaacacctttgttgcactgtctgacctgcgctgcaatctggcctgcacgcccccacgacacctgcatgtggtccggcctatgtctcactacaccacccccatggtgctccagcaggcagccattcccatacagatcaatgtgggaaccactgtgaccatgacaggaaatgggactcggccccccccaactcccaatgcagaggcacctccccctggtcctgggcaggcctcatccgtggctccgtcttctaccaatgtcgagtcctcagctgagggggctcccccgccaggtccagctcccccgccagccaccagccacccgagggtcatccggatttcccaccagagtgtggaacccgtggtcatgatgcacatgaacattcaagattctggcacacagcctggtggtgttccgagtgctcccactggccccctgggaccccctggtcatggccaaaccctgggctccaccctcatccagctgccctccctgccccctgagttcatgcacgccgtcgcccaccagatcactcatcaggccatggtggcagctgttgcctccgcggccgcaggacagcaggtgccaggcttcccaacagctccaacccgggtggtgattgcccggcccactcctccacaggctcggccttcccatcctggagggcccccagtctctgggacactgcagggcgccggtctgggtaccaatgcctcgttggcccagatggtgagcggccttgtggggcagcttcttatgcagccagtccttgtggctcaggggaccccaggtatggctccaccgccagcccctgccactgcttctgccagtgctggcaccaccaacacagctaccacagctggccccgctcctggggggcctgcccagcctccacccacccctcaaccctccatggctgatcttcagttctctcagcttctggggaacctgctagggcctgcagggccaggggctggagggtctggtgtggcttctcccaccatcactgtggcgatgcctggtgtccctgcctttctccaaggcatgactgacttcttgcaggcaacacagacagcccctccaccacccccacctcctccacccccaccacctgccccagagcagcagaccatgcccccaccaggctccccttctggtggcgcagggagtcctggaggcctgggtcttgagagcctgtcaccggagttttttacctcagtggtgcagggtgtgctcagctccctgct

SEQ ID NO: 3282 - DNA, 544 bp, Homo sapiens
  source 1..544: mol_type = unassigned DNA
tttccgacctctggggcgcttgtcctgccgtgaccggtgatgacactagtctctgagacctgtcggccatggagcctaatgatagtaccagtaccgctgtggaggagcctgacagcttggaggtgttggtgaagaccttggactctcaaactcgtacctttattgtgggggcccagatgaatgtaaaagagtttaaggagcacattgctgcctctgtcagcatcccatctgaaaaacaacggctcatttaccagggacgagttctgcaagatgataagaagcttcaggaatacaatgttgggggaaaggttatccacctggtggaacgggctcctcctcagactcacctcccttctggggcatcttctgggacggggtctgcctcagccactcatggtgggggatccccccctggtactcgggggcctggggcctctgttcatgaccggaatgccaacagctatgtcatggttggaaccttcaatcttcctagtgacggctctgctgtggatgttcacatcaacatggaacaggccccgattca

SEQ ID NO: 3283 - DNA, 680 bp, Homo sapiens
  source 1..680: mol_type = unassigned DNA
atagtggatttggggcccggttgctggagttgtgtaaccaaggcctgtttgaatgcctggccctaaacctgcactgcttggggggacagcagatggagcttgctgctgttatcaatggccgaattcgtcgtatgtctcgtggggtgaatccctccttggtgagctggctgaccactatgatgggactgaggcttcaggtggtactggagcacatgcctgtaggccctgatgccattctcagatacgttcgcagggttggtgatcccccccagccacttcctgaggagccaatggaagttcagggagcagaaagagcttcccctgagcctcagcgggagaatgcttccccagcccctggaacaacagcagaagaggccatgtcccgaggtccacctcctgctcctgaggggggctcccgggatgaacaggatggagcttcagctgagacagaaccttgggcagctgcagtccccccagaatgggtccctattatccagcaggacattcagagccagcggaaggtgaaaccgcagccccctctgagtgatgcctacctcagtggtatgcctgccaagagacgcaagctccggtctgatatacaaaaacgactgcaggaagaccccaactacagtccccagcgcttccccaatgcccagcgggcctttgctgatgatccttag

SEQ ID NO: 3284 - DNA, 714 bp, Homo sapiens; identical to SEQ ID NO: 3264
  source 1..714: mol_type = unassigned DNA

SEQ ID NO: 3285 - DNA, 3783 bp, Homo sapiens; identical to SEQ ID NO: 3259
  source 1..3783: mol_type = unassigned DNA

SEQ ID NO: 3286 - DNA, 880 bp, Homo sapiens; identical to SEQ ID NO: 3267
  source 1..880: mol_type = unassigned DNA

SEQ ID NO: 3287 - DNA, 544 bp, Homo sapiens; identical to SEQ ID NO: 3282
  source 1..544: mol_type = unassigned DNA

SEQ ID NO: 3288 - DNA, 1056 bp, Homo sapiens
  source 1..1056: mol_type = unassigned DNA
tgcgacgcacgcaggcgtagtacggtcccccgggcgacagcggtggcggctcctcggggtgctcggctccctcccacctaggccggccccggcccgactcgccctcagaaactcactgtttggggctgcggactttctcgtcgtgccccacaaaagtaaagcttggggacctggggggagccggaagtatcgcttcgagatccccaaatactatcggggaaacggaagtggccgtcggtggcaggtttgggggagaccggaagtgacgagacctgtcggccatggagcctaatgatagtaccagtaccgctgtggaggagcctgacagcttggaggtgttggtgaagaccttggactctcaaactcgtacctttattgtgggggcccagatgaatgtaaaagagtttaaggagcacattgctgcctctgtcagcatcccatctgaaaaacaacggctcatttaccagggacgagttctgcaagatgataagaagcttcaggaatacaatgttgggggaaaggttatccacctggtggaacgggctcctcctcagactcacctcccttctggggcatcttctgggacggggtctgcctcagccactcatggtgggggatccccccctggtactcgggggcctggggcctctgttcatgaccggaatgccaacagctatgtcatggttggaaccttcaatcttcctagtgacggctctgctgtggatgttcacatcaacatggaacaggccccgattcagagtgagccccgggtacggctggtgatggctcagcacatgatcagggatatacagaccttactatcccggatggagtgtcgaggagggccccaaccgcagcacagtcagccgcccccgcagccaccggctgtgaccccggagccagtagccttgagctctcaaacatcagaaccagttgaaagtgaagcacctccccgggagcccatggaggcagaagaagtggaggagcgtgccccagcccagaacccggagctcactcctggcccagccccagcgggcccaacacctgccccggaaa

SEQ ID NO: 3289 - DNA, 859 bp, Homo sapiens; identical to SEQ ID NO: 3280
  source 1..859: mol_type = unassigned DNA

SEQ ID NO: 3290 - DNA, 1710 bp, Homo sapiens
  source 1..1710: mol_type = unassigned DNA
tcgggggcggagccgcggggtggtgggtgggtgtgtgtgtgtgtgtgtgtgtgtgtgtgtgtgtgtttggctgtgggttagttgtgccgttctgctggaacaccgtgggaaggcagtagacgcgggcagtcagctagcaggtccgtcgccccagacctgtcggccatggagcctaatgatagtaccagtaccgctgtggaggagcctgacagcttggaggtgttggtgaagaccttggactctcaaactcgtacctttattgtgggggcccagatgaatgtaaaagagtttaaggagcacattgctgcctctgtcagcatcccatctgaaaaacaacggctcatttaccagggacgagttctgcaagatgataagaagcttcaggaatacaatgttgggggaaaggttatccacctggtggaacgggctcctcctcagactcacctcccttctggggcatcttctgggacggggtctgcctcagccactcatggtgggggatccccccctggtactcgggggcctggggcctctgttcatgaccggaatgccaacagctatgtcatggttggaaccttcaatcttcctagtgacggctctgctgtggatgttcacatcaacatggaacaggccccgattcagagtgagccccgggtacggctggtgatggctcagcacatgatcagggatatacagaccttactatcccggatggagtgtcgaggagggccccaaccgcagcacagtcagccgcccccgcagccaccggctgtgaccccggagccagtagccttgagctctcaaacatcagaaccagttgaaagtgaagcacctccccgggagcccatggaggcagaagaagtggaggagcgtgccccagcccagaacccggagctcactcctggcccagccccagcgggcccaacacctgccccggaaacaaatgcacccaaccatccttcccctgcggagtatgtcgaggtgctccaggagctacagcggctggagagtcgcctccagcccttcttgcagcgctactacgaggttctgggtgctgctgccaccacggactacaataacaatcacgagggccgggaggaggatcagcggttgatcaacttggtaggggagagcctgcgactgctgggcaacacctttgttgcactgtctgacctgcgctgcaatctggcctgcacgcccccacgacacctgcatgtggtccggcctatgtctcactacaccacccccatggtgctccagcaggcagccattcccatacagatcaatgtgggaaccactgtgaccatgacaggaaatgggactcggccccccccaactcccaatgcagaggcacctccccctggtcctgggcaggcctcatccgtggctccgtcttctaccaatgtcgagtcctcagctgagggggctcccccgccaggtccagctcccccgccagccaccagccacccgagggtcatccggatttcccaccagagtgtggaacccgtggtcatgatgcacatgaacattcaagattctggcacacagcctggtggtgttccgagtgctcccactggccccctgggaccccctggtcatggccaaaccctgggctccaccctcatccagctgccctccctgccccctgagttcatgcacgccgtcgcccaccagatcactcatcaggccatggtggcagctgttgcctcc

SEQ ID NO: 3291 - DNA, 844 bp, Homo sapiens
  source 1..844: mol_type = unassigned DNA
cggtcccccgggcgacagcggtggcggctcctcggggtgctcggctccctcccacctaggccggccccggcccgactcgccctcagaaactcactgtttggggctgcggactttctcgtcgtgccccacaaaaagacctgtcggccatggagcctaatgatagtaccagtaccgctgtggaggagcctgacagcttggaggtgttggtgaagaccttggactctcaaactcgtacctttattgtgggggcccagatgaatgtaaaagagtttaaggagcacattgctgcctctgtcagcatcccatctgaaaaacaacggctcatttaccagggacgagttctgcaagatgataagaagcttcaggaatacaatgttgggggaaaggttatccacctggtggaacgggctcctcctcagactcacctcccttctggggcatcttctgggacggggtctgcctcagccactcatggtgggggatccccccctggtactcgggggcctggggcctctgttcatgaccggaatgccaacagctatgtcatggttggaaccttcaatcttcctagtgacggctctgctgtggatgttcacatcaacatggaacaggccccgattcagagtgagccccgggtacggctggtgatggctcagcacatgatcagggatatacagaccttactatcccggatggagactctcccctaccttcagtgtcgaggagggccccaaccgcagcacagtcagccgcccccgcagccaccggctgtgaccccggagccagtagccttgagctctcaaacatcagaaccagttgaaagtgaagcacctccccgggagcc

SEQ ID NO: 3292 - DNA, 3648 bp, Homo sapiens
  source 1..3648: mol_type = unassigned DNA
ggggaagtcgggggcggagccgcggggtggtgggtgtgtgtgtgtgtgtgtgtgtgtgtgtgtgtgtgtgtgtgtgtttggctgtgggttagttgtgccgttctgctggaacaccgtgggaaggcagtagacgcgggcagtcagctagcagagacctgtcggccatggagcctaatgatagtaccagtaccgctgtggaggagcctgacagcttggaggtgttggtgaagaccttggactctcaaactcgtacctttattgtgggggcccagatgaatgtaaaagagtttaaggagcacattgctgcctctgtcagcatcccatctgaaaaacaacggctcatttaccagggacgagttctgcaagatgataagaagcttcaggaatacaatgttgggggaaaggttatccacctggtggaacgggctcctcctcagactcacctcccttctggggcatcttctgggacggggtctgcctcagccactcatggtgggggatccccccctggtactcgggggcctggggcctctgttcatgaccggaatgccaacagctatgtcatggttggaaccttcaatcttcctagtgacggctctgctgtggatgttcacatcaacatggaacaggccccgattcagagtgagccccgggtacggctggtgatggctcagcacatgatcagggatatacagaccttactatcccggatggagtgtcgaggagggccccaaccgcagcacagtcagccgcccccgcagccaccggctgtgaccccggagccagtagccttgagctctcaaacatcagaaccagttgaaagtgaagcacctccccgggagcccatggaggcagaagaagtggaggagcgtgccccagcccagaacccggagctcactcctggcccagccccagcgggcccaacacctgccccggaaacaaatgcacccaaccatccttcccctgcggagtatgtcgaggtgctccaggagctacagcggctggagagtcgcctccagcccttcttgcagcgctactacgaggttctgggtgctgctgccaccacggactacaataacaatcacgagggccgggaggaggatcagcggttgatcaacttggtaggggagagcctgcgactgctgggcaacacctttgttgcactgtctgacctgcgctgcaatctggcctgcacgcccccacgacacctgcatgtggtccggcctatgtctcactacaccacccccatggtgctccagcaggcagccattcccatacagatcaatgtgggaaccactgtgaccatgacaggaaatgggactcggccccccccaactcccaatgcagaggcacctccccctggtcctgggcaggcctcatccgtggctccgtcttctaccaatgtcgagtcctcagctgagggggctcccccgccaggtccagctcccccgccagccaccagccacccgagggtcatccggatttcccaccagagtgtggaacccgtggtcatgatgcacatgaacattcaagattctggcacacagcctggtggtgttccgagtgctcccactggccccctgggaccccctggtcatggccaaaccctgggacagcaggtgccaggcttcccaacagctccaacccgggtggtgattgcccggcccactcctccacaggctcggccttcccatcctggagggcccccagtctctgggacactgcagggcgccggtctgggtaccaatgcctcgttggcccagatggtgagcggccttgtggggcagcttcttatgcagccagtccttgtggctcaggggaccccaggtatggctccaccgccagcccctgccactgcttctgccagtgctggcaccaccaacacagctaccacagctggccccgctcctggggggcctgcccagcctccacccacccctcaaccctccatggctgatcttcagttctctcagcttctggggaacctgctagggcctgcagggccaggggctggagggcctggtgtggcttctcccaccatcactgtggcgatgcctggtgtccctgcctttctccaaggcatgactgacttcttgcaggcaacacagacagcccctccaccacccccacctcctccacccccaccacctgccccagagcagcagaccatgcccccaccaggctccccttctggtggcgcagggagtcctggaggcctgggtcttgagagcctgtcaccggagttttttacctcagtggtgcagggtgtgctcagctccctgctgggctccctgggggctcgggctggcagcagtgaaagtattgctgccttcatacaacgcctcagtggatccagcaacatctttgagcctggagctgatggggcccttggattctttggggccttgctttctcttctgtgccagaacttctctatggtggacgtagtgatgcttctccatgggcatttccagccactacaacggctccagccccagctgcgatccttcttccaccagcactacctgggtggtcaggagcccacacccagtaacatccggatggcaacccacacattgatcacggggctagaagagtatgtgcgggagagtttttccttggtgcaggttcagccaggtgtggacatcatccggacaaacctggaatttctccaagagcagtttaatagcattgctgcgcatgtgctgcattgcacagatagtggatttggggcccggttgctggagttgtgtaaccaaggcctgtttgaatgcctggccctaaacctgcactgcttggggggacagcagatggagcttgctgctgttatcaatggccgaattcgtcgtatgtctcgtggggtgaatccctccttggtgagctggctgaccactatgatgggactgaggcttcaggtggtactggagcacatgcctgtaggccctgatgccattctcagatacgttcgcagggttggtgatcccccccagccacttcctgaggagccaatggaagttcagggagcagaaagagcttcccctgagcctcagcgggagaatgcttccccagcccctggaacaacagcagaagaggccatgtcccgaggtccacctcctgctcctgaggggggctcccgggatgaacaggatggagcttcagctgagacagaaccttgggcagctgcagtccccccagaatgggtccctattatccagcaggacattcagagccagcggaaggtgaaaccgcagccccctctgagtgatgcctacctcagtggtatgcctgccaagagacgcaagacgatgcagggtgagggcccccagctgcttctctcagaggctgtgagccgggcagctaaggcagccggagctcggcccctgacgagccccgagagcctgagccgggacctggaggcaccagaggttcaggagagctacaggcagcagctccggtctgatatacaaaaacgactgcaggaagaccccaactacagtccccagcgcttccccaatgcccagcgggcctttgctgatgatccttagctctttgctctatggcccttcctcatcaggggaccgtttcccccctcttccttcacagtatttaagaaataaaagtcggatttttctggctgctttctctcta

SEQ ID NO: 3293 - DNA, 880 bp, Homo sapiens; identical to SEQ ID NO: 3267
  source 1..880: mol_type = unassigned DNA

SEQ ID NO: 3294 - DNA, 513 bp, Homo sapiens
  source 1..513: mol_type = unassigned DNA
gtcgtatgtctcgtggggtgaatccctccttggtgagctggctgaccactatgatgggactgaggcttcaggtggtactggagcacatgcctgtaggccctgatgccattctcagatacgttcgcagggttggtgatcccccccagccacttcctgaggagccaatggaagttcagggagcagaaagagcttcccctgagcctcaggaatgggtccctattatccagcaggacattcagagccagcggaaggtgaaaccgcagccccctctgagtgatgcctacctcagtggtatgcctgccaagagacgcaagctccggtctgatatacaaaaacgactgcaggaagaccccaactacagtccccagcgcttccccaatgcccagcgggcctttgctgatgatccttagctctttgctctatggcccttcctcatcaggggaccgtttcccccctcttccttcacagtatttaagaaataaaagtcggatttttctggctgctttctctcta

SEQ ID NO: 3295 - DNA, 554 bp, Homo sapiens
  source 1..554: mol_type = unassigned DNA
tctggcctgcacgcccccacgacacctgcatgtggtccggcctatgtctcactacaccacccccatggtgctccagcaggcagccattcccatacagatcaatgtgggaaccactgtgaccatgacaggaaatgggactcggccccccccaactcccaatgcagaggcacctccccctggtcctgggcaggcctcatccgtggctccgtcttctaccaatgtcgagtcctcagctgagggggctcccccgccaggtccagctcccccgccagccaccagccacccgagggtcatccggatttcccaccagagtgtggaacccgtggtcatgatgcacatgaacattcaaggacagcaggtgccaggcttcccaacagctccaacccgggtggtgattgcccggcccactcctccacaggctcggccttcccatcctggagggcccccagtctctgggacactgcagggcgccggtctgggtaccaatgcctcgttggcccagatggtgagcggccttgtggggcagcttcttatgcagccagtccttgtggctc

SEQ ID NO: 3296 - DNA, 783 bp, Homo sapiens
  source 1..783: mol_type = unassigned DNA
atagtggatttggggcccggttgctggagttgtgtaaccaaggcctgtttgaatgcctggccctaaacctgcactgcttggggggacagcagatggagcttgctgctgttatcaatggccgaattcgtcgtatgtctcgtggggtgaatccctccttggtgagctggctgaccactatgatgggactgaggcttcaggtggtactggagcacatgcctgtaggccctgatgccattctcagatacgttcgcagggttggtgatcccccccagccacttcctgaggagccaatggaagttcagggagcagaaagagcttcccctgagcctcagcgggagaatgcttccccagcccctggaacaacagcagaagaggccatgtcccgaggtccacctcctgctcctgaggggggctcccgggatgaacaggatggagcttcagctgagacagaaccttgggcagctgcagtccccccagaatgggtccctattatccagcaggacattcagagccagcggaaggtgaaaccgcagccccctctgagtgatgcctacctcagtggtatgcctgccaagagacgcaagctccggtctgatatacaaaaacgactgcaggaagaccccaactacagtccccagcgcttccccaatgcccagcgggcctttgctgatgatccttagctctttgctctatggcccttcctcatcaggggaccgtttcccccctcttccttcacagtatttaagaaataaaagtcggatttttctggctgctttctctcta

SEQ ID NO: 3297 - DNA, 807 bp, Homo sapiens
  source 1..807: mol_type = unassigned DNA
cagctccctaagccgtcgatctcctgccctttgtgtttctctccctgtgccccggaatcagaagggggatggggacaggtgtgaatgtgtgtgtgtgcaggagaaactttttaggtattggggcagggattaatgctagggagtctttcgggtacactctggtctgggcaacagcgggccctccttccttcgttcttctttagagacctgtcggccatggagcctaatgatagtaccagtaccgctgtggaggagcctgacagcttggaggtgttggtgaagaccttggactctcaaactcgtacctttattgtgggggcccagatgaatgtaaaagagtttaaggagcacattgctgcctctgtcagcatcccatctgaaaaacaacggctcatttaccagggacgagttctgcaagatgataagaagcttcaggaatacaatgttgggggaaaggttatccacctggtggaacgggctcctcctcagactcacctcccttctggggcatcttctgggacggggtctgcctcagccactcatggtgggggatccccccctggtactcgggggcctggggcctctgttcatgaccggaatgccaacagctatgtcatggttggaaccttcaatcttcctagtgacggctctgctgtggatgttcacatcaacatggaacaggccccgattcagagtgagccccgggtacggctggtgatggctcagcacatgatcagggatatacagaccttactatcccggatggagtgtcgaggagggccccaaccgcagcacagtcagccgccc

SEQ ID NO: 3298 - DNA, 747 bp, Homo sapiens
  source 1..747: mol_type = unassigned DNA
tgtttggctgtgggttagttgtgccgttctgctggaacaccgtgggaaggcagtagacgcgggcagtcagctagcaggtctgtcgccccagacctgtcggccatggagcctaatgatagtaccagtaccgctgtggaggagcctgacagcttggaggtgttggtgaagaccttggactctcaaactcgtacctttattgtgggggcccagatgaatgtaaaagagtttaaggagcacattgctgcctctgtcagcatcccatctgaaaaacaacggctcatttaccagggacgagttctgcaagatgataagaagcttcaggaatacaatgttgggggaaaggttatccacctggtggaacgggctcctcctcagactcacctcccttctggggcatcttctgggacggggtctgcctcagccactcatggtgggggatccccccctggtactcgggggcctggggcctctgttcatgaccggaatgccaacagctatgtcatggttggaaccttcaatcttcctagtgagccccgggtacggctggtgatggctcagcacatgatcagggatatacagaccttactatcccggatggagtgtcgaggagggccccaaccgcagcacagtcagccgcccccgcagccaccggctgtgaccccggagccagtagccttgagctctcaaacatcagaaccagttgaaagtgaagcacctccccgggagcccatggaggcagaagaagtg

SEQ ID NO: 3299 - DNA, 844 bp, Homo sapiens; identical to SEQ ID NO: 3291
  source 1..844: mol_type = unassigned DNA

SEQ ID NO: 3300 - DNA, 1056 bp, Homo sapiens; identical to SEQ ID NO: 3288
  source 1..1056: mol_type = unassigned DNA

SEQ ID NO: 3301 - DNA, 513 bp, Homo sapiens; identical to SEQ ID NO: 3294
  source 1..513: mol_type = unassigned DNA

SEQ ID NO: 3302 - DNA, 902 bp, Homo sapiens
  source 1..902: mol_type = unassigned DNA
tccctaagccgtcgatctcctgccctttgtgtttctctccctgtgccccggaatcagaagggggatggggacaggtgtgaatgtgtgtgtgtgcaggagaaactttttagagacctgtcggccatggagcctaatgatagtaccagtaccgctgtggaggagcctgacagcttggaggtgttggtgaagaccttggactctcaaactcgtacctttattgtgggggcccagatgaatgtaaaagagtttaaggagcacattgctgcctctgtcagcatcccatctgaaaaacaacggctcatttaccagggacgagttctgcaagatgataagaagcttcaggaatacaatgttgggggaaaggttatccacctggtggaacgggctcctcctcagactcacctcccttctggggcatcttctgggacggggtctgcctcagccactcatggtgggggatccccccctggtactcgggggcctggggcctctgttcatgaccggaatgccaacagctatgtcatggttggaaccttcaatcttcctagtgacggctctgctgtggatgttcacatcaacatggaacaggccccgattcagagtgagccccgggtacggctggtgatggctcagcacatgatcagggatatacagaccttactatcccggatggagtgtcgaggagggccccaaccgcagcacagtcagccgcccccgcagccaccggctgtgaccccggagccagtagccttgagctctcaaacatcagaaccagttgaaagtgaagcacctccccgggagcccatggaggcagaagaagtggaggagcgtgccccagcccagaacccggagctcactcctggcccagccccagcgggcccaacacctgccccggaaacaaa

SEQ ID NO: 3303 - DNA, 2407 bp, Homo sapiens; identical to SEQ ID NO: 3281
  source 1..2407: mol_type = unassigned DNA

SEQ ID NO: 3304 - DNA, 3751 bp, Homo sapiens
  source 1..3751: mol_type = unassigned DNA
ggcgacagcggtggcggctcctcggggtgctcggctccctcccacctaggccggccccggcccgactcgccctcagaaactcactgtttggggctgcggactttctcgtcgtgccccacaaaagtaaagcttggggacctggggggagccggaagtatcgcttcgagatccccaaatactatcggggaaacggaagtggccgtcggtggcaggtttgggggagaccggaagtgacgagacctgtcggccatggagcctaatgatagtaccagtaccgctgtggaggagcctgacagcttggaggtgttggtgaagaccttggactctcaaactcgtacctttattgtgggggcccagatgaatgtaaaagagtttaaggagcacattgctgcctctgtcagcatcccatctgaaaaacaacggctcatttaccagggacgagttctgcaagatgataagaagcttcaggaatacaatgttgggggaaaggttatccacctggtggaacgggctcctcctcagactcacctcccttctggggcatcttctgggacggggtctgcctcagccactcatggtgggggatccccccctggtactcgggggcctggggcctctgttcatgaccggaatgccaacagctatgtcatggttggaaccttcaatcttcctagtgacggctctgctgtggatgttcacatcaacatggaacaggccccgattcagagtgagccccgggtacggctggtgatggctcagcacatgatcagggatatacagaccttactatcccggatggagactctcccctaccttcagtgtcgaggagggccccaaccgcagcacagtcagccgcccccgcagccaccggctgtgaccccggagccagtagccttgagctctcaaacatcagaaccagttgaaagtgaagcacctccccgggagcccatggaggcagaagaagtggaggagcgtgccccagcccagaacccggagctcactcctggcccagccccagcgggcccaacacctgccccggaaacaaatgcacccaaccatccttcccctgcggagtatgtcgaggtgctccaggagctacagcggctggagagtcgcctccagcccttcttgcagcgctactacgaggttctgggtgctgctgccaccacggactacaataacaatcacgagggccgggaggaggatcagcggttgatcaacttggtaggggagagcctgcgactgctgggcaacacctttgttgcactgtctgacctgcgctgcaatctggcctgcacgcccccacgacacctgcatgtggtccggcctatgtctcactacaccacccccatggtgctccagcaggcagccattcccatacagatcaatgtgggaaccactgtgaccatgacaggaaatgggactcggccccccccaactcccaatgcagaggcacctccccctggtcctgggcaggcctcatccgtggctccgtcttctaccaatgtcgagtcctcagctgagggggctcccccgccaggtccagctcccccgccagccaccagccacccgagggtcatccggatttcccaccagagtgtggaacccgtggtcatgatgcacatgaacattcaagattctggcacacagcctggtggtgttccgagtgctcccactggccccctgggaccccctggtcatggccaaaccctgggacagcaggtgccaggcttcccaacagctccaacccgggtggtgattgcccggcccactcctccacaggctcggccttcccatcctggagggcccccagtctctgggacactgcagggcgccggtctgggtaccaatgcctcgttggcccagatggtgagcggccttgtggggcagcttcttatgcagccagtccttgtggctcaggggaccccaggtatggctccaccgccagcccctgccactgcttctgccagtgctggcaccaccaacacagctaccacagctggccccgctcctggggggcctgcccagcctccacccacccctcaaccctccatggctgatcttcagttctctcagcttctggggaacctgctagggcctgcagggccaggggctggagggcctggtgtggcttctcccaccatcactgtggcgatgcctggtgtccctgcctttctccaaggcatgactgacttcttgcaggcaacacagacagcccctccaccacccccacctcctccacccccaccacctgccccagagcagcagaccatgcccccaccaggctccccttctggtggcgcagggagtcctggaggcctgggtcttgagagcctgtcaccggagttttttacctcagtggtgcagggtgtgctcagctccctgctgggctccctgggggctcgggctggcagcagtgaaagtattgctgccttcatacaacgcctcagtggatccagcaacatctttgagcctggagctgatggggcccttggattctttggggccttgctttctcttctgtgccagaacttctctatggtggacgtagtgatgcttctccatgggcatttccagccactacaacggctccagccccagctgcgatccttcttccaccagcactacctgggtggtcaggagcccacacccagtaacatccggatggcaacccacacattgatcacggggctagaagagtatgtgcgggagagtttttccttggtgcaggttcagccaggtgtggacatcatccggacaaacctggaatttctccaagagcagtttaatagcattgctgcgcatgtgctgcattgcacagatagtggatttggggcccggttgctggagttgtgtaaccaaggcctgtttgaatgcctggccctaaacctgcactgcttggggggacagcagatggagcttgctgctgttatcaatggccgaattcgtcgtatgtctcgtggggtgaatccctccttggtgagctggctgaccactatgatgggactgaggcttcaggtggtactggagcacatgcctgtaggccctgatgccattctcagatacgttcgcagggttggtgatcccccccagccacttcctgaggagccaatggaagttcagggagcagaaagagcttcccctgagcctcagcgggagaatgcttccccagcccctggaacaacagcagaagaggccatgtcccgaggtccacctcctgctcctgaggggggctcccgggatgaacaggatggagcttcagctgagacagaaccttgggcagctgcagtccccccagaatgggtccctattatccagcaggacattcagagccagcggaaggtgaaaccgcagccccctctgagtgatgcctacctcagtggtatgcctgccaagagacgcaagacgatgcagggtgagggcccccagctgcttctctcagaggctgtgagccgggcagctaaggcagccggagctcggcccctgacgagccccgagagcctgagccgggacctggaggcaccagaggttcaggagagctacaggcagcagctccggtctgatatacaaaaacgactgcaggaagaccccaactacagtccccagcgcttccccaatgcccagcgggcctttgctgatgatccttagctctttgctctatggcccttcctcatcaggggaccgtttcccccctcttccttcacagtatttaagaaataaaagtcggatttttctggctgctttctctcta

SEQ ID NO: 3305 - DNA, 807 bp, Homo sapiens; identical to SEQ ID NO: 3297
  source 1..807: mol_type = unassigned DNA

SEQ ID NO: 3306 - DNA, 859 bp, Homo sapiens
  source 1..859: mol_type = unassigned DNA
gtgtgtgtgtgtgtgtgtgtgtgtgtgtgtgtgtgtgtttggctgtgggttagttgtgccgttctgctggaacaccgtgggaaggcagtagacgcgggcagtcagctagcagagacctgtcggccatggagcctaatgatagtaccagtaccgctgtggaggagcctgacagcttggaggtgttggtgaagaccttggactctcaaactcgtacctttattgtgggggcccagatgaatgtaaaagagtttaaggagcacattgctgcctctgtcagcatcccatctgaaaaacaacggctcatttaccagggacgagttctgcaagatgataagaagcttcaggaatacaatgttgggggaaaggttatccacctggtggaacgggctcctcctcagactcacctcccttctggggcatcttctgggacggggtctgcctcagccactcatggtgggggatccccccctggtactcgggggcctggggcctctgttcatgaccggaatgccaacagctatgtcatggttggaaccttcaatcttcctagtgagccccgggtacggctggtgatggctcagcacatgatcagggatatacagaccttactatcccggatggagtgtcgaggagggccccaaccgcagcacagtcagccgcccccgcagccaccggctgtgaccccggagccagtagccttgagctctcaaacatcagaaccagttgaaagtgaagcacctccccgggagcccatggaggcagaagaagtggaggagcgtgccccagcccagaacccggagctcactcctggcccagccccagcgggcccaacacctgccccggaaacaaatgcacccaa

SEQ ID NO: 3307 - DNA, 807 bp, Homo sapiens; identical to SEQ ID NO: 3274
  source 1..807: mol_type = unassigned DNA

SEQ ID NO: 3308 - DNA, 1714 bp, Homo sapiens
  source 1..1714: mol_type = unassigned DNA
tcgggggcggagccgcggggtggtgggtgggtgggtgtgtgtgtgtgtgtgtgtgtgtgtgtgtgtgtgtttggctgtgggttagttgtgccgttctgctggaacaccgtgggaaggcagtagacgcgggcagtcagctagcaggtccgtcgccccagacctgtcggccatggagcctaatgatagtaccagtaccgctgtggaggagcctgacagcttggaggtgttggtgaagaccttggactctcaaactcgtacctttattgtgggggcccagatgaatgtaaaagagtttaaggagcacattgctgcctctgtcagcatcccatctgaaaaacaacggctcatttaccagggacgagttctgcaagatgataagaagcttcaggaatacaatgttgggggaaaggttatccacctggtggaacgggctcctcctcagactcacctcccttctggggcatcttctgggacggggtctgcctcagccactcatggtgggggatccccccctggtactcgggggcctggggcctctgttcatgaccggaatgccaacagctatgtcatggttggaaccttcaatcttcctagtgacggctctgctgtggatgttcacatcaacatggaacaggccccgattcagagtgagccccgggtacggctggtgatggctcagcacatgatcagggatatacagaccttactatcccggatggagtgtcgaggagggccccaaccgcagcacagtcagccgcccccgcagccaccggctgtgaccccggagccagtagccttgagctctcaaacatcagaaccagttgaaagtgaagcacctccccgggagcccatggaggcagaagaagtggaggagcgtgccccagcccagaacccggagctcactcctggcccagccccagcgggcccaacacctgccccggaaacaaatgcacccaaccatccttcccctgcggagtatgtcgaggtgctccaggagctacagcggctggagagtcgcctccagcccttcttgcagcgctactacgaggttctgggtgctgctgccaccacggactacaataacaatcacgagggccgggaggaggatcagcggttgatcaacttggtaggggagagcctgcgactgctgggcaacacctttgttgcactgtctgacctgcgctgcaatctggcctgcacgcccccacgacacctgcatgtggtccggcctatgtctcactacaccacccccatggtgctccagcaggcagccattcccatacagatcaatgtgggaaccactgtgaccatgacaggaaatgggactcggccccccccaactcccaatgcagaggcacctccccctggtcctgggcaggcctcatccgtggctccgtcttctaccaatgtcgagtcctcagctgagggggctcccccgccaggtccagctcccccgccagccaccagccacccgagggtcatccggatttcccaccagagtgtggaacccgtggtcatgatgcacatgaacattcaagattctggcacacagcctggtggtgttccgagtgctcccactggccccctgggaccccctggtcatggccaaaccctgggctccaccctcatccagctgccctccctgccccctgagttcatgcacgccgtcgcccaccagatcactcatcaggccatggtggcagctgttgcctcc

SEQ ID NO: 3309 - DNA, 993 bp, Homo sapiens; identical to SEQ ID NO: 3278
  source 1..993: mol_type = unassigned DNA

SEQ ID NO: 3310 - DNA, 1051 bp, Homo sapiens; identical to SEQ ID NO: 3263
  source 1..1051: mol_type = unassigned DNA

SEQ ID NO: 3311 - DNA, 880 bp, Homo sapiens; identical to SEQ ID NO: 3267
  source 1..880: mol_type = unassigned DNA

SEQ ID NO: 3312 - DNA, 714 bp, Homo sapiens; identical to SEQ ID NO: 3279
  source 1..714: mol_type = unassigned DNA

SEQ ID NO: 3313 - DNA, 766 bp, Homo sapiens; identical to SEQ ID NO: 3273
  source 1..766: mol_type = unassigned DNA

SEQ ID NO: 3314 - DNA, 654 bp, Homo sapiens; identical to SEQ ID NO: 3275
  source 1..654: mol_type = unassigned DNA

SEQ ID NO: 3315 - DNA, 859 bp, Homo sapiens; identical to SEQ ID NO: 3306
  source 1..859: mol_type = unassigned DNA

SEQ ID NO: 3316 - DNA, 902 bp, Homo sapiens; identical to SEQ ID NO: 3302
  source 1..902: mol_type = unassigned DNA

SEQ ID NO: 3317 - DNA, 554 bp, Homo sapiens; identical to SEQ ID NO: 3295
  source 1..554: mol_type = unassigned DNA

SEQ ID NO: 3318 - DNA, 654 bp, Homo sapiens; identical to SEQ ID NO: 3275
  source 1..654: mol_type = unassigned DNA

SEQ ID NO: 3319 - DNA, 766 bp, Homo sapiens; identical to SEQ ID NO: 3273
  source 1..766: mol_type = unassigned DNA

SEQ ID NO: 3320 - DNA, 1689 bp, Homo sapiens
  source 1..1689: mol_type = unassigned DNA
ggtgggtgtgtgtgtgtgtgtgtgtgtgtgtgtgtgtgtgtgtgtttggctgtgggttagttgtgccgttctgctggaacaccgtgggaaggcagtagacgcgggcagtcagctagcaggtccgtcgccccagacctgtcggccatggagcctaatgatagtaccagtaccgctgtggaggagcctgacagcttggaggtgttggtgaagaccttggactctcaaactcgtacctttattgtgggggcccagatgaatgtaaaagagtttaaggagcacattgctgcctctgtcagcatcccatctgaaaaacaacggctcatttaccagggacgagttctgcaagatgataagaagcttcaggaatacaatgttgggggaaaggttatccacctggtggaacgggctcctcctcagactcacctcccttctggggcatcttctgggacggggtctgcctcagccactcatggtgggggatccccccctggtactcgggggcctggggcctctgttcatgaccggaatgccaacagctatgtcatggttggaaccttcaatcttcctagtgacggctctgctgtggatgttcacatcaacatggaacaggccccgattcagagtgagccccgggtacggctggtgatggctcagcacatgatcagggatatacagaccttactatcccggatggagtgtcgaggagggccccaaccgcagcacagtcagccgcccccgcagccaccggctgtgaccccggagccagtagccttgagctctcaaacatcagaaccagttgaaagtgaagcacctccccgggagcccatggaggcagaagaagtggaggagcgtgccccagcccagaacccggagctcactcctggcccagccccagcgggcccaacacctgccccggaaacaaatgcacccaaccatccttcccctgcggagtatgtcgaggtgctccaggagctacagcggctggagagtcgcctccagcccttcttgcagcgctactacgaggttctgggtgctgctgccaccacggactacaataacaatcacgagggccgggaggaggatcagcggttgatcaacttggtaggggagagcctgcgactgctgggcaacacctttgttgcactgtctgacctgcgctgcaatctggcctgcacgcccccacgacacctgcatgtggtccggcctatgtctcactacaccacccccatggtgctccagcaggcagccattcccatacagatcaatgtgggaaccactgtgaccatgacaggaaatgggactcggccccccccaactcccaatgcagaggcacctccccctggtcctgggcaggcctcatccgtggctccgtcttctaccaatgtcgagtcctcagctgagggggctcccccgccaggtccagctcccccgccagccaccagccacccgagggtcatccggatttcccaccagagtgtggaacccgtggtcatgatgcacatgaacattcaagattctggcacacagcctggtggtgttccgagtgctcccactggccccctgggaccccctggtcatggccaaaccctgggctccaccctcatccagctgccctccctgccccctgagttcatgcacgccgtcgcccaccagatcactcatcaggccatggtggcagctgttgcctcc

SEQ ID NO: 3321 - DNA, 714 bp, Homo sapiens; identical to SEQ ID NO: 3264
  source 1..714: mol_type = unassigned DNA

SEQ ID NO: 3322 - DNA, 747 bp, Homo sapiens; identical to SEQ ID NO: 3298
  source 1..747: mol_type = unassigned DNA

SEQ ID NO: 3323 - DNA, 544 bp, Homo sapiens; identical to SEQ ID NO: 3282
  source 1..544: mol_type = unassigned DNA

SEQ ID NO: 3324 - DNA, 844 bp, Homo sapiens; identical to SEQ ID NO: 3291
  source 1..844: mol_type = unassigned DNA

SEQ ID NO: 3325 - DNA, 902 bp, Homo sapiens; identical to SEQ ID NO: 3302
  source 1..902: mol_type = unassigned DNA

SEQ ID NO: 3326 - DNA, 410 bp, Homo sapiens; identical to SEQ ID NO: 3271
  source 1..410: mol_type = unassigned DNA

SEQ ID NO: 3327 - DNA, 766 bp, Homo sapiens; identical to SEQ ID NO: 3273
  source 1..766: mol_type = unassigned DNA

SEQ ID NO: 3328 - DNA, 3779 bp, Homo sapiens; identical to SEQ ID NO: 3262
  source 1..3779: mol_type = unassigned DNA

SEQ ID NO: 3329 - DNA, 513 bp, Homo sapiens; identical to SEQ ID NO: 3294
  source 1..513: mol_type = unassigned DNA

SEQ ID NO: 3330 - DNA, 747 bp, Homo sapiens; identical to SEQ ID NO: 3266
  source 1..747: mol_type = unassigned DNA

SEQ ID NO: 3331 - DNA, 807 bp, Homo sapiens
  source 1..807: mol_type = unassigned DNA
cagctccctaagccgtcgatctcctgccctttgtgtttctctccctgtgccccggaatcagaagggggatggggacaggtgtgaatgtgtgtgtgtgcaggagatactttttaggtattggggcagggattaatgctagggagtctttcgggtacactctggtctgggcaacagcgggccttccttccttcgttcttctttagagacctgtcggccatggagcctaatgatagtaccagtaccgctgtggaggagcctgacagcttggaggtgttggtgaagaccttggactctcaaactcgtacctttattgtgggggcccagatgaatgtaaaagagtttaaggagcacattgctgcctctgtcagcatcccatctgaaaaacaacggctcatttaccagggacgagttctgcaagatgataagaagcttcaggaatacaatgttgggggaaaggttatccacctggtggaacgggctcctcctcagactcacctcccttctggggcatcttctgggacggggtctgcctcagccactcatggtgggggatccccccctggtactcgggggcctggggcctctgttcatgaccggaatgccaacagctatgtcatggttggaaccttcaatcttcctagtgacggctctgctgtggatgttcacatcaacatggaacaggccccgattcagagtgagccccgggtacggctggtgatggctcagcacatgatcagggatatacagaccttactatcccggatggagtgtcgaggagggccccaaccgcagcacagtcagccgccc

SEQ ID NO: 3332 - DNA, 1710 bp, Homo sapiens
  source 1..1710: mol_type = unassigned DNA
tcgggggcggagccgcggggtggtgggtgtgtgtgtgtgtgtgtgtgtgtgtgtgtgtgtgtgtgtttggctgtgggttagttgtgccgttctgctggaacaccgtgggaaggcagtagacgcgggcagtcagctagcaggtctgtcgccccagacctgtcggccatggagcctaatgatagtaccagtaccgctgtggaggagcctgacagcttggaggtgttggtgaagaccttggactctcaaactcgtacctttattgtgggggcccagatgaatgtaaaagagtttaaggagcacattgctgcctctgtcagcatcccatctgaaaaacaacggctcatttaccagggacgagttctgcaagatgataagaagcttcaggaatacaatgttgggggaaaggttatccacctggtggaacgggctcctcctcagactcacctcccttctggggcatcttctgggacggggtctgcctcagccactcatggtgggggatccccccctggtactcgggggcctggggcctctgttcatgaccggaatgccaacagctatgtcatggttggaaccttcaatcttcctagtgacggctctgctgtggatgttcacatcaacatggaacaggccccgattcagagtgagccccgggtacggctggtgatggctcagcacatgatcagggatatacagaccttactatcccggatggagtgtcgaggagggccccaaccgcagcacagtcagccgcccccgcagccaccggctgtgaccccggagccagtagccttgagctctcaaacatcagaaccagttgaaagtgaagcacctccccgggagcccatggaggcagaagaagtggaggagcgtgccccagcccagaacccggagctcactcctggcccagccccagcgggcccaacacctgccccggaaacaaatgcacccaaccatccttcccctgcggagtatgtcgaggtgctccaggagctacagcggctggagagtcgcctccagcccttcttgcagcgctactacgaggttctgggtgctgctgccaccacggactacaataacaatcacgagggccgggaggaggatcagcggttgatcaacttggtaggggagagcctgcgactgctgggcaacacctttgttgcactgtctgacctgcgctgcaatctggcctgcacgcccccacgacacctgcatgtggtccggcctatgtctcactacaccacccccatggtgctccagcaggcagccattcccatacagatcaatgtgggaaccactgtgaccatgacaggaaatgggactcggccccccccaactcccaatgcagaggcacctccccctggtcctgggcaggcctcatccgtggctccgtcttctaccaatgtcgagtcctcagctgagggggctcccccgccaggtccagctcccccgccagccaccagccacccgagggtcatccggatttcccaccagagtgtggaacccgtggtcatgatgcacatgaacattcaagattctggcacacagcctggtggtgttccgagtgctcccactggccccctgggaccccctggtcatggccaaaccctgggctccaccctcatccagctgccctccctgccccctgagttcatgcacgccgtcgcccaccagatcactcatcaggccatggtggcagctgttgcctcc

SEQ ID NO: 3333 - DNA, 736 bp, Homo sapiens
  source 1..736: mol_type = unassigned DNA
cccccacgacacctgcatgtggtccggcctatgtctcactacaccacccccatggtgctccagcaggcagccattcccatacagatcaatgtgggaaccactgtgaccatgacaggtccagctcccccgccagccaccagccacccgagggtcatccggatttcccaccagagtgtggaacccgtggtcatgatgcacatgaacattcaagattctggcacacagcctggtggtgttccgagtgctcccactggccccctgggaccccctggtcatggccaaaccctgggacagcaggtgccaggcttcccaacagctccaacccgggtggtgattgcccggcccactcctccacaggctcggccttcccatcctggagggcccccagtctctgggacactgcagggcgccggtctgggtaccaatgcctcgttggcccagatggtgagcggccttgtggggcagcttcttatgcagccagtccttgtggctcaggggaccccaggtatggctccaccgccagcccctgccactgcttctgccagtgctggcaccaccaacacagctaccacagctggccccgctcctggggggcctgcccagcctccacccacccctcaaccctccatggctgatcttcagttctctcagcttctggggaacctgctagggcctgcagggccaggggctggagggcctggtgtggcttctcccaccatcactgtggcgatgcctg

SEQ ID NO: 3334 - DNA, 736 bp, Homo sapiens; identical to SEQ ID NO: 3261
  source 1..736: mol_type = unassigned DNA

SEQ ID NO: 3335 - DNA, 1056 bp, Homo sapiens; identical to SEQ ID NO: 3288
  source 1..1056: mol_type = unassigned DNA

SEQ ID NO: 3336 - DNA, 1051 bp, Homo sapiens; identical to SEQ ID NO: 3263
  source 1..1051: mol_type = unassigned DNA

SEQ ID NO: 3337 - DNA, 2407 bp, Homo sapiens; identical to SEQ ID NO: 3281
  source 1..2407: mol_type = unassigned DNA

SEQ ID NO: 3338 - DNA, 1056 bp, Homo sapiens; identical to SEQ ID NO: 3288
  source 1..1056: mol_type = unassigned DNA

SEQ ID NO: 3339 - DNA, 554 bp, Homo sapiens; identical to SEQ ID NO: 3295
  source 1..554: mol_type = unassigned DNA

SEQ ID NO: 3340 - DNA, 747 bp, Homo sapiens; identical to SEQ ID NO: 3298
  source 1..747: mol_type = unassigned DNA

SEQ ID NO: 3341 - DNA, 902 bp, Homo sapiens; identical to SEQ ID NO: 3302
  source 1..902: mol_type = unassigned DNA

SEQ ID NO: 3342 - DNA, 544 bp, Homo sapiens; identical to SEQ ID NO: 3282
  source 1..544: mol_type = unassigned DNA

SEQ ID NO: 3343 - DNA, 654 bp, Homo sapiens; identical to SEQ ID NO: 3275
  source 1..654: mol_type = unassigned DNA

SEQ ID NO: 3344 - DNA, 2407 bp, Homo sapiens; identical to SEQ ID NO: 3281
  source 1..2407: mol_type = unassigned DNA

SEQ ID NO: 3345 - DNA, 787 bp, Homo sapiens
  source 1..787: mol_type = unassigned DNA
atagtggatttggggcccggttgctggagttgtgtaaccaaggcctgtttgaatgcctggccctaaacctgcactgcttggggggacagcagatggagcttgctgctgttatcaatggccgaattcgtcgtatgtctcgtggggtgaatccctccttggtgagctggctgaccactatgatgggactgaggcttcaggtggtactggagcacatgcctgtaggccctgatgccattctcagatacgttcgcagggttggtgatcccccccagccacttcctgaggagccaatggaagttcagggagcagaaagagcttcccctgagcctcagcgggagaatgcttccccagcccctggaacaacagcagaagaggccatgtcccgaggtccacctcctgctcctgaggggggctcccgggatgaacaggatggagcttcagctgagacagaaccttgggcagctgcagtccccccagaatgggtccctattatccagcaggacattcagagccagcggaaggtgaaaccgcagccccctctgagtgatgcctacctcagtggtatgcctgccaagagacgcaagctccggtctgatatacaaaaacgactgcaggaagaccccaactacagtccccagcgcttccccaatgcccagcgggcctttgctgatgatccttagctctttctttgctctatggcccttcctcatcaggggaccgtttcccccctcttccttcacagtatttaagaaataaaagtcggatttttctggctgctttctctcta

SEQ ID NO: 3346 - DNA, 807 bp, Homo sapiens; identical to SEQ ID NO: 3297
  source 1..807: mol_type = unassigned DNA

SEQ ID NO: 3347 - DNA, 714 bp, Homo sapiens; identical to SEQ ID NO: 3279
  source 1..714: mol_type = unassigned DNA

SEQ ID NO: 3348 - DNA, 859 bp, Homo sapiens; identical to SEQ ID NO: 3306
  source 1..859: mol_type = unassigned DNA

SEQ ID NO: 3349 - DNA, 1051 bp, Homo sapiens; identical to SEQ ID NO: 3263
  source 1..1051: mol_type = unassigned DNA

SEQ ID NO: 3350 - DNA, 2407 bp, Homo sapiens; identical to SEQ ID NO: 3268
  source 1..2407: mol_type = unassigned DNA

SEQ ID NO: 3351 - DNA, 993 bp, Homo sapiens; identical to SEQ ID NO: 3278
  source 1..993: mol_type = unassigned DNA

SEQ ID NO: 3352 - DNA, 880 bp, Homo sapiens; identical to SEQ ID NO: 3267
  source 1..880: mol_type = unassigned DNA

SEQ ID NO: 3353 - DNA, 3055 bp, Homo sapiens
  source 1..3055: mol_type = unassigned DNA
gtagtacggtcccccgggcgacagcggtggcggctcctcggggtgctcggctccctcccacctaggccggccccggcccgactcgccctcagaaactcactgtttggggctgcggactttctcgtcgtgccccacaaaagtaaagcttggggacctggggggagccggaagtatcgcttcgagatccccaaatactatcggggaaacggaagtggccgtcggtggcagagacctgtcggccatggagcctaatgatagtaccagtaccgctgtggaggagcctgacagcttggaggtgttggtgaagaccttggactctcaaactcgtacctttattgtgggggcccagatgaatgtaaaagagtttaaggagcacattgctgcctctgtcagcatcccatctgaaaaacaacggctcatttaccagggacgagttctgcaagatgataagaagcttcaggaatacaatgttgggggaaaggttatccacctggtggaacgggctcctcctcagactcacctcccttctggggcatcttctgggacggggtctgcctcagccactcatggtgggggatccccccctggtactcgggggcctggggcctctgttcatgaccggaatgccaacagctatgtcatggttggaaccttcaatcttcctagtgacggctctgctgtggatgttcacatcaacatggaacaggccccgattcagagtgagccccgggtacggctggtgatggctcagcacatgatcagggatatacagaccttactatcccggatggagtgtcgaggagggccccaaccgcagcacagtcagccgcccccgcagccaccggctgtgaccccggagccagtagccttgagctctcaaacatcagaaccagttgaaagtgaagcacctccccgggagcccatggaggcagaagaagtggaggagcgtgccccagcccagaacccggagctcactcctggcccagccccagcgggcccaacacctgccccggaaacaaatgcacccaaccatccttcccctgcggagtatgtcgaggtgctccaggagctacagcggctggagagtcgcctccagcccttcttgcagcgctactacgaggttctgggtgctgctgccaccacggactacaataacaatcacgagggccgggaggaggatcagcggttgatcaacttggtaggggagagcctgcgactgctgggcaacacctttgttgcactgtctgacctgcgctgcaatctggcctgcacgcccccacgacacctgcatgtggtccggcctatgtctcactacaccacccccatggtgctccagcaggcagccattcccatacagatcaatgtgggaaccactgtgaccatgacaggaaatgggactcggccccccccaactcccaatgcagaggcacctccccctggtcctgggcaggcctcatccgtggctccgtcttctaccaatgtcgagtcctcagctgagggggctcccccgccaggtccagctcccccgccagccaccagccacccgagggtcatccggatttcccaccagagtgtggaacccgtggtcatgatgcacatgaacattcaagattctggcacacagcctggtggtgttccgagtgctcccactggccccctgggaccccctggtcatggccaaaccctgggacagcaggtgccaggcttcccaacagctccaacccgggtggtgattgcccggcccactcctccacaggctcggccttcccatcctggagggcccccagtctctgggacactgggcgccggtctgggtaccaatgcctcgttggcccagatggtgagcggccttgtggggcagcttcttatgcagccagtccttgtggctcaggggaccccagggagtcctggaggcctgggtcttgagagcctgtcaccggagttttttacctcagtggtgcagggtgtgctcagctccctgctgggctccctgggggctcgggctggcagcagtgaaagtattgctgccttcatacaacgcctcagtggatccagcaacatctttgagcctggagctgatggggcccttggattctttggggccttgctttctcttctgtgccagaacttctctatggtggacgtagtgatgcttctccatgggcatttccagccactacaacggctccagccccagctgcgatccttcttccaccagcactacctgggtggtcaggagcccacacccagtaacatccggatggcaacccacacattgatcacggggctagaagagtatgtgcgggagagtttttccttggtgcaggttcagccaggtgtggacatcatccggacaaacctggaatttctccaagagcagtttaatagcattgctgcgcatgtgctgcattgcacagatagtggatttggggcccggttgctggagttgtgtaaccaaggcctgtttgaatgcctggccctaaacctgcactgcttggggggacagcagatggagcttgctgctgttatcaatggccgaattcgtcgtatgtctcgtggggtgaatccctccttggtgagctggctgaccactatgatgggactgaggcttcaggtggtactggagcacatgcctgtaggccctgatgccattctcagatacgttcgcagggttggtgatcccccccagccacttcctgaggagccaatggaagttcagggagcagaaagagcttcccctgagcctcaggaatgggtccctattatccagcaggacattcagagccagcggaaggtgaaaccgcagccccctctgagtgatgcctacctcagtggtatgcctgccaagagacgcaagctccggtctgatatacaaaaacgactgcaggaagaccccaactacagtccccagcgcttccccaatgcccagcgggcctttgctgatgatccttagctctttgctctatggcccttcctcatcaggggaccgtttcccccctcttccttcacagtatttaagaaataaaagtcggatttttctggctgctttctctct

SEQ ID NO: 3354 - DNA, 554 bp, Homo sapiens; identical to SEQ ID NO: 3295
  source 1..554: mol_type = unassigned DNA

SEQ ID NO: 3355 - DNA, 1051 bp, Homo sapiens; identical to SEQ ID NO: 3263
  source 1..1051: mol_type = unassigned DNA

SEQ ID NO: 3356 - DNA, 654 bp, Homo sapiens; identical to SEQ ID NO: 3275
  source 1..654: mol_type = unassigned DNA

SEQ ID NO: 3357 - DNA, 783 bp, Homo sapiens; identical to SEQ ID NO: 3296
  source 1..783: mol_type = unassigned DNA

SEQ ID NO: 3358 - DNA, 902 bp, Homo sapiens; identical to SEQ ID NO: 3302
  source 1..902: mol_type = unassigned DNA

SEQ ID NO: 3359 - DNA, 1056 bp, Homo sapiens; identical to SEQ ID NO: 3288
  source 1..1056: mol_type = unassigned DNA

SEQ ID NO: 3360 - DNA, 544 bp, Homo sapiens; identical to SEQ ID NO: 3282
  source 1..544: mol_type = unassigned DNA

SEQ ID NO: 3361 - DNA, 766 bp, Homo sapiens; identical to SEQ ID NO: 3273
  source 1..766: mol_type = unassigned DNA

SEQ ID NO: 3362 - DNA, 3648 bp, Homo sapiens
  source 1..3648: mol_type = unassigned DNA
ggggaagtcgggggcggagccgcggggtggtgggtgggtgtgtgtgtgtgtgtgtgtgtgtgtgtgtgtgtgtttggctgtgggttagttgtgccgttctgctggaacaccgtgggaaggcagtagacgcgggcagtcagctagcagagacctgtcggccatggagcctaatgatagtaccagtaccgctgtggaggagcctgacagcttggaggtgttggtgaagaccttggactctcaaactcgtacctttattgtgggggcccagatgaatgtaaaagagtttaaggagcacattgctgcctctgtcagcatcccatctgaaaaacaacggctcatttaccagggacgagttctgcaagatgataagaagcttcaggaatacaatgttgggggaaaggttatccacctggtggaacgggctcctcctcagactcacctcccttctggggcatcttctgggacggggtctgcctcagccactcatggtgggggatccccccctggtactcgggggcctggggcctctgttcatgaccggaatgccaacagctatgtcatggttggaaccttcaatcttcctagtgacggctctgctgtggatgttcacatcaacatggaacaggccccgattcagagtgagccccgggtacggctggtgatggctcagcacatgatcagggatatacagaccttactatcccggatggagtgtcgaggagggccccaaccgcagcacagtcagccgcccccgcagccaccggctgtgaccccggagccagtagccttgagctctcaaacatcagaaccagttgaaagtgaagcacctccccgggagcccatggaggcagaagaagtggaggagcgtgccccagcccagaacccggagctcactcctggcccagccccagcgggcccaacacctgccccggaaacaaatgcacccaaccatccttcccctgcggagtatgtcgaggtgctccaggagctacagcggctggagagtcgcctccagcccttcttgcagcgctactacgaggttctgggtgctgctgccaccacggactacaataacaatcacgagggccgggaggaggatcagcggttgatcaacttggtaggggagagcctgcgactgctgggcaacacctttgttgcactgtctgacctgcgctgcaatctggcctgcacgcccccacgacacctgcatgtggtccggcctatgtctcactacaccacccccatggtgctccagcaggcagccattcccatacagatcaatgtgggaaccactgtgaccatgacaggaaatgggactcggccccccccaactcccaatgcagaggcacctccccctggtcctgggcaggcctcatccgtggctccgtcttctaccaatgtcgagtcctcagctgagggggctcccccgccaggtccagctcccccgccagccaccagccacccgagggtcatccggatttcccaccagagtgtggaacccgtggtcatgatgcacatgaacattcaagattctggcacacagcctggtggtgttccgagtgctcccactggccccctgggaccccctggtcatggccaaaccctgggacagcaggtgccaggcttcccaacagctccaacccgggtggtgattgcccggcccactcctccacaggctcggccttcccatcctggagggcccccagtctctgggacactgcagggcgccggtctgggtaccaatgcctcgttggcccagatggtgagcggccttgtggggcagcttcttatgcagccagtccttgtggctcaggggaccccaggtatggctccaccgccagcccctgccactgcttctgccagtgctggcaccaccaacacagctaccacagctggccccgctcctggggggcctgcccagcctccacccacccctcaaccctccatggctgatcttcagttctctcagcttctggggaacctgctagggcctgcagggccaggggctggagggtctggtgtggcttctcccaccatcactgtggcgatgcctggtgtccctgcctttctccaaggcatgactgacttcttgcaggcaacacagacagcccctccaccacccccacctcctccacccccaccacctgccccagagcagcagaccatgcccccaccaggctccccttctggtggcgcagggagtcctggaggcctgggtcttgagagcctgtcaccggagttttttacctcagtggtgcagggtgtgctcagctccctgctgggctccctgggggctcgggctggcagcagtgaaagtattgctgccttcatacaacgcctcagtggatccagcaacatctttgagcctggagctgatggggcccttggattctttggggccttgctttctcttctgtgccagaacttctctatggtggacgtagtgatgcttctccatgggcatttccagccactacaacggctccagccccagctgcgatccttcttccaccagcactacctgggtggtcaggagcccacacccagtaacatccggatggcaacccacacattgatcacggggctagaagagtatgtgcgggagagtttttccttggtgcaggttcagccaggtgtggacatcatccggacaaacctggaatttctccaagagcagtttaatagcattgctgcgcatgtgctgcattgcacagatagtggatttggggcccggttgctggagttgtgtaaccaaggcctgtttgaatgcctggccctaaacctgcactgcttggggggacagcagatggagcttgctgctgttatcaatggccgaattcgtcgtatgtctcgtggggtgaatccctccttggtgagctggctgaccactatgatgggactgaggcttcaggtggtactggagcacatgcctgtaggccctgatgccattctcagatacgttcgcagggttggtgatcccccccagccacttcctgaggagccaatggaagttcagggagcagaaagagcttcccctgagcctcagcgggagaatgcttccccagcccctggaacaacagcagaagaggccatgtcccgaggtccacctcctgctcctgaggggggctcccgggatgaacaggatggagcttcagctgagacagaaccttgggcagctgcagtccccccagaatgggtccctattatccagcaggacattcagagccagcggaaggtgaaaccgcagccccctctgagtgatgcctacctcagtggtatgcctgccaagagacgcaagacgatgcagggtgagggcccccagctgcttctctcagaggctgtgagccgggcagctaaggcagccggagctcggcccctgacgagccccgagagcctgagccgggacctggaggcaccagaggttcaggagagctacaggcagcagctccggtctgatatacaaaaacgactgcaggaagaccccaactacagtccccagcgcttccccaatgcccagcgggcctttgctgatgatccttagctctttctttgctctatggcccttcctcatcaggggaccgtttcccccctcttccttcacagtatttaagaaataaaagtcggatttttctggctgctttctctcta

SEQ ID NO: 3363 - DNA, 993 bp, Homo sapiens; identical to SEQ ID NO: 3278
  source 1..993: mol_type = unassigned DNA

SEQ ID NO: 3364 - DNA, 1688 bp, Homo sapiens
  source 1..1688: mol_type = unassigned DNA
gtgtgtgtgtgtgtgtgtgtgtgtgtgtgtgtgtgtgtgtgtgtttggctgtgggttagttgtgccgttctgctggaacaccgtgggaaggcagtagacgcgggcagtcagctagcaggtctgtcgccccagacctgtcggccatggagcctaatgatagtaccagtaccgctgtggaggagcctgacagcttggaggtgttggtgaagaccttggactctcaaactcgtacctttattgtgggggcccagatgaatgtaaaagagtttaaggagcacattgctgcctctgtcagcatcccatctgaaaaacaacggctcatttaccagggacgagttctgcaagatgataagaagcttcaggaatacaatgttgggggaaaggttatccacctggtggaacgggctcctcctcagactcacctcccttctggggcatcttctgggacggggtctgcctcagccactcatggtgggggatccccccctggtactcgggggcctggggcctctgttcatgaccggaatgccaacagctatgtcatggttggaaccttcaatcttcctagtgacggctctgctgtggatgttcacatcaacatggaacaggccccgattcagagtgagccccgggtacggctggtgatggctcagcacatgatcagggatatacagaccttactatcccggatggagtgtcgaggagggccccaaccgcagcacagtcagccgcccccgcagccaccggctgtgaccccggagccagtagccttgagctctcaaacatcagaaccagttgaaagtgaagcacctccccgggagcccatggaggcagaagaagtggaggagcgtgccccagcccagaacccggagctcactcctggcccagccccagcgggcccaacacctgccccggaaacaaatgcacccaaccatccttcccctgcggagtatgtcgaggtgctccaggagctacagcggctggagagtcgcctccagcccttcttgcagcgctactacgaggttctgggtgctgctgccaccacggactacaataacaatcacgagggccgggaggaggatcagcggttgatcaacttggtaggggagagcctgcgactgctgggcaacacctttgttgcactgtctgacctgcgctgcaatctggcctgcacgcccccacgacacctgcatgtggtccggcctatgtctcactacaccacccccatggtgctccagcaggcagccattcccatacagatcaatgtgggaaccactgtgaccatgacaggaaatgggactcggccccccccaactcccaatgcagaggcacctccccctggtcctgggcaggcctcatccgtggctccgtcttctaccaatgtcgagtcctcagctgagggggctcccccgccaggtccagctcccccgccagccaccagccacccgagggtcatccggatttcccaccagagtgtggaacccgtggtcatgatgcacatgaacattcaagattctggcacacagcctggtggtgttccgagtgctcccactggccccctgggaccccctggtcatggccaaaccctgggctccaccctcatccagctgccctccctgccccctgagttcatgcacgccgtcgcccaccagatcactcatcaggccatggtggcagctgttgcctcc

SEQ ID NO: 3365 - DNA, 3652 bp, Homo sapiens
  source 1..3652: mol_type = unassigned DNA
ggggaagtcgggggcggagccgcggggtggtgggtgggtgggtgtgtgtgtgtgtgtgtgtgtgtgtgtgtgtgtgtttggctgtgggttagttgtgccgttctgctggaacaccgtgggaaggcagtagacgcgggcagtcagctagcagagacctgtcggccatggagcctaatgatagtaccagtaccgctgtggaggagcctgacagcttggaggtgttggtgaagaccttggactctcaaactcgtacctttattgtgggggcccagatgaatgtaaaagagtttaaggagcacattgctgcctctgtcagcatcccatctgaaaaacaacggctcatttaccagggacgagttctgcaagatgataagaagcttcaggaatacaatgttgggggaaaggttatccacctggtggaacgggctcctcctcagactcacctcccttctggggcatcttctgggacggggtctgcctcagccactcatggtgggggatccccccctggtactcgggggcctggggcctctgttcatgaccggaatgccaacagctatgtcatggttggaaccttcaatcttcctagtgacggctctgctgtggatgttcacatcaacatggaacaggccccgattcagagtgagccccgggtacggctggtgatggctcagcacatgatcagggatatacagaccttactatcccggatggagtgtcgaggagggccccaaccgcagcacagtcagccgcccccgcagccaccggctgtgaccccggagccagtagccttgagctctcaaacatcagaaccagttgaaagtgaagcacctccccgggagcccatggaggcagaagaagtggaggagcgtgccccagcccagaacccggagctcactcctggcccagccccagcgggcccaacacctgccccggaaacaaatgcacccaaccatccttcccctgcggagtatgtcgaggtgctccaggagctacagcggctggagagtcgcctccagcccttcttgcagcgctactacgaggttctgggtgctgctgccaccacggactacaataacaatcacgagggccgggaggaggatcagcggttgatcaacttggtaggggagagcctgcgactgctgggcaacacctttgttgcactgtctgacctgcgctgcaatctggcctgcacgcccccacgacacctgcatgtggtccggcctatgtctcactacaccacccccatggtgctccagcaggcagccattcccatacagatcaatgtgggaaccactgtgaccatgacaggaaatgggactcggccccccccaactcccaatgcagaggcacctccccctggtcctgggcaggcctcatccgtggctccgtcttctaccaatgtcgagtcctcagctgagggggctcccccgccaggtccagctcccccgccagccaccagccacccgagggtcatccggatttcccaccagagtgtggaacccgtggtcatgatgcacatgaacattcaagattctggcacacagcctggtggtgttccgagtgctcccactggccccctgggaccccctggtcatggccaaaccctgggacagcaggtgccaggcttcccaacagctccaacccgggtggtgattgcccggcccactcctccacaggctcggccttcccatcctggagggcccccagtctctgggacactgcagggcgccggtctgggtaccaatgcctcgttggcccagatggtgagcggccttgtggggcagcttcttatgcagccagtccttgtggctcaggggaccccaggtatggctccaccgccagcccctgccactgcttctgccagtgctggcaccaccaacacagctaccacagctggccccgctcctggggggcctgcccagcctccacccacccctcaaccctccatggctgatcttcagttctctcagcttctggggaacctgctagggcctgcagggccaggggctggagggtctggtgtggcttctcccaccatcactgtggcgatgcctggtgtccctgcctttctccaaggcatgactgacttcttgcaggcaacacagacagcccctccaccacccccacctcctccacccccaccacctgccccagagcagcagaccatgcccccaccaggctccccttctggtggcgcagggagtcctggaggcctgggtcttgagagcctgtcaccggagttttttacctcagtggtgcagggtgtgctcagctccctgctgggctccctgggggctcgggctggcagcagtgaaagtattgctgccttcatacaacgcctcagtggatccagcaacatctttgagcctggagctgatggggcccttggattctttggggccttgctttctcttctgtgccagaacttctctatggtggacgtagtgatgcttctccatgggcatttccagccactacaacggctccagccccagctgcgatccttcttccaccagcactacctgggtggtcaggagcccacacccagtaacatccggatggcaacccacacattgatcacggggctagaagagtatgtgcgggagagtttttccttggtgcaggttcagccaggtgtggacatcatccggacaaacctggaatttctccaagagcagtttaatagcattgctgcgcatgtgctgcattgcacagatagtggatttggggcccggttgctggagttgtgtaaccaaggcctgtttgaatgcctggccctaaacctgcactgcttggggggacagcagatggagcttgctgctgttatcaatggccgaattcgtcgtatgtctcgtggggtgaatccctccttggtgagctggctgaccactatgatgggactgaggcttcaggtggtactggagcacatgcctgtaggccctgatgccattctcagatacgttcgcagggttggtgatcccccccagccacttcctgaggagccaatggaagttcagggagcagaaagagcttcccctgagcctcagcgggagaatgcttccccagcccctggaacaacagcagaagaggccatgtcccgaggtccacctcctgctcctgaggggggctcccgggatgaacaggatggagcttcagctgagacagaaccttgggcagctgcagtccccccagaatgggtccctattatccagcaggacattcagagccagcggaaggtgaaaccgcagccccctctgagtgatgcctacctcagtggtatgcctgccaagagacgcaagacgatgcagggtgagggcccccagctgcttctctcagaggctgtgagccgggcagctaaggcagccggagctcggcccctgacgagccccgagagcctgagccgggacctggaggcaccagaggttcaggagagctacaggcagcagctccggtctgatatacaaaaacgactgcaggaagaccccaactacagtccccagcgcttccccaatgcccagcgggcctttgctgatgatccttagctctttctttgctctatggcccttcctcatcaggggaccgtttcccccctcttccttcacagtatttaagaaataaaagtcggatttttctggctgctttctctcta

SEQ ID NO: 3366 - DNA, 513 bp, Homo sapiens; identical to SEQ ID NO: 3294
  source 1..513: mol_type = unassigned DNA

SEQ ID NO: 3367 - DNA, 3751 bp, Homo sapiens; identical to SEQ ID NO: 3304
  source 1..3751: mol_type = unassigned DNA

SEQ ID NO: 3368 - DNA, 844 bp, Homo sapiens; identical to SEQ ID NO: 3291
  source 1..844: mol_type = unassigned DNA

SEQ ID NO: 3369 - DNA, 554 bp, Homo sapiens; identical to SEQ ID NO: 3295
  source 1..554: mol_type = unassigned DNA

SEQ ID NO: 3370 - DNA, 736 bp, Homo sapiens; identical to SEQ ID NO: 3333
  source 1..736: mol_type = unassigned DNA

SEQ ID NO: 3371 - DNA, 844 bp, Homo sapiens; identical to SEQ ID NO: 3291
  source 1..844: mol_type = unassigned DNA

SEQ ID NO: 3372 - DNA, 902 bp, Homo sapiens; identical to SEQ ID NO: 3302
  source 1..902: mol_type = unassigned DNA

SEQ ID NO: 3373 - DNA, 844 bp, Homo sapiens; identical to SEQ ID NO: 3291
  source 1..844: mol_type = unassigned DNA

SEQ ID NO: 3374 - DNA, 1710 bp, Homo sapiens; identical to SEQ ID NO: 3332
  source 1..1710: mol_type = unassigned DNA

SEQ ID NO: 3375 - DNA, 544 bp, Homo sapiens; identical to SEQ ID NO: 3282
  source 1..544: mol_type = unassigned DNA

SEQ ID NO: 3376 - DNA, 844 bp, Homo sapiens; identical to SEQ ID NO: 3291
  source 1..844: mol_type = unassigned DNA

SEQ ID NO: 3377 - DNA, 993 bp, Homo sapiens; identical to SEQ ID NO: 3278
  source 1..993: mol_type = unassigned DNA

SEQ ID NO: 3378 - DNA, 3755 bp, Homo sapiens; identical to SEQ ID NO: 3254
  source 1..3755: mol_type = unassigned DNA

SEQ ID NO: 3379 - DNA, 1689 bp, Homo sapiens
  source 1..1689: mol_type = unassigned DNA
ggtgtgtgtgtgtgtgtgtgtgtgtgtgtgtgtgtgtgtgtgtgtttggctgtgggttagttgtgccgttctgctggaacaccgtgggaaggcagtagacgcgggcagtcagctagcaggtctgtcgccccagacctgtcggccatggagcctaatgatagtaccagtaccgctgtggaggagcctgacagcttggaggtgttggtgaagaccttggactctcaaactcgtacctttattgtgggggcccagatgaatgtaaaagagtttaaggagcacattgctgcctctgtcagcatcccatctgaaaaacaacggctcatttaccagggacgagttctgcaagatgataagaagcttcaggaatacaatgttgggggaaaggttatccacctggtggaacgggctcctcctcagactcacctcccttctggggcatcttctgggacggggtctgcctcagccactcatggtgggggatccccccctggtactcgggggcctggggcctctgttcatgaccggaatgccaacagctatgtcatggttggaaccttcaatcttcctagtgacggctctgctgtggatgttcacatcaacatggaacaggccccgattcagagtgagccccgggtacggctggtgatggctcagcacatgatcagggatatacagaccttactatcccggatggagtgtcgaggagggccccaaccgcagcacagtcagccgcccccgcagccaccggctgtgaccccggagccagtagccttgagctctcaaacatcagaaccagttgaaagtgaagcacctccccgggagcccatggaggcagaagaagtggaggagcgtgccccagcccagaacccggagctcactcctggcccagccccagcgggcccaacacctgccccggaaacaaatgcacccaaccatccttcccctgcggagtatgtcgaggtgctccaggagctacagcggctggagagtcgcctccagcccttcttgcagcgctactacgaggttctgggtgctgctgccaccacggactacaataacaatcacgagggccgggaggaggatcagcggttgatcaacttggtaggggagagcctgcgactgctgggcaacacctttgttgcactgtctgacctgcgctgcaatctggcctgcacgcccccacgacacctgcatgtggtccggcctatgtctcactacaccacccccatggtgctccagcaggcagccattcccatacagatcaatgtgggaaccactgtgaccatgacaggaaatgggactcggccccccccaactcccaatgcagaggcacctccccctggtcctgggcaggcctcatccgtggctccgtcttctaccaatgtcgagtcctcagctgagggggctcccccgccaggtccagctcccccgccagccaccagccacccgagggtcatccggatttcccaccagagtgtggaacccgtggtcatgatgcacatgaacattcaagattctggcacacagcctggtggtgttccgagtgctcccactggccccctgggaccccctggtcatggccaaaccctgggctccaccctcatccagctgccctccctgccccctgagttcatgcacgccgtcgcccaccagatcactcatcaggccatggtggcagctgttgcctcc

SEQ ID NO: 3380 - DNA, 993 bp, Homo sapiens; identical to SEQ ID NO: 3278
  source 1..993: mol_type = unassigned DNA

SEQ ID NO: 3381 - DNA, 2407 bp, Homo sapiens; identical to SEQ ID NO: 3268
  source 1..2407: mol_type = unassigned DNA

SEQ ID NO: 3382 - DNA, 766 bp, Homo sapiens; identical to SEQ ID NO: 3273
  source 1..766: mol_type = unassigned DNA

SEQ ID NO: 3383 - DNA, 993 bp, Homo sapiens; identical to SEQ ID NO: 3278
  source 1..993: mol_type = unassigned DNA

SEQ ID NO: 3384 - DNA, 3755 bp, Homo sapiens; identical to SEQ ID NO: 3254
  source 1..3755: mol_type = unassigned DNA

SEQ ID NO: 3385 - DNA, 736 bp, Homo sapiens; identical to SEQ ID NO: 3333
  source 1..736: mol_type = unassigned DNA

SEQ ID NO: 3386 - DNA, 1056 bp, Homo sapiens; identical to SEQ ID NO: 3288
  source 1..1056: mol_type = unassigned DNA

SEQ ID NO: 3387 - DNA, 880 bp, Homo sapiens; identical to SEQ ID NO: 3267
  source 1..880: mol_type = unassigned DNA

SEQ ID NO: 3388 - DNA, 880 bp, Homo sapiens; identical to SEQ ID NO: 3267
  source 1..880: mol_type = unassigned DNA

SEQ ID NO: 3389 - DNA, 736 bp, Homo sapiens; identical to SEQ ID NO: 3261
  source 1..736: mol_type = unassigned DNA

SEQ ID NO: 3390 - DNA, 747 bp, Homo sapiens; identical to SEQ ID NO: 3266
  source 1..747: mol_type = unassigned DNA

SEQ ID NO: 3391 - DNA, 859 bp, Homo sapiens; identical to SEQ ID NO: 3306
  source 1..859: mol_type = unassigned DNA

SEQ ID NO: 3392 - DNA, 554 bp, Homo sapiens; identical to SEQ ID NO: 3295
  source 1..554: mol_type = unassigned DNA

SEQ ID NO: 3393 - DNA, 902 bp, Homo sapiens
  source 1..902: mol_type = unassigned DNA
tccctaagccgtcgatctcctgccctttgtgtttctctccctgtgccccggaatcagaagggggatggggacaggtgtgaatgtgtgtgtgtgcaggagatactttttagagacctgtcggccatggagcctaatgatagtaccagtaccgctgtggaggagcctgacagcttggaggtgttggtgaagaccttggactctcaaactcgtacctttattgtgggggcccagatgaatgtaaaagagtttaaggagcacattgctgcctctgtcagcatcccatctgaaaaacaacggctcatttaccagggacgagttctgcaagatgataagaagcttcaggaatacaatgttgggggaaaggttatccacctggtggaacgggctcctcctcagactcacctcccttctggggcatcttctgggacggggtctgcctcagccactcatggtgggggatccccccctggtactcgggggcctggggcctctgttcatgaccggaatgccaacagctatgtcatggttggaaccttcaatcttcctagtgacggctctgctgtggatgttcacatcaacatggaacaggccccgattcagagtgagccccgggtacggctggtgatggctcagcacatgatcagggatatacagaccttactatcccggatggagtgtcgaggagggccccaaccgcagcacagtcagccgcccccgcagccaccggctgtgaccccggagccagtagccttgagctctcaaacatcagaaccagttgaaagtgaagcacctccccgggagcccatggaggcagaagaagtggaggagcgtgccccagcccagaacccggagctcactcctggcccagccccagcgggcccaacacctgccccggaaacaaa

SEQ ID NO: 3394 - DNA, 544 bp, Homo sapiens; identical to SEQ ID NO: 3282
  source 1..544: mol_type = unassigned DNA

SEQ ID NO: 3395 - DNA, 654 bp, Homo sapiens; identical to SEQ ID NO: 3275
  source 1..654: mol_type = unassigned DNA

SEQ ID NO: 3396 - DNA, 3751 bp, Homo sapiens; identical to SEQ ID NO: 3304
  source 1..3751: mol_type = unassigned DNA

SEQ ID NO: 3397 - DNA, 714 bp, Homo sapiens; identical to SEQ ID NO: 3279
  source 1..714: mol_type = unassigned DNA

SEQ ID NO: 3398 - DNA, 654 bp, Homo sapiens; identical to SEQ ID NO: 3275
  source 1..654: mol_type = unassigned DNA

SEQ ID NO: 3399 - DNA, 554 bp, Homo sapiens; identical to SEQ ID NO: 3295
  source 1..554: mol_type = unassigned DNA

SEQ ID NO: 3400 - DNA, 747 bp, Homo sapiens; identical to SEQ ID NO: 3298
  source 1..747: mol_type = unassigned DNA

SEQ ID NO: 3401 - DNA, 1051 bp, Homo sapiens; identical to SEQ ID NO: 3263
  source 1..1051: mol_type = unassigned DNA

SEQ ID NO: 3402 - DNA, 807 bp, Homo sapiens; identical to SEQ ID NO: 3274
  source 1..807: mol_type = unassigned DNA

SEQ ID NO: 3403 - DNA, 859 bp, Homo sapiens; identical to SEQ ID NO: 3306
  source 1..859: mol_type = unassigned DNA

SEQ ID NO: 3404 - DNA, 783 bp, Homo sapiens; identical to SEQ ID NO: 3296
  source 1..783: mol_type = unassigned DNA

SEQ ID NO: 3405 - DNA, 736 bp, Homo sapiens; identical to SEQ ID NO: 3261
  source 1..736: mol_type = unassigned DNA

SEQ ID NO: 3406 - DNA, 680 bp, Homo sapiens; identical to SEQ ID NO: 3283
  source 1..680: mol_type = unassigned DNA

SEQ ID NO: 3407 - DNA, 783 bp, Homo sapiens; identical to SEQ ID NO: 3296
  source 1..783: mol_type = unassigned DNA

SEQ ID NO: 3408 - DNA, 1056 bp, Homo sapiens; identical to SEQ ID NO: 3288
  source 1..1056: mol_type = unassigned DNA

SEQ ID NO: 3409 - DNA, 517 bp, Homo sapiens
  source 1..517: mol_type = unassigned DNA
gtcgtatgtctcgtggggtgaatccctccttggtgagctggctgaccactatgatgggactgaggcttcaggtggtactggagcacatgcctgtaggccctgatgccattctcagatacgttcgcagggttggtgatcccccccagccacttcctgaggagccaatggaagttcagggagcagaaagagcttcccctgagcctcaggaatgggtccctattatccagcaggacattcagagccagcggaaggtgaaaccgcagccccctctgagtgatgcctacctcagtggtatgcctgccaagagacgcaagctccggtctgatatacaaaaacgactgcaggaagaccccaactacagtccccagcgcttccccaatgcccagcgggcctttgctgatgatccttagctctttctttgctctatggcccttcctcatcaggggaccgtttcccccctcttccttcacagtatttaagaaataaaagtcggatttttctggctgctttctctcta

SEQ ID NO: 3410 - DNA, 3881 bp, Homo sapiens
  source 1..3881: mol_type = unassigned DNA
tggggcgatgcttaagtgtccacgcatccgtagtgcgacgcacgcaggcgtagtacggtcccccgggcgacagcggtggcggctcctcggggtgctcggctccctcccacctaggccggccccggcccgactcgccctcagaaactcactgtttggggctgcggactttctcgtcgtgccccacaaaagtaaagcttggggacctggggggagccggaagtatcgcttcgagatccccaaatactatcggggaaacggaagtggccgtcggtggcagagacctgtcggccatggagcctaatgatagtaccagtaccgctgtggaggagcctgacagcttggaggtgttggtgaagaccttggactctcaaactcgtacctttattgtgggggcccagatgaatgtaaaagagtttaaggagcacattgctgcctctgtcagcatcccatctgaaaaacaacggctcatttaccagggacgagttctgcaagatgataagaagcttcaggaatacaatgttgggggaaaggttatccacctggtggaacgggctcctcctcagactcacctcccttctggggcatcttctgggacggggtctgcctcagccactcatggtgggggatccccccctggtactcgggggcctggggcctctgttcatgaccggaatgccaacagctatgtcatggttggaaccttcaatcttcctagtgacggctctgctgtggatgttcacatcaacatggaacaggccccgattcagagtgagccccgggtacggctggtgatggctcagcacatgatcagggatatacagaccttactatcccggatggagtgtcgaggagggccccaaccgcagcacagtcagccgcccccgcagccaccggctgtgaccccggagccagtagccttgagctctcaaacatcagaaccagttgaaagtgaagcacctccccgggagcccatggaggcagaagaagtggaggagcgtgccccagcccagaacccggagctcactcctggcccagccccagcgggcccaacacctgccccggaaacaaatgcacccaaccatccttcccctgcggagtatgtcgaggtgctccaggagctacagcggctggagagtcgcctccagcccttcttgcagcgctactacgaggttctgggtgctgctgccaccacggactacaataacaatcacgagggccgggaggaggatcagcggttgatcaacttggtaggggagagcctgcgactgctgggcaacacctttgttgcactgtctgacctgcgctgcaatctggcctgcacgcccccacgacacctgcatgtggtccggcctatgtctcactacaccacccccatggtgctccagcaggcagccattcccatacagatcaatgtgggaaccactgtgaccatgacaggaaatgggactcggccccccccaactcccaatgcagaggcacctccccctggtcctgggcaggcctcatccgtggctccgtcttctaccaatgtcgagtcctcagctgagggggctcccccgccaggtccagctcccccgccagccaccagccacccgagggtcatccggatttcccaccagagtgtggaacccgtggtcatgatgcacatgaacattcaagattctggcacacagcctggtggtgttccgagtgctcccactggccccctgggaccccctggtcatggccaaaccctgggctccaccctcatccagctgccctccctgccccctgagttcatgcacgccgtcgcccaccagatcactcatcaggccatggtggcagctgttgcctccgcggccgcaggacagcaggtgccaggcttcccaacagctccaacccgggtggtgattgcccggcccactcctccacaggctcggccttcccatcctggagggcccccagtctctgggacactgcagggcgccggtctgggtaccaatgcctcgttggcccagatggtgagcggccttgtggggcagcttcttatgcagccagtccttgtggctcaggggaccccaggtatggctccaccgccagcccctgccactgcttctgccagtgctggcaccaccaacacagctaccacagctggccccgctcctggggggcctgcccagcctccacccacccctcaaccctccatggctgatcttcagttctctcagcttctggggaacctgctagggcctgcagggccaggggctggagggcctggtgtggcttctcccaccatcactgtggcgatgcctggtgtccctgcctttctccaaggcatgactgacttcttgcaggcaacacagacagcccctccaccacccccacctcctccacccccaccacctgccccagagcagcagaccatgcccccaccaggctccccttctggtggcgcagggagtcctggaggcctgggtcttgagagcctgtcaccggagttttttacctcagtggtgcagggtgtgctcagctccctgctgggctccctgggggctcgggctggcagcagtgaaagtattgctgccttcatacaacgcctcagtggatccagcaacatctttgagcctggagctgatggggcccttggattctttggggccttgctttctcttctgtgccagaacttctctatggtggacgtagtgatgcttctccatgggcatttccagccactacaacggctccagccccagctgcgatccttcttccaccagcactacctgggtggtcaggagcccacacccagtaacatccggatggcaacccacacattgatcacggggctagaagagtatgtgcgggagagtttttccttggtgcaggttcagccaggtgtggacatcatccggacaaacctggaatttctccaagagcagtttaatagcattgctgcgcatgtgctgcattgcacagatagtggatttggggcccggttgctggagttgtgtaaccaaggcctgtttgaatgcctggccctaaacctgcactgcttggggggacagcagatggagcttgctgctgttatcaatggccgaattcgtcgtatgtctcgtggggtgaatccctccttggtgagctggctgaccactatgatgggactgaggcttcaggtggtactggagcacatgcctgtaggccctgatgccattctcagatacgttcgcagggttggtgatcccccccagccacttcctgaggagccaatggaagttcagggagcagaaagagcttcccctgagcctcagcgggagaatgcttccccagcccctggaacaacagcagaagaggccatgtcccgaggtccacctcctgctcctgaggggggctcccgggatgaacaggatggagcttcagctgagacagaaccttgggcagctgcagtccccccagaatgggtccctattatccagcaggacattcagagccagcggaaggtgaaaccgcagccccctctgagtgatgcctacctcagtggtatgcctgccaagagacgcaagacgatgcagggtgagggcccccagctgcttctctcagaggctgtgagccgggcagctaaggcagccggagctcggcccctgacgagccccgagagcctgagccgggacctggaggcaccagaggttcaggagagctacaggcagcagctccggtctgatatacaaaaacgactgcaggaagaccccaactacagtccccagcgcttccccaatgcccagcgggcctttgctgatgatccttagctctttgctctatggcccttcctcatcaggggaccgtttcccccctcttccttcacagtatttaagaaataaaagtcggatttttctggctgctttctctct

SEQ ID NO: 3411 - DNA, 3059 bp, Homo sapiens
  source 1..3059: mol_type = unassigned DNA
gtagtacggtcccccgggcgacagcggtggcggctcctcggggtgctcggctccctcccacctaggccggccccggcccgactcgccctcagaaactcactgtttggggctgcggactttctcgtcgtgccccacaaaagtaaagcttggggacctggggggagccggaagtatcgcttcgagatccccaaatactatcggggaaacggaagtggccgtcggtggcagagacctgtcggccatggagcctaatgatagtaccagtaccgctgtggaggagcctgacagcttggaggtgttggtgaagaccttggactctcaaactcgtacctttattgtgggggcccagatgaatgtaaaagagtttaaggagcacattgctgcctctgtcagcatcccatctgaaaaacaacggctcatttaccagggacgagttctgcaagatgataagaagcttcaggaatacaatgttgggggaaaggttatccacctggtggaacgggctcctcctcagactcacctcccttctggggcatcttctgggacggggtctgcctcagccactcatggtgggggatccccccctggtactcgggggcctggggcctctgttcatgaccggaatgccaacagctatgtcatggttggaaccttcaatcttcctagtgacggctctgctgtggatgttcacatcaacatggaacaggccccgattcagagtgagccccgggtacggctggtgatggctcagcacatgatcagggatatacagaccttactatcccggatggagtgtcgaggagggccccaaccgcagcacagtcagccgcccccgcagccaccggctgtgaccccggagccagtagccttgagctctcaaacatcagaaccagttgaaagtgaagcacctccccgggagcccatggaggcagaagaagtggaggagcgtgccccagcccagaacccggagctcactcctggcccagccccagcgggcccaacacctgccccggaaacaaatgcacccaaccatccttcccctgcggagtatgtcgaggtgctccaggagctacagcggctggagagtcgcctccagcccttcttgcagcgctactacgaggttctgggtgctgctgccaccacggactacaataacaatcacgagggccgggaggaggatcagcggttgatcaacttggtaggggagagcctgcgactgctgggcaacacctttgttgcactgtctgacctgcgctgcaatctggcctgcacgcccccacgacacctgcatgtggtccggcctatgtctcactacaccacccccatggtgctccagcaggcagccattcccatacagatcaatgtgggaaccactgtgaccatgacaggaaatgggactcggccccccccaactcccaatgcagaggcacctccccctggtcctgggcaggcctcatccgtggctccgtcttctaccaatgtcgagtcctcagctgagggggctcccccgccaggtccagctcccccgccagccaccagccacccgagggtcatccggatttcccaccagagtgtggaacccgtggtcatgatgcacatgaacattcaagattctggcacacagcctggtggtgttccgagtgctcccactggccccctgggaccccctggtcatggccaaaccctgggacagcaggtgccaggcttcccaacagctccaacccgggtggtgattgcccggcccactcctccacaggctcggccttcccatcctggagggcccccagtctctgggacactgggcgccggtctgggtaccaatgcctcgttggcccagatggtgagcggccttgtggggcagcttcttatgcagccagtccttgtggctcaggggaccccagggagtcctggaggcctgggtcttgagagcctgtcaccggagttttttacctcagtggtgcagggtgtgctcagctccctgctgggctccctgggggctcgggctggcagcagtgaaagtattgctgccttcatacaacgcctcagtggatccagcaacatctttgagcctggagctgatggggcccttggattctttggggccttgctttctcttctgtgccagaacttctctatggtggacgtagtgatgcttctccatgggcatttccagccactacaacggctccagccccagctgcgatccttcttccaccagcactacctgggtggtcaggagcccacacccagtaacatccggatggcaacccacacattgatcacggggctagaagagtatgtgcgggagagtttttccttggtgcaggttcagccaggtgtggacatcatccggacaaacctggaatttctccaagagcagtttaatagcattgctgcgcatgtgctgcattgcacagatagtggatttggggcccggttgctggagttgtgtaaccaaggcctgtttgaatgcctggccctaaacctgcactgcttggggggacagcagatggagcttgctgctgttatcaatggccgaattcgtcgtatgtctcgtggggtgaatccctccttggtgagctggctgaccactatgatgggactgaggcttcaggtggtactggagcacatgcctgtaggccctgatgccattctcagatacgttcgcagggttggtgatcccccccagccacttcctgaggagccaatggaagttcagggagcagaaagagcttcccctgagcctcaggaatgggtccctattatccagcaggacattcagagccagcggaaggtgaaaccgcagccccctctgagtgatgcctacctcagtggtatgcctgccaagagacgcaagctccggtctgatatacaaaaacgactgcaggaagaccccaactacagtccccagcgcttccccaatgcccagcgggcctttgctgatgatccttagctctttctttgctctatggcccttcctcatcaggggaccgtttcccccctcttccttcacagtatttaagaaataaaagtcggatttttctggctgctttctctct

SEQ ID NO: 3412 - DNA, 3055 bp, Homo sapiens; identical to SEQ ID NO: 3353
  source 1..3055: mol_type = unassigned DNA

SEQ ID NO: 3413 - DNA, 3569 bp, Homo sapiens
  source 1..3569: mol_type = unassigned DNA
gtagtacggtcccccgggcgacagcggtggcggctcctcggggtgctcggctccctcccacctaggccggccccggcccgactcgccctcagaaactcactgtttggggctgcggactttctcgtcgtgccccacaaaagtaaagcttggggacctggggggagccggaagtatcgcttcgagatccccaaatactatcggggaaacggaagtggccgtcggtggcagagacctgtcggccatggagcctaatgatagtaccagtaccgctgtggaggagcctgacagcttggaggtgttggtgaagaccttggactctcaaactcgtacctttattgtgggggcccagatgaatgtaaaagagtttaaggagcacattgctgcctctgtcagcatcccatctgaaaaacaacggctcatttaccagggacgagttctgcaagatgataagaagcttcaggaatacaatgttgggggaaaggttatccacctggtggaacgggctcctcctcagactcacctcccttctggggcatcttctgggacggggtctgcctcagccactcatggtgggggatccccccctggtactcgggggcctggggcctctgttcatgaccggaatgccaacagctatgtcatggttggaaccttcaatcttcctagtgacggctctgctgtggatgttcacatcaacatggaacaggccccgattcagagtgagccccgggtacggctggtgatggctcagcacatgatcagggatatacagaccttactatcccggatggagtgtcgaggagggccccaaccgcagcacagtcagccgcccccgcagccaccggctgtgaccccggagccagtagccttgagctctcaaacatcagaaccagttgaaagtgaagcacctccccgggagcccatggaggcagaagaagtggaggagcgtgccccagcccagaacccggagctcactcctggcccagccccagcgggcccaacacctgccccggaaacaaatgcacccaaccatccttcccctgcggagtatgtcgaggtgctccaggagctacagcggctggagagtcgcctccagcccttcttgcagcgctactacgaggttctgggtgctgctgccaccacggactacaataacaatcacgagggccgggaggaggatcagcggttgatcaacttggtaggggagagcctgcgactgctgggcaacacctttgttgcactgtctgacctgcgctgcaatctggcctgcacgcccccacgacacctgcatgtggtccggcctatgtctcactacaccacccccatggtgctccagcaggcagccattcccatacagatcaatgtgggaaccactgtgaccatgacaggaaatgggactcggccccccccaactcccaatgcagaggcacctccccctggtcctgggcaggcctcatccgtggctccgtcttctaccaatgtcgagtcctcagctgagggggctcccccgccaggtccagctcccccgccagccaccagccacccgagggtcatccggatttcccaccagagtgtggaacccgtggtcatgatgcacatgaacattcaagattctggcacacagcctggtggtgttccgagtgctcccactggccccctgggaccccctggtcatggccaaaccctgggacagcaggtgccaggcttcccaacagctccaacccgggtggtgattgcccggcccactcctccacaggctcggccttcccatcctggagggcccccagtctctgggacactgcagggcgccggtctgggtaccaatgcctcgttggcccagatggtgagcggccttgtggggcagcttcttatgcagccagtccttgtggctcaggggaccccaggtatggctccaccgccagcccctgccactgcttctgccagtgctggcaccaccaacacagctaccacagctggccccgctcctggggggcctgcccagcctccacccacccctcaaccctccatggctgatcttcagttctctcagcttctggggaacctgctagggcctgcagggccaggggctggagggtctggtgtggcttctcccaccatcactgtggcgatgcctggtgtccctgcctttctccaaggcatgactgacttcttgcaggcaacacagacagcccctccaccacccccacctcctccacccccaccacctgccccagagcagcagaccatgcccccaccaggctccccttctggtggcgcagggagtcctggaggcctgggtcttgagagcctgtcaccggagttttttacctcagtggtgcagggtgtgctcagctccctgctgggctccctgggggctcgggctggcagcagtgaaagtattgctgccttcatacaacgcctcagtggatccagcaacatctttgagcctggagctgatggggcccttggattctttggggccttgctttctcttctgtgccagaacttctctatggtggacgtagtgatgcttctccatgggcatttccagccactacaacggctccagccccagctgcgatccttcttccaccagcactacctgggtggtcaggagcccacacccagtaacatccggatggcaacccacacattgatcacggggctagaagagtatgtgcgggagagtttttccttggtgcaggttcagccaggtgtggacatcatccggacaaacctggaatttctccaagagcagtttaatagcattgctgcgcatgtgctgcattgcacagatagtggatttggggcccggttgctggagttgtgtaaccaaggcctgtttgaatgcctggccctaaacctgcactgcttggggggacagcagatggagcttgctgctgttatcaatggccgaattcgtcgtatgtctcgtggggtgaatccctccttggtgagctggctgaccactatgatgggactgaggcttcaggtggtactggagcacatgcctgtaggccctgatgccattctcagatacgttcgcagggttggtgatcccccccagccacttcctgaggagccaatggaagttcagggagcagaaagagcttcccctgagcctcagcgggagaatgcttccccagcccctggaacaacagcagaagaggccatgtcccgaggtccacctcctgctcctgaggggggctcccgggatgaacaggatggagcttcagctgagacagaaccttgggcagctgcagtccccccagaatgggtccctattatccagcaggacattcagagccagcggaaggtgaaaccgcagccccctctgagtgatgcctacctcagtggtatgcctgccaagagacgcaagctccggtctgatatacaaaaacgactgcaggaagaccccaactacagtccccagcgcttccccaatgcccagcgggcctttgctgatgatccttagctctttctttgctctatggcccttcctcatcaggggaccgtttcccccctcttccttcacagtatttaagaaataaaagtcggatttttctggc

SEQ ID NO: 3414 - DNA, 3565 bp, Homo sapiens
  source 1..3565: mol_type = unassigned DNA
gtagtacggtcccccgggcgacagcggtggcggctcctcggggtgctcggctccctcccacctaggccggccccggcccgactcgccctcagaaactcactgtttggggctgcggactttctcgtcgtgccccacaaaagtaaagcttggggacctggggggagccggaagtatcgcttcgagatccccaaatactatcggggaaacggaagtggccgtcggtggcagagacctgtcggccatggagcctaatgatagtaccagtaccgctgtggaggagcctgacagcttggaggtgttggtgaagaccttggactctcaaactcgtacctttattgtgggggcccagatgaatgtaaaagagtttaaggagcacattgctgcctctgtcagcatcccatctgaaaaacaacggctcatttaccagggacgagttctgcaagatgataagaagcttcaggaatacaatgttgggggaaaggttatccacctggtggaacgggctcctcctcagactcacctcccttctggggcatcttctgggacggggtctgcctcagccactcatggtgggggatccccccctggtactcgggggcctggggcctctgttcatgaccggaatgccaacagctatgtcatggttggaaccttcaatcttcctagtgacggctctgctgtggatgttcacatcaacatggaacaggccccgattcagagtgagccccgggtacggctggtgatggctcagcacatgatcagggatatacagaccttactatcccggatggagtgtcgaggagggccccaaccgcagcacagtcagccgcccccgcagccaccggctgtgaccccggagccagtagccttgagctctcaaacatcagaaccagttgaaagtgaagcacctccccgggagcccatggaggcagaagaagtggaggagcgtgccccagcccagaacccggagctcactcctggcccagccccagcgggcccaacacctgccccggaaacaaatgcacccaaccatccttcccctgcggagtatgtcgaggtgctccaggagctacagcggctggagagtcgcctccagcccttcttgcagcgctactacgaggttctgggtgctgctgccaccacggactacaataacaatcacgagggccgggaggaggatcagcggttgatcaacttggtaggggagagcctgcgactgctgggcaacacctttgttgcactgtctgacctgcgctgcaatctggcctgcacgcccccacgacacctgcatgtggtccggcctatgtctcactacaccacccccatggtgctccagcaggcagccattcccatacagatcaatgtgggaaccactgtgaccatgacaggaaatgggactcggccccccccaactcccaatgcagaggcacctccccctggtcctgggcaggcctcatccgtggctccgtcttctaccaatgtcgagtcctcagctgagggggctcccccgccaggtccagctcccccgccagccaccagccacccgagggtcatccggatttcccaccagagtgtggaacccgtggtcatgatgcacatgaacattcaagattctggcacacagcctggtggtgttccgagtgctcccactggccccctgggaccccctggtcatggccaaaccctgggacagcaggtgccaggcttcccaacagctccaacccgggtggtgattgcccggcccactcctccacaggctcggccttcccatcctggagggcccccagtctctgggacactgcagggcgccggtctgggtaccaatgcctcgttggcccagatggtgagcggccttgtggggcagcttcttatgcagccagtccttgtggctcaggggaccccaggtatggctccaccgccagcccctgccactgcttctgccagtgctggcaccaccaacacagctaccacagctggccccgctcctggggggcctgcccagcctccacccacccctcaaccctccatggctgatcttcagttctctcagcttctggggaacctgctagggcctgcagggccaggggctggagggcctggtgtggcttctcccaccatcactgtggcgatgcctggtgtccctgcctttctccaaggcatgactgacttcttgcaggcaacacagacagcccctccaccacccccacctcctccacccccaccacctgccccagagcagcagaccatgcccccaccaggctccccttctggtggcgcagggagtcctggaggcctgggtcttgagagcctgtcaccggagttttttacctcagtggtgcagggtgtgctcagctccctgctgggctccctgggggctcgggctggcagcagtgaaagtattgctgccttcatacaacgcctcagtggatccagcaacatctttgagcctggagctgatggggcccttggattctttggggccttgctttctcttctgtgccagaacttctctatggtggacgtagtgatgcttctccatgggcatttccagccactacaacggctccagccccagctgcgatccttcttccaccagcactacctgggtggtcaggagcccacacccagtaacatccggatggcaacccacacattgatcacggggctagaagagtatgtgcgggagagtttttccttggtgcaggttcagccaggtgtggacatcatccggacaaacctggaatttctccaagagcagtttaatagcattgctgcgcatgtgctgcattgcacagatagtggatttggggcccggttgctggagttgtgtaaccaaggcctgtttgaatgcctggccctaaacctgcactgcttggggggacagcagatggagcttgctgctgttatcaatggccgaattcgtcgtatgtctcgtggggtgaatccctccttggtgagctggctgaccactatgatgggactgaggcttcaggtggtactggagcacatgcctgtaggccctgatgccattctcagatacgttcgcagggttggtgatcccccccagccacttcctgaggagccaatggaagttcagggagcagaaagagcttcccctgagcctcagcgggagaatgcttccccagcccctggaacaacagcagaagaggccatgtcccgaggtccacctcctgctcctgaggggggctcccgggatgaacaggatggagcttcagctgagacagaaccttgggcagctgcagtccccccagaatgggtccctattatccagcaggacattcagagccagcggaaggtgaaaccgcagccccctctgagtgatgcctacctcagtggtatgcctgccaagagacgcaagctccggtctgatatacaaaaacgactgcaggaagaccccaactacagtccccagcgcttccccaatgcccagcgggcctttgctgatgatccttagctctttgctctatggcccttcctcatcaggggaccgtttcccccctcttccttcacagtatttaagaaataaaagtcggatttttctggc

SEQ ID NO: 3415 - DNA, 3881 bp, Homo sapiens; identical to SEQ ID NO: 3410
  source 1..3881: mol_type = unassigned DNA

SEQ ID NO: 3416 - DNA, 3569 bp, Homo sapiens; identical to SEQ ID NO: 3413
  source 1..3569: mol_type = unassigned DNA

SEQ ID NO: 3417 - DNA, 3055 bp, Homo sapiens; identical to SEQ ID NO: 3353
  source 1..3055: mol_type = unassigned DNA

SEQ ID NO: 3418 - DNA, 3885 bp, Homo sapiens
  source 1..3885: mol_type = unassigned DNA
tggggcgatgcttaagtgtccacgcatccgtagtgcgacgcacgcaggcgtagtacggtcccccgggcgacagcggtggcggctcctcggggtgctcggctccctcccacctaggccggccccggcccgactcgccctcagaaactcactgtttggggctgcggactttctcgtcgtgccccacaaaagtaaagcttggggacctggggggagccggaagtatcgcttcgagatccccaaatactatcggggaaacggaagtggccgtcggtggcagagacctgtcggccatggagcctaatgatagtaccagtaccgctgtggaggagcctgacagcttggaggtgttggtgaagaccttggactctcaaactcgtacctttattgtgggggcccagatgaatgtaaaagagtttaaggagcacattgctgcctctgtcagcatcccatctgaaaaacaacggctcatttaccagggacgagttctgcaagatgataagaagcttcaggaatacaatgttgggggaaaggttatccacctggtggaacgggctcctcctcagactcacctcccttctggggcatcttctgggacggggtctgcctcagccactcatggtgggggatccccccctggtactcgggggcctggggcctctgttcatgaccggaatgccaacagctatgtcatggttggaaccttcaatcttcctagtgacggctctgctgtggatgttcacatcaacatggaacaggccccgattcagagtgagccccgggtacggctggtgatggctcagcacatgatcagggatatacagaccttactatcccggatggagtgtcgaggagggccccaaccgcagcacagtcagccgcccccgcagccaccggctgtgaccccggagccagtagccttgagctctcaaacatcagaaccagttgaaagtgaagcacctccccgggagcccatggaggcagaagaagtggaggagcgtgccccagcccagaacccggagctcactcctggcccagccccagcgggcccaacacctgccccggaaacaaatgcacccaaccatccttcccctgcggagtatgtcgaggtgctccaggagctacagcggctggagagtcgcctccagcccttcttgcagcgctactacgaggttctgggtgctgctgccaccacggactacaataacaatcacgagggccgggaggaggatcagcggttgatcaacttggtaggggagagcctgcgactgctgggcaacacctttgttgcactgtctgacctgcgctgcaatctggcctgcacgcccccacgacacctgcatgtggtccggcctatgtctcactacaccacccccatggtgctccagcaggcagccattcccatacagatcaatgtgggaaccactgtgaccatgacaggaaatgggactcggccccccccaactcccaatgcagaggcacctccccctggtcctgggcaggcctcatccgtggctccgtcttctaccaatgtcgagtcctcagctgagggggctcccccgccaggtccagctcccccgccagccaccagccacccgagggtcatccggatttcccaccagagtgtggaacccgtggtcatgatgcacatgaacattcaagattctggcacacagcctggtggtgttccgagtgctcccactggccccctgggaccccctggtcatggccaaaccctgggctccaccctcatccagctgccctccctgccccctgagttcatgcacgccgtcgcccaccagatcactcatcaggccatggtggcagctgttgcctccgcggccgcaggacagcaggtgccaggcttcccaacagctccaacccgggtggtgattgcccggcccactcctccacaggctcggccttcccatcctggagggcccccagtctctgggacactgcagggcgccggtctgggtaccaatgcctcgttggcccagatggtgagcggccttgtggggcagcttcttatgcagccagtccttgtggctcaggggaccccaggtatggctccaccgccagcccctgccactgcttctgccagtgctggcaccaccaacacagctaccacagctggccccgctcctggggggcctgcccagcctccacccacccctcaaccctccatggctgatcttcagttctctcagcttctggggaacctgctagggcctgcagggccaggggctggagggtctggtgtggcttctcccaccatcactgtggcgatgcctggtgtccctgcctttctccaaggcatgactgacttcttgcaggcaacacagacagcccctccaccacccccacctcctccacccccaccacctgccccagagcagcagaccatgcccccaccaggctccccttctggtggcgcagggagtcctggaggcctgggtcttgagagcctgtcaccggagttttttacctcagtggtgcagggtgtgctcagctccctgctgggctccctgggggctcgggctggcagcagtgaaagtattgctgccttcatacaacgcctcagtggatccagcaacatctttgagcctggagctgatggggcccttggattctttggggccttgctttctcttctgtgccagaacttctctatggtggacgtagtgatgcttctccatgggcatttccagccactacaacggctccagccccagctgcgatccttcttccaccagcactacctgggtggtcaggagcccacacccagtaacatccggatggcaacccacacattgatcacggggctagaagagtatgtgcgggagagtttttccttggtgcaggttcagccaggtgtggacatcatccggacaaacctggaatttctccaagagcagtttaatagcattgctgcgcatgtgctgcattgcacagatagtggatttggggcccggttgctggagttgtgtaaccaaggcctgtttgaatgcctggccctaaacctgcactgcttggggggacagcagatggagcttgctgctgttatcaatggccgaattcgtcgtatgtctcgtggggtgaatccctccttggtgagctggctgaccactatgatgggactgaggcttcaggtggtactggagcacatgcctgtaggccctgatgccattctcagatacgttcgcagggttggtgatcccccccagccacttcctgaggagccaatggaagttcagggagcagaaagagcttcccctgagcctcagcgggagaatgcttccccagcccctggaacaacagcagaagaggccatgtcccgaggtccacctcctgctcctgaggggggctcccgggatgaacaggatggagcttcagctgagacagaaccttgggcagctgcagtccccccagaatgggtccctattatccagcaggacattcagagccagcggaaggtgaaaccgcagccccctctgagtgatgcctacctcagtggtatgcctgccaagagacgcaagacgatgcagggtgagggcccccagctgcttctctcagaggctgtgagccgggcagctaaggcagccggagctcggcccctgacgagccccgagagcctgagccgggacctggaggcaccagaggttcaggagagctacaggcagcagctccggtctgatatacaaaaacgactgcaggaagaccccaactacagtccccagcgcttccccaatgcccagcgggcctttgctgatgatccttagctctttctttgctctatggcccttcctcatcaggggaccgtttcccccctcttccttcacagtatttaagaaataaaagtcggatttttctggctgctttctctct

SEQ ID NO: 3419 - DNA, 3565 bp, Homo sapiens; identical to SEQ ID NO: 3414
  source 1..3565: mol_type = unassigned DNA

SEQ ID NO: 3420 - DNA, 3059 bp, Homo sapiens; identical to SEQ ID NO: 3411
  source 1..3059: mol_type = unassigned DNA

SEQ ID NO: 3421 - DNA, 3055 bp, Homo sapiens; identical to SEQ ID NO: 3353
  source 1..3055: mol_type = unassigned DNA

SEQ ID NO: 3422 - DNA, 3885 bp, Homo sapiens; identical to SEQ ID NO: 3418
  source 1..3885: mol_type = unassigned DNA

SEQ ID NO: 3423 - DNA, 3881 bp, Homo sapiens; identical to SEQ ID NO: 3410
  source 1..3881: mol_type = unassigned DNA

SEQ ID NO: 3424 - DNA, 3885 bp, Homo sapiens; identical to SEQ ID NO: 3418
  source 1..3885: mol_type = unassigned DNA

SEQ ID NO: 3425 - DNA, 3565 bp, Homo sapiens; identical to SEQ ID NO: 3414
  source 1..3565: mol_type = unassigned DNA

SEQ ID NO: 3426 - DNA, 3569 bp, Homo sapiens; identical to SEQ ID NO: 3413
  source 1..3569: mol_type = unassigned DNA

SEQ ID NO: 3427 - DNA, 3059 bp, Homo sapiens; identical to SEQ ID NO: 3411
  source 1..3059: mol_type = unassigned DNA

SEQ ID NO: 3428 - DNA, 1244 bp, Homo sapiens
  source 1..1244: mol_type = unassigned DNA
atgtgtcctattatccaggctacatcaggaggttggacttcaatgcagtgcatttctagaaacagtttgttaaacataaaagagagcaagatcattctcgatcttcatcctcttcagcatcaccttcttctcccagttctcgagaagaaaaggagagtaagaaggaaagagaagaagaatttaaaactcaccatgaaatgaaagaatactcaggctttgcaggagttagccgaccacgaggaaccttttttcgaattagaggcagaggaagagccagaggagtttttgctgggacaaatactggtccaaacaactcaaatactacttttcaaaagagaccgaaggaagaggaatgggatccagaatataccccaaagagcaagaagtacttcttgcatgacgacagagatgatggtgtggattattgggccaaaagaggaagaggtcgtggtacttttcaacgtggcagagggcgctttaacttcaaaaaatcaggtagcagtcctaaatggactcatgacaaataccaaggggatgggattgttgaagatgaagaagagaccatggaaaataatgaagaaaagaaggacagacgcaaggaagaaaaggaataataaatatgaagtaagattacaacagagcagaacttgcacccaccattttttttacctgatttttgttttcaaataagaatgtaagcattttacttaaattttactgtttgcaagtagtctatagaaattttgttttaagtcttcaaatatcttgagaaatagtagactgtatgttgaaaattgtactgaaataaagtagaaaattgttacgtaccatatttgtaactatcaacttttaaaacttttaacgtttttgttacatgcattgtaattctgctttgtctataagatatggtcaagtacagctctgtgaaagttctgattctcttccttccctgtttgtcaatgttttattctgaagtaaacgttagctctacatataaatcctggaacagaaattgtttatagagactacactaattattttaactgtatacatctgtttaatttgaacacactacatcgtagggtgactgatttttgaagtataccacagacaaaaagttgttactatggtaaactaagctagtttaacacttgagcaaatgcttaagaaggaattaaaaaaaaaaagctttgccaatagctaaaaagtacaagctattaaaaatcagattgaaaagttttgag

SEQ ID NO: 3429 - DNA, 7110 bp, Homo sapiens
  source 1..7110: mol_type = unassigned DNA
gccccagatcggaagtgacggagacgtgctagcgcgtcgaaggtagctctatggttttcctcgcgttcttgagtcgggaaatggccgctgtgtggttgcaacggagataaattcccggaaccgcgattcggcgtgtcaggaattcgaatttagagtttaatttctcagagcattctctccaggaagaatttttacagtatctcaaagacttcacttgacttcttgatcctgcataaaaccaaggagaaaagaaatgggtcgctccaattctagatcacattcttcaaggtcaaagtctagatcacagtctagttctcgatcaagatcaagatctcattctagaaagaagcgatacaggtctcgttccagaacatattcaaggtctcgtagtagagatcgtatgtattctagagattatcgtcgcgattacagaaataatagaggaatgagacgaccttatgggtacagaggaaggggtagagggtattatcaaggaggaggaggtagatatcatcgaggtggttatagacctgtctggaatagaaggcactctaggagtcctagacgaggtcgttcacgttccaggagtccaaaaagaagatccgtttcttctcaaagatccagaagcagatctcgccggtcatatagatcttctaggtctccaagatcatcctcttctcgttcttcatccccatatagcaaatctcctgtttctaaaagacgagggtctcaggaaaaacaaaccaaaaaagctgaaggggaaccccaagaagagagtccgttgaaaagtaaatcacaggaggaaccgaaagatacatttgaacatgacccatctgagtctatcgatgaatttaataagtcatcagccacatccggtgatatttggcctggcctttcagcttatgataatagtcctagatcaccccatagtccttcacctattgctacaccacctagtcagagttcatcttgctctgatgctcccatgctcagtacagttcactctgcaaaaaatactccttctcagcattcacattccattcagcatagtcctgaaaggtctgggtctggttctgttggaaatggatctagtcgatacagtccttctcagaatagtccaattcatcacatcccttcacgaagaagtcctgcaaagacaatcgcaccacagaatgctccaagagatgagtctaggggccgttcctcgttttatcctgatggtggagatcaggaaactgcaaagactgggaagttcttaaaaaggttcacagatgaagagtctagagtattcctgcttgataggggtaataccagggataaagaggcttcaaaagagaaaggatcagagaaagggagggcagagggagaatgggaagatcaggaagctctagattacttcagtgataaagagtctggaaaacaaaagtttaatgattcagaaggggatgacacagaggagacagaggattatagacagttcaggaagtcagtcctcgcagatcagggtaaaagttttgctactgcatctcaccggaatactgaggaggaaggactcaagtacaagtccaaagtttcactgaaaggcaatagagaaagtgatggatttagagaagaaaaaaattataaacttaaagagactggatatgtagtggaaaggcctagcactacaaaagataagcacaaagaagaagacaaaaattctgaaagaataacagtaaagaaagaaactcagtcacctgagcaggtaaagtctgaaaagctcaaagacctctttgattacagtccccctctacacaagaatctggatgcacgagaaaagtctaccttcagagaggaaagcccacttaggatcaaaatgatagcgagtgattctcaccgtcctgaagtcaaactcaaaatggcacctgttcctcttgatgattctaacagacctgcttccttgactaaagacaggctgcttgctagtacacttgtccattctgtcaagaaggagcaagaattccgatccatctttgaccacattaagttgccacaggccagcaaaagcacttcagagtcatttattcaacacattgtgtccttggttcatcatgttaaagagcaatacttcaagtcagctgcaatgaccctaaacgagcggttcacttcgtatcagaaagccactgaagaacatagtactcggcaaaagagccctgaaatacacaggagaattgacatctcaccaagtaccctgaggaagcatacccgtttagcaggggaagagagagtttttaaagaagaaaatcaaaagggagataaaaaattaaggtgtgactctgctgaccttcggcatgacattgatcgccgtagaaaagaaagaagtaaagaacggggagattccaagggctccagggaatccagtggatcaagaaagcaggaaaaaactccaaaagattacaaggaatacaaatcttacaaagatgacagtaaacataaaagagagcaagatcattctcgatcttcatcctcttcagcatcaccttcttctcccagttctcgagaagaaaaggagagtaagaaggaaagagaagaagaatttaaaactcaccatgaaatgaaagaatactcaggctttgcaggagttagccgaccacgaggaacctttcatgacgacagagatgatggtgtggattattgggccaaaagaggaagaggtcgtggtacttttcaacgtggcagagggcgctttaacttcaaaaaatcaggtagcagtcctaaatggactcatgacaaataccaaggggatgggattgttgaagatgaagaagagaccatggaaaataatgaagaaaagaaggacagacgcaaggaagaaaaggaataataaatatgaagtaagattacaacagagcagaacttgcacccaccattttttttacctgatttttgttttcaaataagaatgtaagcattttacttaaattttactgtttgcaagtagtctatagaaattttgttttaagtcttcaaatatcttgagaaatagtagactgtatgttgaaaattgtactgaaataaagtagaaaattgttacgtaccatatttgtaactatcaacttttaaaacttttaacgtttttgttacatgcattgtaattctgctttgtctataagatatggtcaagtacagctctgtgaaagttctgattctcttccttccctgtttgtcaatgttttattctgaagtaaacgttagctctacatataaatcctggaacagaaattgtttatagagactacactaattattttaactgtatacatctgtttaatttgaacacactacatcgtagggtgactgatttttgaagtataccacagacaaaaagttgttactatggtaaactaagctagtttaacacttgagcaaatgcttaagaaggaattaaaaaaaaaaagctttgccaatagctaaaaagtacaagctattaaaaatcagattgaaaagttttgagaaaatgttatttttactgaaagcaagcagtggcctataaagaacattcttaggagccttttctatttgcgttcaaaactgtgtgttctctttctattcctatttgatagtttgagtcatggtcttagatattagctatttgtgagaggaaactggtttgtaacaatactgcaaatagaaaccccatttctactgaacatcctagttttaaacagaagaaaaactgtaatcctggggttggtatgtaggaggtctatcctgcagaataagttgatacattagtacctgatttcatatcttacatatttatttgagctgaacattagtttgtagtgtaactattagtaaaaatagagaaacacagcatactgttcattaatagtattttaaaaaaattgtttttcaaatgtcaccaataaaagttttggcaggaagcttgttgcggcattgatctaacctttttcccccccatttcagttgcagtttttgtagaatggctttttctttttcctcttaagagttctattcttcaggtagataatttttcaaatgtgaattatcttttgtgtctatattgatagctcttaaaggagtgaaaatctaaaatagtaaatttcaatgttaagtgtctgctttatgggcatatataaaagtagacacatttcatttgttaatttagttgtgtgtgtgtgttaaaaggagctaatgcttattctgttaatgtaaacttttgaagatcttaagtgtattgctctttcatcttaaacactttcgaggatttgcagtgcgtctagcacctagattacagccaggaacattggttaagaactgttggaaacaaaactaaaagcaaactcaacatatgtgatgtttatggccctcagatccttagtattgtgtgattttcccccgttaacatgtctttctaaaattgtctattaaagcagaggaaatacctgccaaaggaagtatgtattgcattaatcagggcataactaatattctcctgttcagaataatacttatttacgtgtgaaagcaacatggatgtgattcccaacacagaattttcatgacccttttattgtatacaaataaataccataacagttacttggttagacatcaaatctgtgtgcatgactatgtgcttatccacttaagacaataggtaaaaggggatctgagaaattatgtaatagggagtgggaataaaactacttaattcctgtgggcaggttatattttaagttcaaatgcattgctttaacctttggttacttttattctgttaaacagaattgaagaaagagtattataccagagtgtagtaggctagggtgattgtaagaactctgtaatagaatgtcattgtggatgttacctttttcagatccaagcatataaaaagcctgtatattttttaaaaacacatcttaactccacgctttacgatattataaaagttgaatggttcctcttggtaaggatatttgcttacaagtgctaggaaataactcactgatacctgcgttaacatactttgttttgcctagagaggggcaataaaaatgaaccaaaggatatttccagaaaggattaagaaagctgtttaagaaggccatgactctttaggtgtgtatgtgtacctttcagcatcctaggaatttttatactaaaagcaaaatgttttttccagttagtcttcttcaaggaattactattgttccttttgtcacaggtaaaatcagtgttgggaattataatttgagaaaaatattacccagtaacattgaatgtagatggctaaacgattcttactcagtgtgatgtataatgatgcaacagggacccttgtaaattgtcatacgccaataaaatgtcacaagtaataactgctgttgtttgtttacctgtgtctatttcacacatcttatttctgtggcctattttagaatatcagcgcatctgttaggaagattactggtgtggtaaggcttgataaatgctttataaactccctcaaacctttctttactgtttttttgttttgtcttgtttttgtttttgtttttgtttttgtttttgtttttgtttttcccttgtctcccctgggaaaatgggaaattttacagttggtaaatctaagccaaaattattttgaaataaaggaattctggatgtccagtttagtcctcgttttcttacgttaatctgggaccttatcacccataatatggtgattacttctctttctaaaaacatagtagctagtaaataagtaaaaagaattgtcttttcattcactttaagtaagatgtggtataattcttaccatgtgccatcctgtcagttttaacaaagcattttcacagaaatttgtgtactaagacaaactgacacattttgactcatacaaatggcaaattagtccttaaaaattctgtgagagaaataactctgtgtgtacatacatatgcatgtaaagtgttgtgtaagatcattggtagcttaattatactggataattgtaatgttatatacaaatttcttatataaaagtatgctgcattattaacatttgtttaacttttcttatttttctttttctgggtttcaactggaatcccattggtggggatgtaccttaagtttccttgtggaataatagactttcacatccagaaagagaagttcagaggcctttctcaatttacagagttgaagaggaaaggcaaatggaggaataaacttcattgtcattgggattaatttggctagactcaatctcttgagccttaaaatgagaaagtaatatccattacatgtttagagttctcaaatagttgatactattattaaatgtttcaaattttattggggtagatactaaaaattagtacactgtcctaatgaagtttaaatgaacaagttttacatttcttaggattcaggaatatatggaatctagttgtatttaattgacttgagagccacagagattgtgttgatttatgagctggactcctattgttttagaaacatgcagtaatgattaacttgtgtcaatgatggtaatgagaccaaacttgtacatttaattaagggtaccagttctttttatgttactagactataccttggcctttaaaaatgaatctcactgattaaagagaacaggcattattaggatagcattccaccacaactagaaacattcaaataatgtgtcttaattgtaatctgtatataggaaaatttttcctatggatatttttggtgttttaccacagtgaactgatttgtagcacttatgaagtgcagaaggtaatattcttgaaaatagaaaaaggttgggtgagcaggctttaatgcctttcccccaagaatatacatcgaatttttcttaatcttttggggttggccagcttccagatttcattaataatgagctctgcctttaataaaagtacatgatcatagctacactgtatgtttaggtggtgtgaaatgatttataatcacagcttgaactgtgtttgcttggtactgtcatagtgattacaaatttcatggaatgcgaagagcaacaataaataaaaaataccactcaccctc

SEQ ID NO: 3430 - DNA, 2610 bp, Homo sapiens
  source 1..2610: mol_type = unassigned DNA
atgggtcgctccaattctagatcacattcttcaaggtcaaagtctagatcacagtctagttctcgatcaagatcaagatctcattctagaaagaagcgatacaggtctcgttccagaacatattcaaggtctcgtagtagagatcgtatgtattctagagattatcgtcgcgattacagaaataatagaggaatgagacgaccttatgggtacagaggaaggggtagagggtattatcaaggaggaggaggtagatatcatcgaggtggttatagacctgtctggaatagaaggcactctaggagtcctagacgaggtcgttcacgttccaggagtccaaaaagaagatccgtttcttctcaaagatccagaagcagatctcgccggtcatatagatcttctaggtctccaagatcatcctcttctcgttcttcatccccatatagcaaatctcctgtttctaaaagacgagggtctcaggaaaaacaaaccaaaaaagctgaaggggaaccccaagaagagagtccgttgaaaagtaaatcacaggaggaaccgaaagatacatttgaacatgacccatctgagtctatcgatgaatttaataagtcatcagccacatccggtgatatttggcctggcctttcagcttatgataatagtcctagatcaccccatagtccttcacctattgctacaccacctagtcagagttcatcttgctctgatgctcccatgctcagtacagttcactctgcaaaaaatactccttctcagcattcacattccattcagcatagtcctgaaaggtctgggtctggttctgttggaaatggatctagtcgatacagtccttctcagaatagtccaattcatcacatcccttcacgaagaagtcctgcaaagacaatcgcaccacagaatgctccaagagatgagtctaggggccgttcctcgttttatcctgatggtggagatcaggaaactgcaaagactgggaagttcttaaaaaggttcacagatgaagagtctagagtattcctgcttgataggggtaataccagggataaagaggcttcaaaagagaaaggatcagagaaagggagggcagagggagaatgggaagatcaggaagctctagattacttcagtgataaagagtctggaaaacaaaagtttaatgattcagaaggggatgacacagaggagacagaggattatagacagttcaggaagtcagtcctcgcagatcagggtaaaagttttgctactgcatctcaccggaatactgaggaggaaggactcaagtacaagtccaaagtttcactgaaaggcaatagagaaagtgatggatttagagaagaaaaaaattataaacttaaagagactggatatgtagtggaaaggcctagcactacaaaagataagcacaaagaagaagacaaaaattctgaaagaataacagtaaagaaagaaactcagtcacctgagcaggtaaagtctgaaaagctcaaagacctctttgattacagtccccctctacacaagaatctggatgcacgagaaaagtctaccttcagagaggaaagcccacttaggatcaaaatgatagcgagtgattctcaccgtcctgaagtcaaactcaaaatggcacctgttcctcttgatgattctaacagacctgcttccttgactaaagacaggctgcttgctagtacacttgtccattctgtcaagaaggagcaagaattccgatccatctttgaccacattaagttgccacaggccagcaaaagcacttcagagtcatttattcaacacattgtgtccttggttcatcatgttaaagagcaatacttcaagtcagctgcaatgaccctaaacgagcggttcacttcgtatcagaaagccactgaagaacatagtactcggcaaaagagccctgaaatacacaggagaattgacatctcaccaagtaccctgaggaagcatacccgtttagcaggggaagagagagtttttaaagaagaaaatcaaaagggagataaaaaattaaggtgtgactctgctgaccttcggcatgacattgatcgccgtagaaaagaaagaagtaaagaacggggagattccaagggctccagggaatccagtggatcaagaaagcaggaaaaaactccaaaagattacaaggaatacaaatcttacaaagatgacagtaaacataaaagagagcaagatcattctcgatcttcatcctcttcagcatcaccttcttctcccagttctcgagaagaaaaggagagtaagaaggaaagagaagaagaatttaaaactcaccatgaaatgaaagaatactcaggctttgcaggagttagccgaccacgaggaacctttcatgacgacagagatgatggtgtggattattgggccaaaagaggaagaggtcgtggtacttttcaacgtggcagagggcgctttaacttcaaaaaatcaggtagcagtcctaaatggactcatgacaaataccaaggggatgggattgttgaagatgaagaagagaccatggaaaataatgaagaaaagaaggacagacgcaaggaagaaaaggaataa

SEQ ID NO: 3431 - DNA, 4373 bp, Homo sapiens
  source 1..4373: mol_type = unassigned DNA
ttcctcgcgttcttgagtcgggaaatggccgctgtgtggttgcaacggagataaattcccggaaccgcgattcggcgtgtcaggaattcgaatttagagtttaatttctcagagcattctctccaggaagaatttttacagtatctcaaagacttcacttgacttcttgatcctgcataaaaccaaggagaaaagaaatgggtcgctccaattctagatcacattcttcaaggtcaaagtctagatcacagtctagttctcgatcaagatcaagatctcattctagaaagaagcgatacaggtctcgttccagaacatattcaaggtctcgtagtagagatcgtatgtattctagagattatcgtcgcgattacagaaataatagaggaatgagacgaccttatgggtacagaggaaggggtagagggtattatcaaggaggaggaggtagatatcatcgaggtggttatagacctgtctggaatagaaggcactctaggagtcctagacgaggtcgttcacgttccaggagtccaaaaagaagatccgtttcttctcaaagatccagaagcagatctcgccggtcatatagatcttctaggtctccaagatcatcctcttctcgttcttcatccccatatagcaaatctcctgtttctaaaagacgagggtctcaggaaaaacaaaccaaaaaagctgaaggggaaccccaagaagagagtccgttgaaaagtaaatcacaggaggaaccgaaagatacatttgaacatgacccatctgagtctatcgatgaatttaataagtcatcagccacatccggtgatatttggcctggcctttcagcttatgataatagtcctagatcaccccatagtccttcacctattgctacaccacctagtcagagttcatcttgctctgatgctcccatgctcagtacagttcactctgcaaaaaatactccttctcagcattcacattccattcagcatagtcctgaaaggtctgggtctggttctgttggaaatggatctagtcgatacagtccttctcagaatagtccaattcatcacatcccttcacgaagaagtcctgcaaagacaatcgcaccacagaatgctccaagagatgagtctaggggccgttcctcgttttatcctgatggtggagatcaggaaactgcaaagactgggaagttcttaaaaaggttcacagatgaagagtctagagtattcctgcttgataggggtaataccagggataaagaggcttcaaaagagaaaggatcagagaaagggagggcagagggagaatgggaagatcaggaagctctagattacttcagtgataaagagtctggaaaacaaaagtttaatgattcagaaggggatgacacagaggagacagaggattatagacagttcaggaagtcagtcctcgcagatcagggtaaaagttttgctactgcatctcaccggaatactgaggaggaaggactcaagtacaagtccaaagtttcactgaaaggcaatagagaaagtgatggatttagagaagaaaaaaattataaacttaaagagactggatatgtagtggaaaggcctagcactacaaaagataagcacaaagaagaagacaaaaattctgaaagaataacagtaaagaaagaaactcagtcacctgagcaggtaaagtctgaaaagctcaaagacctctttgattacagtccccctctacacaagaatctggatgcacgagaaaagtctaccttcagagaggaaagcccacttaggatcaaaatgatagcgagtgattctcaccgtcctgaagtcaaactcaaaatggcacctgttcctcttgatgattctaacagacctgcttccttgactaaagacaggctgcttgctagtacacttgtccattctgtcaagaaggagcaagaattccgatccatctttgaccacattaagttgccacaggccagcaaaagcacttcagagtcatttattcaacacattgtgtccttggttcatcatgttaaagagcaatacttcaagtcagctgcaatgaccctaaacgagcggttcacttcgtatcagaaagccactgaagaacatagtactcggcaaaagagccctgaaatacacaggagaattgacatctcaccaagtaccctgaggaagcatacccgtttagcaggggaagagagagtttttaaagaagaaaatcaaaagggagataaaaaattaaggtgtgactctgctgaccttcggcatgacattgatcgccgtagaaaagaaagaagtaaagaacggggagattccaagggctccagggaatccagtggatcaagaaagcaggaaaaaactccaaaagattacaaggaatacaaatcttacaaagatgacagtaaacataaaagagagcaagatcattctcgatcttcatcctcttcagcatcaccttcttctcccagttctcgagaagaaaaggagagtaagaaggaaagagaagaagaatttaaaactcaccatgaaatgaaagaatactcaggctttgcaggagttagccgaccacgaggaaccttttttcgaattagaggcagaggaagagccagaggagtttttgctgggacaaatactggtccaaacaactcaaatactacttttcaaaagagaccgaaggaagaggaatgggatccagaatataccccaaagagcaagaagtacttcttgcatgacgacagagatgatggtgtggattattgggccaaaagaggaagaggtcgtggtacttttcaacgtggcagagggcgctttaacttcaaaaaatcaggtagcagtcctaaatggactcatgacaaataccaaggggatgggattgttgaagatgaagaagagaccatggaaaataatgaagaaaagaaggacagacgcaaggaagaaaaggaataataaatatgaagtaagattacaacagagcagaacttgcacccaccattttttttacctgatttttgttttcaaataagaatgtaagcattttacttaaattttactgtttgcaagtagtctatagaaattttgttttaagtcttcaaatatcttgagaaatagtagactgtatgttgaaaattgtactgaaataaagtagaaaattgttacgtaccatatttgtaactatcaacttttaaaacttttaacgtttttgttacatgcattgtaattctgctttgtctataagatatggtcaagtacagctctgtgaaagttctgattctcttccttccctgtttgtcaatgttttattctgaagtaaacgttagctctacatataaatcctggaacagaaattgtttatagagactacactaattattttaactgtatacatctgtttaatttgaacacactacatcgtagggtgactgatttttgaagtataccacagacaaaaagttgttactatggtaaactaagctagtttaacacttgagcaaatgcttaagaaggaattaaaaaaaaaaagctttgccaatagctaaaaagtacaagctattaaaaatcagattgaaaagttttgagaaaatgttatttttactgaaagcaagcagtggcctataaagaacattcttaggagccttttctatttgcgttcaaaactgtgtgttctctttctattcctatttgatagtttgagtcatggtcttagatattagctatttgtgagaggaaactggtttgtaacaatactgcaaatagaaaccccatttctactgaacatcctagttttaaacagaagaaaaactgtaatcctggggttggtatgtaggaggtctatcctgcagaataagttgatacattagtacctgatttcatatcttacatatttatttgagctgaacattagtttgtagtgtaactattagtaaaaatagagaaacacagcatactgttcattaatagtattttaaaaaaattgtttttcaaatgtcaccaataaaagttttggcaggaagcttgttgcggcattgatctaacctttttcccccccatttcagttgcagtttttgtagaatggctttttctttttcctcttaagagttctattcttcaggtagataatttttcaaatgtgaattatcttttgtgtctatattgatagctcttaaaggagtgaaaatctaaaatagtaaatttcaatgttaagtgtctgctttatgggcatatataaaagtagacacatttcatttgttaatttagttgtgtgtgtgtgttaaaaggagctaatgcttattctgttaatgtaaacttttgaagatcttaagtgtattgctctttcatcttaaacactttcgaggatttgcagtgcgt

SEQ ID NO: 3432 - DNA, 4186 bp, Homo sapiens
  source 1..4186: mol_type = unassigned DNA
gagtcgggaaatggccgctgtgtggttgcaacggagataaattcccggaaccgcgattcggcgtgtcaggaattcgaatttagagtttaatttctcagagcattctctccaggaagaatttttacagtatctcaaagacttcacttgacttcttgatcctgcataaaaccaaggagaaaagaaatgggtcgctccaattctagatcacattcttcaaggtcaaagtctagatcacagtctagttctcgatcaagatcaagatctcattctagaaagaagcgatacagttctaggtctcgttccagaacatattcaaggtctcgtagtagagatcgtatgtattctagagattatcgtcgcgattacagaaataatagaggaatgagacgaccttatgggtacagaggaaggggtagagggtattatcaaggaggaggaggtagatatcatcgaggtggttatagacctgtctggaatagaaggcactctaggagtcctagacgaggtcgttcacgttccaggagtccaaaaagaagatccgtttcttctcaaagatccagaagcagatctcgccggtcatatagatcttctaggtctccaagatcatcctcttctcgttcttcatccccatatagcaaatctcctgtttctaaaagacgagggtctcaggaaaaacaaaccaaaaaagctgaaggggaaccccaagaagagagtccgttgaaaagtaaatcacaggaggaaccgaaagatacatttgaacatgacccatctgagtctatcgatgaatttaataagtcatcagccacatccggtgatatttggcctggcctttcagcttatgataatagtcctagatcaccccatagtccttcacctattgctacaccacctagtcagagttcatcttgctctgatgctcccatgctcagtacagttcactctgcaaaaaatactccttctcagcattcacattccattcagcatagtcctgaaaggtctgggtctggttctgttggaaatggatctagtcgatacagtccttctcagaatagtccaattcatcacatcccttcacgaagaagtcctgcaaagacaatcgcaccacagaatgctccaagagatgagtctaggggccgttcctcgttttatcctgatggtggagatcaggaaactgcaaagactgggaagttcttaaaaagtccccctctacacaagaatctggatgcacgagaaaagtctaccttcagagaggaaagcccacttaggatcaaaatgatagcgagtgattctcaccgtcctgaagtcaaactcaaaatggcacctgttcctcttgatgattctaacagacctgcttccttgactaaagacaggctgcttgctagtacacttgtccattctgtcaagaaggagcaagaattccgatccatctttgaccacattaagttgccacaggccagcaaaagcacttcagagtcatttattcaacacattgtgtccttggttcatcatgttaaagagcaatacttcaagtcagctgcaatgaccctaaacgagcggttcacttcgtatcagaaagccactgaagaacatagtactcggcaaaagagccctgaaatacacaggagaattgacatctcaccaagtaccctgaggaagcatacccgtttagcaggggaagagagagtttttaaagaagaaaatcaaaagggagataaaaaattaaggtgtgactctgctgaccttcggcatgacattgatcgccgtagaaaagaaagaagtaaagaacggggagattccaagggctccagggaatccagtggatcaagaaagcaggaaaaaactccaaaagattacaaggaatacaaatcttacaaagatgacagtaaacataaaagagagcaagatcattctcgatcttcatcctcttcagcatcaccttcttctcccagttctcgagaagaaaaggagagtaagaaggaaagagaagaagaatttaaaactcaccatgaaatgaaagaatactcaggctttgcaggagttagccgaccacgaggaaccttttttcgaattagaggcagaggaagagccagaggagtttttgctgggacaaatactggtccaaacaactcaaatactacttttcaaaagagaccgaaggaagaggaatgggatccagaatataccccaaagagcaagaagtacttcttgcatgacgacagagatgatggtgtggattattgggccaaaagaggaagaggtcgtggtacttttcaacgtggcagagggcgctttaacttcaaaaaatcaggtagcagtcctaaatggactcatgacaaataccaaggggatgggattgttgaagatgaagaagagaccatggaaaataatgaagaaaagaaggacagacgcaaggaagaaaaggaataataaatatgaagtaagattacaacagagcagaacttgcacccaccattttttttacctgatttttgttttcaaataagaatgtaagcattttacttaaattttactgtttgcaagtagtctatagaaattttgttttaagtcttcaaatatcttgagaaatagtagactgtatgttgaaaattgtactgaaataaagtagaaaattgttacgtaccatatttgtaactatcaacttttaaaacttttaacgtttttgttacatgcattgtaattctgctttgtctataagatatggtcaagtacagctctgtgaaagttctgattctcttccttccctgtttgtcaatgttttattctgaagtaaacgttagctctacatataaatcctggaacagaaattgtttatagagactacactaattattttaactgtatacatctgtttaatttgaacacactacatcgtagggtgactgatttttgaagtataccacagacaaaaagttgttactatggtaaactaagctagtttaacacttgagcaaatgcttaagaaggaattaaaaaaaaaaagctttgccaatagctaaaaagtacaagctattaaaaatcagattgaaaagttttgagaaaatgttatttttactgaaagcaagcagtggcctataaagaacattcttaggagccttttctatttgcgttcaaaactgtgtgttctctttctattcctatttgatagtttgagtcatggtcttagatattagctatttgtgagaggaaactggtttgtaacaatactgcaaatagaaaccccatttctactgaacatcctagttttaaacagaagaaaaactgtaatcctggggttggtatgtaggaggtctatcctgcagaataagttgatacattagtacctgatttcatatcttacatatttatttgagctgaacattagtttgtagtgtaactattagtaaaaatagagaaacacagcatactgttcattaatagtattttaaaaaaattgtttttcaaatgtcaccaataaaagttttggcaggaagcttgttgcggcattgatctaacctttttcccccccatttcagttgcagtttttgtagaatggctttttctttttcctcttaagagttctattcttcaggtagataatttttcaaatgtgaattatcttttgtgtctatattgatagctcttaaaggagtgaaaatctaaaatagtaaatttcaatgttaagtgtctgctttatgggcatatataaaagtagacacatttcatttgttaatttagttgtgtgtgtgtgttaaaaggagctaatgcttattctgttaatgtaaacttttgaagatcttaagtgtattgctctttcatcttaaacactttcgaggatttgcagtgcgtctagcacctagattacagccaggaacattggttaagaactgttggaaacaaaactaaaagcaaactcaacatatgtgatgtttatggccctcagatccttagtattgtgtgattttcccccgttaacatgtctttctaaaattgtctattaaagcagaggaaatacctgccaaaggaagtatgtattgcattaatcagggcataactaatattctcctgttcagaataatacttatttacgtgtgaaagcaacatggatgtgattcccaacacagaattttcatgacccttttattgtatacaaataaataccataacagttacttggttagacatcaaa

SEQ ID NO: 3433 - DNA, 7263 bp, Homo sapiens
  source 1..7263: mol_type = unassigned DNA
gccccagatcggaagtgacggagacgtgctagcgcgtcgaaggtagctctatggttttcctcgcgttcttgagtcgggaaatggccgctgtgtggttgcaacggagataaattcccggaaccgcgattcggcgtgtcaggaattcgaatttagagtttaatttctcagagcattctctccaggaagaatttttacagtatctcaaagacttcacttgacttcttgatcctgcataaaaccaaggagaaaagaaatgggtcgctccaattctagatcacattcttcaaggtcaaagtctagatcacagtctagttctcgatcaagatcaagatctcattctagaaagaagcgatacagttctaggtctcgttccagaacatattcaaggtctcgtagtagagatcgtatgtattctagagattatcgtcgcgattacagaaataatagaggaatgagacgaccttatgggtacagaggaaggggtagagggtattatcaaggaggaggaggtagatatcatcgaggtggttatagacctgtctggaatagaaggcactctaggagtcctagacgaggtcgttcacgttccaggagtccaaaaagaagatccgtttcttctcaaagatccagaagcagatctcgccggtcatatagatcttctaggtctccaagatcatcctcttctcgttcttcatccccatatagcaaatctcctgtttctaaaagacgagggtctcaggaaaaacaaaccaaaaaagctgaaggggaaccccaagaagagagtccgttgaaaagtaaatcacaggaggaaccgaaagatacatttgaacatgacccatctgagtctatcgatgaatttaataagtcatcagccacatccggtgatatttggcctggcctttcagcttatgataatagtcctagatcaccccatagtccttcacctattgctacaccacctagtcagagttcatcttgctctgatgctcccatgctcagtacagttcactctgcaaaaaatactccttctcagcattcacattccattcagcatagtcctgaaaggtctgggtctggttctgttggaaatggatctagtcgatacagtccttctcagaatagtccaattcatcacatcccttcacgaagaagtcctgcaaagacaatcgcaccacagaatgctccaagagatgagtctaggggccgttcctcgttttatcctgatggtggagatcaggaaactgcaaagactgggaagttcttaaaaaggttcacagatgaagagtctagagtattcctgcttgataggggtaataccagggataaagaggcttcaaaagagaaaggatcagagaaagggagggcagagggagaatgggaagatcaggaagctctagattacttcagtgataaagagtctggaaaacaaaagtttaatgattcagaaggggatgacacagaggagacagaggattatagacagttcaggaagtcagtcctcgcagatcagggtaaaagttttgctactgcatctcaccggaatactgaggaggaaggactcaagtacaagtccaaagtttcactgaaaggcaatagagaaagtgatggatttagagaagaaaaaaattataaacttaaagagactggatatgtagtggaaaggcctagcactacaaaagataagcacaaagaagaagacaaaaattctgaaagaataacagtaaagaaagaaactcagtcacctgagcaggtaaagtctgaaaagctcaaagacctctttgattacagtccccctctacacaagaatctggatgcacgagaaaagtctaccttcagagaggaaagcccacttaggatcaaaatgatagcgagtgattctcaccgtcctgaagtcaaactcaaaatggcacctgttcctcttgatgattctaacagacctgcttccttgactaaagacaggctgcttgctagtacacttgtccattctgtcaagaaggagcaagaattccgatccatctttgaccacattaagttgccacaggccagcaaaagcacttcagagtcatttattcaacacattgtgtccttggttcatcatgttaaagagcaatacttcaagtcagctgcaatgaccctaaacgagcggttcacttcgtatcagaaagccactgaagaacatagtactcggcaaaagagccctgaaatacacaggagaattgacatctcaccaagtaccctgaggaagcatacccgtttagcaggggaagagagagtttttaaagaagaaaatcaaaagggagataaaaaattaaggtgtgactctgctgaccttcggcatgacattgatcgccgtagaaaagaaagaagtaaagaacggggagattccaagggctccagggaatccagtggatcaagaaagcaggaaaaaactccaaaagattacaaggaatacaaatcttacaaagatgacagtaaacataaaagagagcaagatcattctcgatcttcatcctcttcagcatcaccttcttctcccagttctcgagaagaaaaggagagtaagaaggaaagagaagaagaatttaaaactcaccatgaaatgaaagaatactcaggctttgcaggagttagccgaccacgaggaaccttttttcgaattagaggcagaggaagagccagaggagtttttgctgggacaaatactggtccaaacaactcaaatactacttttcaaaagagaccgaaggaagaggaatgggatccagaatataccccaaagagcaagaagtacttcttgcatgacgacagagatgatggtgtggattattgggccaaaagaggaagaggtcgtggtacttttcaacgtggcagagggcgctttaacttcaaaaaatcaggtagcagtcctaaatggactcatgacaaataccaaggggatgggattgttgaagatgaagaagagaccatggaaaataatgaagaaaagaaggacagacgcaaggaagaaaaggaataataaatatgaagtaagattacaacagagcagaacttgcacccaccattttttttacctgatttttgttttcaaataagaatgtaagcattttacttaaattttactgtttgcaagtagtctatagaaattttgttttaagtcttcaaatatcttgagaaatagtagactgtatgttgaaaattgtactgaaataaagtagaaaattgttacgtaccatatttgtaactatcaacttttaaaacttttaacgtttttgttacatgcattgtaattctgctttgtctataagatatggtcaagtacagctctgtgaaagttctgattctcttccttccctgtttgtcaatgttttattctgaagtaaacgttagctctacatataaatcctggaacagaaattgtttatagagactacactaattattttaactgtatacatctgtttaatttgaacacactacatcgtagggtgactgatttttgaagtataccacagacaaaaagttgttactatggtaaactaagctagtttaacacttgagcaaatgcttaagaaggaattaaaaaaaaaaagctttgccaatagctaaaaagtacaagctattaaaaatcagattgaaaagttttgagaaaatgttatttttactgaaagcaagcagtggcctataaagaacattcttaggagccttttctatttgcgttcaaaactgtgtgttctctttctattcctatttgatagtttgagtcatggtcttagatattagctatttgtgagaggaaactggtttgtaacaatactgcaaatagaaaccccatttctactgaacatcctagttttaaacagaagaaaaactgtaatcctggggttggtatgtaggaggtctatcctgcagaataagttgatacattagtacctgatttcatatcttacatatttatttgagctgaacattagtttgtagtgtaactattagtaaaaatagagaaacacagcatactgttcattaatagtattttaaaaaaattgtttttcaaatgtcaccaataaaagttttggcaggaagcttgttgcggcattgatctaacctttttcccccccatttcagttgcagtttttgtagaatggctttttctttttcctcttaagagttctattcttcaggtagataatttttcaaatgtgaattatcttttgtgtctatattgatagctcttaaaggagtgaaaatctaaaatagtaaatttcaatgttaagtgtctgctttatgggcatatataaaagtagacacatttcatttgttaatttagttgtgtgtgtgtgttaaaaggagctaatgcttattctgttaatgtaaacttttgaagatcttaagtgtattgctctttcatcttaaacactttcgaggatttgcagtgcgtctagcacctagattacagccaggaacattggttaagaactgttggaaacaaaactaaaagcaaactcaacatatgtgatgtttatggccctcagatccttagtattgtgtgattttcccccgttaacatgtctttctaaaattgtctattaaagcagaggaaatacctgccaaaggaagtatgtattgcattaatcagggcataactaatattctcctgttcagaataatacttatttacgtgtgaaagcaacatggatgtgattcccaacacagaattttcatgacccttttattgtatacaaataaataccataacagttacttggttagacatcaaatctgtgtgcatgactatgtgcttatccacttaagacaataggtaaaaggggatctgagaaattatgtaatagggagtgggaataaaactacttaattcctgtgggcaggttatattttaagttcaaatgcattgctttaacctttggttacttttattctgttaaacagaattgaagaaagagtattataccagagtgtagtaggctagggtgattgtaagaactctgtaatagaatgtcattgtggatgttacctttttcagatccaagcatataaaaagcctgtatattttttaaaaacacatcttaactccacgctttacgatattataaaagttgaatggttcctcttggtaaggatatttgcttacaagtgctaggaaataactcactgatacctgcgttaacatactttgttttgcctagagaggggcaataaaaatgaaccaaaggatatttccagaaaggattaagaaagctgtttaagaaggccatgactctttaggtgtgtatgtgtacctttcagcatcctaggaatttttatactaaaagcaaaatgttttttccagttagtcttcttcaaggaattactattgttccttttgtcacaggtaaaatcagtgttgggaattataatttgagaaaaatattacccagtaacattgaatgtagatggctaaacgattcttactcagtgtgatgtataatgatgcaacagggacccttgtaaattgtcatacgccaataaaatgtcacaagtaataactgctgttgtttgtttacctgtgtctatttcacacatcttatttctgtggcctattttagaatatcagcgcatctgttaggaagattactggtgtggtaaggcttgataaatgctttataaactccctcaaacctttctttactgtttttttgttttgtcttgtttttgtttttgtttttgtttttgtttttgtttttgtttttcccttgtctcccctgggaaaatgggaaattttacagttggtaaatctaagccaaaattattttgaaataaaggaattctggatgtccagtttagtcctcgttttcttacgttaatctgggaccttatcacccataatatggtgattacttctctttctaaaaacatagtagctagtaaataagtaaaaagaattgtcttttcattcactttaagtaagatgtggtataattcttaccatgtgccatcctgtcagttttaacaaagcattttcacagaaatttgtgtactaagacaaactgacacattttgactcatacaaatggcaaattagtccttaaaaattctgtgagagaaataactctgtgtgtacatacatatgcatgtaaagtgttgtgtaagatcattggtagcttaattatactggataattgtaatgttatatacaaatttcttatataaaagtatgctgcattattaacatttgtttaacttttcttatttttctttttctgggtttcaactggaatcccattggtggggatgtaccttaagtttccttgtggaataatagactttcacatccagaaagagaagttcagaggcctttctcaatttacagagttgaagaggaaaggcaaatggaggaataaacttcattgtcattgggattaatttggctagactcaatctcttgagccttaaaatgagaaagtaatatccattacatgtttagagttctcaaatagttgatactattattaaatgtttcaaattttattggggtagatactaaaaattagtacactgtcctaatgaagtttaaatgaacaagttttacatttcttaggattcaggaatatatggaatctagttgtatttaattgacttgagagccacagagattgtgttgatttatgagctggactcctattgttttagaaacatgcagtaatgattaacttgtgtcaatgatggtaatgagaccaaacttgtacatttaattaagggtaccagttctttttatgttactagactataccttggcctttaaaaatgaatctcactgattaaagagaacaggcattattaggatagcattccaccacaactagaaacattcaaataatgtgtcttaattgtaatctgtatataggaaaatttttcctatggatatttttggtgttttaccacagtgaactgatttgtagcacttatgaagtgcagaaggtaatattcttgaaaatagaaaaaggttgggtgagcaggctttaatgcctttcccccaagaatatacatcgaatttttcttaatcttttggggttggccagcttccagatttcattaataatgagctctgcctttaataaaagtacatgatcatagctacactgtatgtttaggtggtgtgaaatgatttataatcacagcttgaactgtgtttgcttggtactgtcatagtgattacaaatttcatggaatgcgaagagcaacaataaataaaaaataccactcaccctc

SEQ ID NO: 3434 - DNA, 1029 bp, Homo sapiens
  source 1..1029: mol_type = unassigned DNA
atgggacggcccgctgggctgttcccgcccctatgcccttttttgggtttccggccagaggcatgctgggagcgtcacatgcaaattgagcgtgcacccagcgttccgccctttctacgctgggccggttatcgacccggcccagtgcgcaggcgcgggaaagttgaactaataaagtttgtacgagttcagtggaggagaccgcaagttgagtggaggaggcggcggtggggccccggaccaggtgcctccatggcaggctctgaagagctggggctccgggaagacacgctgagggtcctagctgccttccttaggcgtggtgaggctgccgggtctcctgttccaactccacctaggcccagctactccagacttctatgctttggtggcccagcggctggaacagctggtccaagagcagctgaaatctccgcccagcccagaattacagggtcccccatcgacagagaaggaagccatactgcggaggctggtggccctgctggaggaggaggcagaagtcattaaccagaagctggcctcggaccccgccctgcgcagcaagctggtccgcctgtcctccgactctttcgcccgcctggtggagctgttctgtagccgggatgacagctctcgcccaagccgagcatgccccgggcccccgcctccttccccggagcccctggcccgcctggccctagccatggagctgagccggcgcgtggccgggctggggggcaccctggccggactcagcgtggagcacgtgcacagcttcacgccctggatccaggcccacgggggctgggagggcatcctggctgtttcacccgtggacttgaacttgccattggactgagctctttctcagaagctgctacaagatgacacctcatgtccctgccctcttcgtgtgcttttccaagtcttcctattccactcagggctgtggggtggtggttgccctacctgtttttgccaaaaataaattgtttaaaacttttcttattaaaaacgttacaaagt

SEQ ID NO: 3435 - DNA, 1854 bp, Homo sapiens
  source 1..1854: mol_type = unassigned DNA
aagtaagtatccccactttcagggtagcatcctctttccctagttatttcagtgcagaatcgattcacgtgtaagcctctacctcctgcacttaccccaatgtagacccccttccacagtccccctacagaagatctcccaaaacatttccaacacagaacttccattcaattcccctccgactgcccgcctccctcctccaggacagagcacgccccaggtttcgagactgaactacccccatctacggagtccacccctccctctctagaaccccctcagtgtagacgcctcctcttttcctctttcctccctactttttctagtttttctgcagccgacctccagcgtcggccactgtagctccttccttgctccactttccccagagtacacagcctgcctttccactctccgtgcagacccatcctctttcccgctcctcgctctcggacgccaccaacgctctcccgggctcttccgcgttacctacgatggaaggtcggggcgtgcgggcagctggaacccacccctgtcttggagctccgggtagctctcaaactcgaggctgcgcaccccctttcccgtcagctgagctctagagcgctggggctttctttttgatcgacttcttgaaataaaaccaactttatcattctttgggtaacagacccaaaagccgatgggacggcccgctgggctgttcccgcccctatgcccttttttgggtttccggccagaggcatgctgggagcgtcacatgcaaattgagcgtgcacccagcgttccgccctttctacgctgggccggttatcgacccggcccagtgcgcaggcgcgggaaagttgaactaataaagtttgtacgagttcagtggaggagaccgcaagttgagtggaggaggcggcggtggggccccggaccaggtgcctccatggcaggctctgaagagctggggctccgggaagacacgctgagggtcctagctgccttccttaggcgtggtgaggctgccgggtctcctgttccaactccacctagaagccctgcccaagaagagccaacagacttcctgagccgccttcgaagatgtcttccctgctccctggggcgaggagcagccccctctgagtcccctcggccttgctctctgcccatccgcccctgctatggtttagagcctggcccagctactccagacttctatgctttggtggcccagcggctggaacagctggtccaagagcagctgaaatctccgcccagcccagaattacagggtcccccatcgacagagaaggaagccatactgcggaggctggtggccctgctggaggaggaggcagaagtcattaaccagaagctggcctcggaccccgccctgcgcagcaagctggtccgcctgtcctccgactctttcgcccgcctggtggagctgttctgtagccgggatgacagctctcgcccaagccgagcatgccccgggcccccgcctccttccccggagcccctggcccgcctggccctagccatggagctgagccggcgcgtggccgggctggggggcaccctggccggactcagcgtggagcacgtgcacagcttcacgccctggatccaggcccacgggggctgggagggcatcctggctgtttcacccgtggacttgaacttgccattggactgagctctttctcagaagctgctacaagatgacacctcatgtccctgccctcttcgtgtgcttttccaagtcttcctattccactcagggctgtggggtggtggttgccctacctgtttttgccaaaaataaattgtttaaaacttttcttattaaaaacgttacaaagt

SEQ ID NO: 3436 - DNA, 1851 bp, Homo sapiens
  source 1..1851: mol_type = unassigned DNA
aagtaagtatccccactttcagggtagcatcctctttccctagttatttcagtgcagaatcgattcacgtgtaagcctctacctcctgcacttaccccaatgtagacccccttccacagtccccctacagaagatctcccaaaacatttccaacacagaacttccattcaattcccctccgactgcccgcctccctcctccaggacagagcacgccccaggtttcgagactgaactacccccatctacggagtccacccctccctctctagaaccccctcagtgtagacgcctcctcttttcctctttcctccctactttttctagtttttctgcagccgacctccagcgtcggccactgtagctccttccttgctccactttccccagagtacacagcctgcctttccactctccgtgcagacccatcctctttcccgctcctcgctctcggacgccaccaacgctctcccgggctcttccgcgttacctacgatggaaggtcggggcgtgcgggcagctggaacccacccctgtcttggagctccgggtagctctcaaactcgaggctgcgcaccccctttcccgtcagctgagctctagagcgctggggctttctttttgatcgacttcttgaaataaaaccaactttatcattctttgggtaacagacccaaaagccgatgggacggcccgctgggctgttcccgcccctatgcccttttttgggtttccggccagaggcatgctgggagcgtcacatgcaaattgagcgtgcacccagcgttccgccctttctacgctgggccggttatcgacccggcccagtgcgcaggcgcgggaaagttgaactaataaagtttgtacgagttcagtggaggagaccgcaagttgagtggaggaggcggcggtggggccccggaccaggtgcctccatggcaggctctgaagagctggggctccgggaagacacgctgagggtcctagctgccttccttaggcgtggtgaggctgccgggtctcctgttccaactccacctagccctgcccaagaagagccaacagacttcctgagccgccttcgaagatgtcttccctgctccctggggcgaggagcagccccctctgagtcccctcggccttgctctctgcccatccgcccctgctatggtttagagcctggcccagctactccagacttctatgctttggtggcccagcggctggaacagctggtccaagagcagctgaaatctccgcccagcccagaattacagggtcccccatcgacagagaaggaagccatactgcggaggctggtggccctgctggaggaggaggcagaagtcattaaccagaagctggcctcggaccccgccctgcgcagcaagctggtccgcctgtcctccgactctttcgcccgcctggtggagctgttctgtagccgggatgacagctctcgcccaagccgagcatgccccgggcccccgcctccttccccggagcccctggcccgcctggccctagccatggagctgagccggcgcgtggccgggctggggggcaccctggccggactcagcgtggagcacgtgcacagcttcacgccctggatccaggcccacgggggctgggagggcatcctggctgtttcacccgtggacttgaacttgccattggactgagctctttctcagaagctgctacaagatgacacctcatgtccctgccctcttcgtgtgcttttccaagtcttcctattccactcagggctgtggggtggtggttgccctacctgtttttgccaaaaataaattgtttaaaacttttcttattaaaaacgttacaaagt

SEQ ID NO: 3437 - DNA, 6390 bp, Homo sapiens
  source 1..6390: mol_type = unassigned DNA
ggtatttccgaagctggccaggccctctgctgctgaccctggaaatcgggtcacactagacaaggctgcatgtgcggggagaaggcgggggggctcctttgcacgcggctgctcgcgtttccccaaggcctccaaatagtctaaaaactcacctcggaggaggagaaagagcgtgaagtggctctttcgatctgagacaccccctcccggagaactcgccccctcccccccagcccagagcggagtgaaatcttagaagccgtggctgctgggtttgaacggaatgctggagtcagtggaagacggagctggtcggcccgaagactagacgcttgaagcaaagctgccatcccagaagacgacatgctctcagcaacccccctgtatgggaacgttcacagctggatgaacagcgagagggtccgcatgtgtggggcgagcgaagacaggaaaatccttgtaaatgatggtgacgcttcaaaagccagactggaactgagggaagagaatcccttgaaccacaacgtggtggatgcgagcacggcccataggatcgatggcctggcagcactgagcatggaccgcactggcctgatccgggaagggctgcgggtcccgggaaacatcgtctattctagcttgtgtggactgggctcagagaaaggtcgggaggctgccacaagcactctaggtggccttgggttttcttcggaaagaaatccagagatgcagttcaaaccgaatacacccgagacagtggaggcttctgccgtctctggaaaacccccaaatggcttcagtgctatatacaaaacaccgcctggaatacaaaaaagtgctgtagccacagcagaagcgctgggcttggacaggcctgccagcgacaaacagagccctctcaacatcaatggtgctagttatctgcggctgccctgggtcaatccttacatggagggtgccacgccagccatctaccctttcctcgactcgccaaataagtattcactgaacatgtacaaggccttgctacctcagcagtcctacagcttggcccagccgctgtattctccagtctgcaccaatggggagcgctttctctacctgccgccacctcactacgtcggtccccacatcccatcgtccttggcatcacccatgaggctctcgacaccttcggcctccccagccatcccgcctctcgtccattgcgcagacaaaagcctcccgtggaagatgggcgtcagccctgggaatcctgttgattcccacgcctatcctcacatccagaacagtaagcagcccagggttccctctgccaaggcggtcaccagtggcctgccgggggacacagctctcctgttgcccccctcgcctcggccgtcaccccgagtccaccttcccacccagcctgctgcagacacctactcggagttccacaagcactatgccaggatctccacctctccttcagttgccctgtcaaagccatacatgacagttagcagcgagttccccgcggccaggctctccaatggcaagtatcccaaggctccggaagggggcgaaggtgcccagccagtgcccgggcatgcccggaagacagcggttcaagacagaaaagatggcagctcacctcctctgttggagaagcagaccgttaccaaagacgtcacagataagccactagacttgtcttctaaagtggtggatgtagatgcttccaaagctgaccacatgaaaaagatggctcccacggtcctggttcacagcagggctggaagtggcttagtgctctccggaagtgagattccgaaagaaacactatctcctccaggaaatggttgtgctatctatagatctgaaatcatcagcactgctccctcatcctgggtggtgcccgggccaagtcctaacgaagagaacaatggcaaaagcatgtcgctgaaaaacaaggcattggactgggcgataccacagcagcggagttcatcatgcccgcgcatgggcggcaccgatgctgtcatcactaacgtttcagggtcagtgtcgagtgcaggccgcccagcctccgcatcacccgcccccaatgccaatgcagatggcaccaaaaccagcaggagctctgtagaaaccacaccatccgttattcagcacgtgggccagcccccggccactcctgccaagcacagtagcagcaccagcagcaagggcgccaaagccagcaacccagaaccgagtttcaaagcaaacgagaacggccttccaccaagctctatatttctgtctccaaatgaggcattcaggtccccaccaattccctaccccaggagttacctcccttacccagcccctgagggcattgctgtaagtcccctctccttacatggcaaaggacctgtctaccctcacccagttttgttacccaatggcagtctgtttcctgggcaccttgccccaaagcctgggctgccctatgggcttcccaccggccgtccagagtttgtgacctaccaagatgccctggggttgggcatggtgcatcccatgttgataccacacacgcccatagagattactaaagaggagaaaccagagaggagatcccggtcccatgagagagcccgttacgaggacccaaccctccggaatcggttttccgagattttggaaactagcagcaccaagttacatccagatgtccccaccgacaagaacctaaagccgaaccccaactggaatcaagggaagactgttgtcaaaagcgacaagcttgtctacgtagaccttctccgagaagaaccagatgctaaaactgacacaaacgtgtccaaacccagctttgcagcagagagtgttggccagagcgctgagccccccaagccctcagttgagccggccctgcagcagcaccgtgatttcatcgccctgagagaggagttggggcgcatcagtgacttccacgaaacttatactttcaaacagccagtcttcaccgtaagcaaggacagtgttctggcaggtaccaacaaagagaacctagggttgccagtctcgactccattcctggagccacctctggggagcgatggccctgctgtaacttttggtaaaacccaagaggatcccaaaccattttgtgtgggcagtgccccaccaagtgtggatgtgacccccacctataccaaagatggagctgatgaggctgaatcaaatgatggcaaagttctgaaaccgaagccatctaagctggcaaagagaatcgccaactcagcgggttacgtgggtgaccgattcaaatgtgtcactaccgaactgtatgcagattccagtcagctcagccgggagcaacgggcattgcagatggaaggattacaagaggacagtattttatgtctacccgctgcttactgtgagcgtgcaatgatgcgcttctcagagttggagatgaaagaaagagaaggtggccacccagcaaccaaagactccgagatgtgcaaattcagcccagccgactgggaaaggttgaaaggaaatcaggacaaaaagccaaagtcggtcaccctggaggaggccattgcagaacagaacgaaagtgagagatgcgagtatagtgttggaaacaagcaccgtgatccctttgaagccccagaggacaaagatcttcctgtggagaagtactttgtggagaggcagcctgtgagcgagcctcccgcagaccaggtggcctcggacatgcctcacagccccaccctccgggtggacaggaaacgcaaagtctcaggtgacagcagccacactgagaccactgcggaggaggtgccagaggaccctctgctgaaagccaaacgccgacgagtctctaaagggctccatcctaaaaaacaacgccacttgctgcaccttagagaacgatgggagcagcaggtgtcggcagcagatggcaaacctggccggcaaagcaggaaggaagtgacccaggccactcagcctgaggccattcctcaggggactaacatcactgaagagaaacctggcaggaaaagggcagaggccaaaggcaacagaagctggtcggaagagtctcttaaacccagtgacaatgaacaaggcttgcctgtgttctccggctctccgcccatgaagagtctttcatccaccagtgcaggcggcaaaaagcaggctcagccaagctgcgcaccagcctccaggccgcctgccaaacagcagaaaattaaagaaaaccagaagacagatgtgctgtgtgcagacgaagaagaggattgccaggctgcctccctgctgcagaaatacaccgacaacagcgagaagccatccgggaagagactgtgcaaaaccaaacacttgatccctcaggagtccaggcggggattgccactgacaggggaatactacgtggagaatgccgatggcaaggtgactgtccggagattcagaaagcggccggagcccagttcggactatgatctgtcaccagccaagcaggagccaaagcccttcgaccgcttgcagcaactgctaccagcctcccagtccacacagctgccatgctcaagttcccctcaggagaccacccagtctcgccctatgccgccggaagcacggagacttattgtcaataagaacgctggcgagacccttctgcagcgggcagccaggcttggctatgaggaagtggtcctgtactgcttagagaacaagatttgtgatgtaaatcatcgggacaacgcaggttactgcgccctgcatgaagcttgtgctaggggctggctcaacattgtgcgacacctccttgaatatggcgctgatgtcaactgtagtgcccaggatggaaccaggcctctgcacgatgctgttgagaacgatcacttggaaattgtccgactacttctctcttatggtgctgaccccaccttggctacgtactcaggtagaaccatcatgaaaatgacccacagtgaacttatggaaaagttcttaacagattatttaaatgacctccagggtcgcaatgatgatgacgccagtggcacttgggacttctatggcagctctgtttgtgaaccagatgatgaaagtggctatgatgttttagccaaccccccaggaccagaagaccaggatgatgatgacgatgcctatagcgatgtgtttgaatttgaattttcagagacccccctcttaccgtgttataacatccaagtatctgtggctcaggggccacgaaactggctactgctttcggatgtccttaagaaattgaaaatgtcctcccgcatatttcgctgcaattttccaaacgtggaaattgtcaccattgcagaggcagaattttatcggcaggtttctgcaagtctcttgttctcttgctccaaagacctggaagccttcaaccctgaaagtaaggagctgttagatctggtggaattcacgaacgaaattcagactctgctgggctcctctgtagagtggctccaccccagtgatctggcctcagacaactactggtgagcaagctggacccaccatgtacagtgtgttatagtgttaatccttgtgcatatgtgtcataatacaactatttctgtaaagaaaggacactattacatatgaaaatatctcttctttatataagagaaattactccagtcagaaggacttagaaacatgtttttttccttttaaacttttaagtcagtttttatgaagttgttataatgtttctttacttttcaatgcacacatgctttgggatacgtttgtttttacttggaacatttgtttcttttcttttttaaggagaaaaaaaaatgagtaaaaggagctccacactttgacttaatttcatacaaagctctgatgacaggccatgactgtagagtggtcagaactgtgtggttggtttgagggagcgaattcggggaaggcacttggtgatataactttgttttgtttacagagtacctgctcgggccaggtaaatgctattggatgtaatccagtagtgtgtaatataaattcaaaccatatccacacacaacaactaattgtatgaaacttttatatcctaatttaaaagctgtgaaattagttttcacgcatcaaaccggattgtttatatgtttaaacattttatgctcttatttaaagaagactttgagctatttttttctgtaccctgtaaaatattgaaaactaacataatatgttgaggttgcttggaaatgtacataaaactaaaattttctgaatcgtgtgtttatgtttgaaatctgtgttttaactttgtaagtaaattctctgcctttgtatttatattttacaaaaattttcttaaaaggcaataaaactgttgaggaaaggagaaaattg

SEQ ID NO: 3438 - DNA, 6358 bp, Homo sapiens
  source 1..6358: mol_type = unassigned DNA
gctcgccgcgcttctccggcccggctccttctccgctcgttaacgtcgccaaccccccccacccctcatatctctctccacccacccaaccgccccccgctccttctcgccgcctcgagtccgcttgggggaaaacttcaaagagccggatcgcaggctccctgcctactcccccaccggggatttcagactagacgcttgaagcaaagctgccatcccagaagacgacatgctctcagcaacccccctgtatgggaacgttcacagctggatgaacagcgagagggtccgcatgtgtggggcgagcgaagacaggaaaatccttgtaaatgatggtgacgcttcaaaagccagactggaactgagggaagagaatcccttgaaccacaacgtggtggatgcgagcacggcccataggatcgatggcctggcagcactgagcatggaccgcactggcctgatccgggaagggctgcgggtcccgggaaacatcgtctattctagcttgtgtggactgggctcagagaaaggtcgggaggctgccacaagcactctaggtggccttgggttttcttcggaaagaaatccagagatgcagttcaaaccgaatacacccgagacagtggaggcttctgccgtctctggaaaacccccaaatggcttcagtgctatatacaaaacaccgcctggaatacaaaaaagtgctgtagccacagcagaagcgctgggcttggacaggcctgccagcgacaaacagagccctctcaacatcaatggtgctagttatctgcggctgccctgggtcaatccttacatggagggtgccacgccagccatctaccctttcctcgactcgccaaataagtattcactgaacatgtacaaggccttgctacctcagcagtcctacagcttggcccagccgctgtattctccagtctgcaccaatggggagcgctttctctacctgccgccacctcactacgtcggtccccacatcccatcgtccttggcatcacccatgaggctctcgacaccttcggcctccccagccatcccgcctctcgtccattgcgcagacaaaagcctcccgtggaagatgggcgtcagccctgggaatcctgttgattcccacgcctatcctcacatccagaacagtaagcagcccagggttccctctgccaaggcggtcaccagtggcctgccgggggacacagctctcctgttgcccccctcgcctcggccgtcaccccgagtccaccttcccacccagcctgctgcagacacctactcggagttccacaagcactatgccaggatctccacctctccttcagttgccctgtcaaagccatacatgacagttagcagcgagttccccgcggccaggctctccaatggcaagtatcccaaggctccggaagggggcgaaggtgcccagccagtgcccgggcatgcccggaagacagcggttcaagacagaaaagatggcagctcacctcctctgttggagaagcagaccgttaccaaagacgtcacagataagccactagacttgtcttctaaagtggtggatgtagatgcttccaaagctgaccacatgaaaaagatggctcccacggtcctggttcacagcagggctggaagtggcttagtgctctccggaagtgagattccgaaagaaacactatctcctccaggaaatggttgtgctatctatagatctgaaatcatcagcactgctccctcatcctgggtggtgcccgggccaagtcctaacgaagagaacaatggcaaaagcatgtcgctgaaaaacaaggcattggactgggcgataccacagcagcggagttcatcatgcccgcgcatgggcggcaccgatgctgtcatcactaacgtttcagggtcagtgtcgagtgcaggccgcccagcctccgcatcacccgcccccaatgccaatgcagatggcaccaaaaccagcaggagctctgtagaaaccacaccatccgttattcagcacgtgggccagcccccggccactcctgccaagcacagtagcagcaccagcagcaagggcgccaaagccagcaacccagaaccgagtttcaaagcaaacgagaacggccttccaccaagctctatatttctgtctccaaatgaggcattcaggtccccaccaattccctaccccaggagttacctcccttacccagcccctgagggcattgctgtaagtcccctctccttacatggcaaaggacctgtctaccctcacccagttttgttacccaatggcagtctgtttcctgggcaccttgccccaaagcctgggctgccctatgggcttcccaccggccgtccagagtttgtgacctaccaagatgccctggggttgggcatggtgcatcccatgttgataccacacacgcccatagagattactaaagaggagaaaccagagaggagatcccggtcccatgagagagcccgttacgaggacccaaccctccggaatcggttttccgagattttggaaactagcagcaccaagttacatccagatgtccccaccgacaagaacctaaagccgaaccccaactggaatcaagggaagactgttgtcaaaagcgacaagcttgtctacgtagaccttctccgagaagaaccagatgctaaaactgacacaaacgtgtccaaacccagctttgcagcagagagtgttggccagagcgctgagccccccaagccctcagttgagccggccctgcagcagcaccgtgatttcatcgccctgagagaggagttggggcgcatcagtgacttccacgaaacttatactttcaaacagccagtcttcaccgtaagcaaggacagtgttctggcaggtaccaacaaagagaacctagggttgccagtctcgactccattcctggagccacctctggggagcgatggccctgctgtaacttttggtaaaacccaagaggatcccaaaccattttgtgtgggcagtgccccaccaagtgtggatgtgacccccacctataccaaagatggagctgatgaggctgaatcaaatgatggcaaagttctgaaaccgaagccatctaagctggcaaagagaatcgccaactcagcgggttacgtgggtgaccgattcaaatgtgtcactaccgaactgtatgcagattccagtcagctcagccgggagcaacgggcattgcagatggaaggattacaagaggacagtattttatgtctacccgctgcttactgtgagcgtgcaatgatgcgcttctcagagttggagatgaaagaaagagaaggtggccacccagcaaccaaagactccgagatgtgcaaattcagcccagccgactgggaaaggttgaaaggaaatcaggacaaaaagccaaagtcggtcaccctggaggaggccattgcagaacagaacgaaagtgagagatgcgagtatagtgttggaaacaagcaccgtgatccctttgaagccccagaggacaaagatcttcctgtggagaagtactttgtggagaggcagcctgtgagcgagcctcccgcagaccaggtggcctcggacatgcctcacagccccaccctccgggtggacaggaaacgcaaagtctcaggtgacagcagccacactgagaccactgcggaggaggtgccagaggaccctctgctgaaagccaaacgccgacgagtctctaaagatgactggcctgagagggaaatgacaaacagttcctctaaccacttagaagacccacattatagtgagctgaccaacctgaaggtgtgcattgaattaacagggctccatcctaaaaaacaacgccacttgctgcaccttagagaacgatgggagcagcaggtgtcggcagcagatggcaaacctggccggcaaagcaggaaggaagtgacccaggccactcagcctgaggccattcctcaggggactaacatcactgaagagaaacctggcaggaaaagggcagaggccaaaggcaacagaagctggtcggaagagtctcttaaacccagtgacaatgaacaaggcttgcctgtgttctccggctctccgcccatgaagagtctttcatccaccagtgcaggcggcaaaaagcaggctcagccaagctgcgcaccagcctccaggccgcctgccaaacagcagaaaattaaagaaaaccagaagacagatgtgctgtgtgcagacgaagaagaggattgccaggctgcctccctgctgcagaaatacaccgacaacagcgagaagccatccgggaagagactgtgcaaaaccaaacacttgatccctcaggagtccaggcggggattgccactgacaggggaatactacgtggagaatgccgatggcaaggtgactgtccggagattcagaaagcggccggagcccagttcggactatgatctgtcaccagccaagcaggagccaaagcccttcgaccgcttgcagcaactgctaccagcctcccagtccacacagctgccatgctcaagttcccctcaggagaccacccagtctcgccctatgccgccggaagcacggagacttattgtcaataagaacgctggcgagacccttctgcagcgggcagccaggcttggctatgaggaagtggtcctgtactgcttagagaacaagatttgtgatgtaaatcatcgggacaacgcaggttactgcgccctgcatgaagcttgtgctaggggctggctcaacattgtgcgacacctccttgaatatggcgctgatgtcaactgtagtgcccaggatggaaccaggcctctgcacgatgctgttgagaacgatcacttggaaattgtccgactacttctctcttatggtgctgaccccaccttggctacgtactcaggtagaaccatcatgaaaatgacccacagtgaacttatggaaaagttcttaacagattatttaaatgacctccagggtcgcaatgatgatgacgccagtggcacttgggacttctatggcagctctgtttgtgaaccagatgatgaaagtggctatgatgttttagccaaccccccaggaccagaagaccaggatgatgatgacgatgcctatagcgatgtgtttgaatttgaattttcagagacccccctcttaccgtgttataacatccaagtatctgtggctcaggggccacgaaactggctactgctttcggatgtccttaagaaattgaaaatgtcctcccgcatatttcgctgcaattttccaaacgtggaaattgtcaccattgcagaggcagaattttatcggcaggtttctgcaagtctcttgttctcttgctccaaagacctggaagccttcaaccctgaaagtaaggagctgttagatctggtggaattcacgaacgaaattcagactctgctgggctcctctgtagagtggctccaccccagtgatctggcctcagacaactactggtgagcaagctggacccaccatgtacagtgtgttatagtgttaatccttgtgcatatgtgtcataatacaactatttctgtaaagaaaggacactattacatatgaaaatatctcttctttatataagagaaattactccagtcagaaggacttagaaacatgtttttttccttttaaacttttaagtcagtttttatgaagttgttataatgtttctttacttttcaatgcacacatgctttgggatacgtttgtttttacttggaacatttgtttcttttcttttttaaggagaaaaaaaaatgagtaaaaggagctccacactttgacttaatttcatacaaagctctgatgacaggccatgactgtagagtggtcagaactgtgtggttggtttgagggagcgaattcggggaaggcacttggtgatataactttgttttgtttacagagtacctgctcgggccaggtaaatgctattggatgtaatccagtagtgtgtaatataaattcaaaccatatccacacacaacaactaattgtatgaaacttttatatcctaatttaaaagctgtgaaattagttttcacgcatcaaaccggattgtttatatgtttaaacattttatgctcttatttaaagaagactttgagctatttttttctgtaccctgtaaaatattgaaaactaacataatatgttgaggttgcttggaaatgtacataaaactaaaattttctgaatcgtgtgtttatgtttgaaatctgtgttttaactttgtaagtaaattctctgcctttgtatttatattttacaaaaattttcttaaaaggcaataaaactgttgaggaaaggagaaaattg

SEQ ID NO: 3439 - DNA, 6338 bp, Homo sapiens
  source 1..6338: mol_type = unassigned DNA
ggtatttccgaagctggccaggccctctgctgctgaccctggaaatcgggtcacactagacaaggctgcatgtgcggggagaaggcgggggggctcctttgcacgcggctgctcgcgtttccccaaggcctccaaatagtctaaaaactcacctcggaggaggagaaagagcgtgaagtggctctttcgatctgagacaccccctcccggagaactcgccccctcccccccagcccagagcggagtgaaatcttagaagccgtggctgctgggtttgaacggaatgctggagtcagtggaagacggagctggtcggcccgaagactagacgcttgaagcaaagctgccatcccagaagacgacatgctctcagcaacccccctgtatgggaacgttcacagctggatgaacagcgagagggtccgcatgtgtggggcgagcgaagacaggaaaatccttgtaaatgatggtgacgcttcaaaagccagactggaactgagggaagagaatcccttgaaccacaacgtggtggatgcgagcacggcccataggatcgatggcctggcagcactgagcatggaccgcactggcctgatccgggaagggctgcgggtcccgggaaacatcgtctattctagcttgtgtggactgggctcagagaaaggtcgggaggctgccacaagcactctaggtggccttgggttttcttcggaaagaaatccagagatgcagttcaaaccgaatacacccgagacagtggaggcttctgccgtctctggaaaacccccaaatggcttcagtgctatatacaaaacaccgcctggaatacaaaaaagtgctgtagccacagcagaagcgctgggcttggacaggcctgccagcgacaaacagagccctctcaacatcaatggtgctagttatctgcggctgccctgggtcaatccttacatggagggtgccacgccagccatctaccctttcctcgactcgccaaataagtattcactgaacatgtacaaggccttgctacctcagcagtcctacagcttggcccagccgctgtattctccagtctgcaccaatggggagcgctttctctacctgccgccacctcactacgtcggtccccacatcccatcgtccttggcatcacccatgaggctctcgacaccttcggcctccccagccatcccgcctctcgtccattgcgcagacaaaagcctcccgtggaagatgggcgtcagccctgggaatcctgttgattcccacgcctatcctcacatccagaacagtaagcagcccagggttccctctgccaaggcggtcaccagtggcctgccgggggacacagctctcctgttgcccccctcgcctcggccgtcaccccgagtccaccttcccacccagcctgctgcagacacctactcggagttccacaagcactatgccaggatctccacctctccttcagttgccctgtcaaagccatacatgacagttagcagcgagttccccgcggccaggctctccaatggcaagtatcccaaggctccggaagggggcgaaggtgcccagccagtgcccgggcatgcccggaagacagcggttcaagacagaaaagatggcagctcacctcctctgttggagaagcagaccgttaccaaagacgtcacagataagccactagacttgtcttctaaagtggtggatgtagatgcttccaaagctgaccacatgaaaaagatggctcccacggtcctggttcacagcagggctggaagtggcttagtgctctccggaagtgagattccgaaagaaacactatctcctccaggaaatggttgtgctatctatagatctgaaatcatcagcactgctccctcatcctgggtggtgcccgggccaagtcctaacgaagagaacaatggcaaaagcatgtcgctgaaaaacaaggcattggactgggcgataccacagcagcggagttcatcatgcccgcgcatgggcggcaccgatgctgtcatcactaacgtttcagggtcagtgtcgagtgcaggccgcccagcctccgcatcacccgcccccaatgccaatgcagatggcaccaaaaccagcaggagctctgtagaaaccacaccatccgttattcagcacgtgggccagcccccggccactcctgccaagcacagtagcagcaccagcagcaagggcgccaaagccagcaacccagaaccgagtttcaaagcaaacgagaacggccttccaccaagctctatatttctgtctccaaatgaggcattcaggtccccaccaattccctaccccaggagttacctcccttacccagcccctgagggcattgctgtaagtcccctctccttacatggcaaaggacctgtctaccctcacccagttttgttacccaatggcagtctgtttcctgggcaccttgccccaaagcctgggctgccctatgggcttcccaccggccgtccagagtttgtgacctaccaagatgccctggggttgggcatggtgcatcccatgttgataccacacacgcccatagagattactaaagaggagaaaccagagaggagatcccggtcccatgagagagcccgttacgaggacccaaccctccggaatcggttttccgagattttggaaactagcagcaccaagttacatccagatgtccccaccgacaagaacctaaagccgaaccccaactggaatcaagggaagactgttgtcaaaagcgacaagcttgtctacgtagaccttctccgagaagaaccagatgctaaaactgacacaaacgtgtccaaacccagctttgcagcagagagtgttggccagagcgctgagccccccaagccctcagttgagccggccctgcagcagcaccgtgatttcatcgccctgagagaggagttggggcgcatcagtgacttccacgaaacttatactttcaaacagccagtcttcaccgtaagcaaggacagtgttctggcaggtaccaacaaagagaacctagggttgccagtctcgactccattcctggagccacctctggggagcgatggccctgctgtaacttttggtaaaacccaagaggatcccaaaccattttgtgtgggcagtgccccaccaagtgtggatgtgacccccacctataccaaagatggagctgatgaggctgaatcaaatgatggcaaagttctgaaaccgaagccatctaagctggcaaagagaatcgccaactcagcgggttacgtgggtgaccgattcaaatgtgtcactaccgaactgtatgcagattccagtcagctcagccgggagcaacgggcattgcagcgtgcaatgatgcgcttctcagagttggagatgaaagaaagagaaggtggccacccagcaaccaaagactccgagatgtgcaaattcagcccagccgactgggaaaggttgaaaggaaatcaggacaaaaagccaaagtcggtcaccctggaggaggccattgcagaacagaacgaaagtgagagatgcgagtatagtgttggaaacaagcaccgtgatccctttgaagccccagaggacaaagatcttcctgtggagaagtactttgtggagaggcagcctgtgagcgagcctcccgcagaccaggtggcctcggacatgcctcacagccccaccctccgggtggacaggaaacgcaaagtctcaggtgacagcagccacactgagaccactgcggaggaggtgccagaggaccctctgctgaaagccaaacgccgacgagtctctaaagggctccatcctaaaaaacaacgccacttgctgcaccttagagaacgatgggagcagcaggtgtcggcagcagatggcaaacctggccggcaaagcaggaaggaagtgacccaggccactcagcctgaggccattcctcaggggactaacatcactgaagagaaacctggcaggaaaagggcagaggccaaaggcaacagaagctggtcggaagagtctcttaaacccagtgacaatgaacaaggcttgcctgtgttctccggctctccgcccatgaagagtctttcatccaccagtgcaggcggcaaaaagcaggctcagccaagctgcgcaccagcctccaggccgcctgccaaacagcagaaaattaaagaaaaccagaagacagatgtgctgtgtgcagacgaagaagaggattgccaggctgcctccctgctgcagaaatacaccgacaacagcgagaagccatccgggaagagactgtgcaaaaccaaacacttgatccctcaggagtccaggcggggattgccactgacaggggaatactacgtggagaatgccgatggcaaggtgactgtccggagattcagaaagcggccggagcccagttcggactatgatctgtcaccagccaagcaggagccaaagcccttcgaccgcttgcagcaactgctaccagcctcccagtccacacagctgccatgctcaagttcccctcaggagaccacccagtctcgccctatgccgccggaagcacggagacttattgtcaataagaacgctggcgagacccttctgcagcgggcagccaggcttggctatgaggaagtggtcctgtactgcttagagaacaagatttgtgatgtaaatcatcgggacaacgcaggttactgcgccctgcatgaagcttgtgctaggggctggctcaacattgtgcgacacctccttgaatatggcgctgatgtcaactgtagtgcccaggatggaaccaggcctctgcacgatgctgttgagaacgatcacttggaaattgtccgactacttctctcttatggtgctgaccccaccttggctacgtactcaggtagaaccatcatgaaaatgacccacagtgaacttatggaaaagttcttaacagattatttaaatgacctccagggtcgcaatgatgatgacgccagtggcacttgggacttctatggcagctctgtttgtgaaccagatgatgaaagtggctatgatgttttagccaaccccccaggaccagaagaccaggatgatgatgacgatgcctatagcgatgtgtttgaatttgaattttcagagacccccctcttaccgtgttataacatccaagtatctgtggctcaggggccacgaaactggctactgctttcggatgtccttaagaaattgaaaatgtcctcccgcatatttcgctgcaattttccaaacgtggaaattgtcaccattgcagaggcagaattttatcggcaggtttctgcaagtctcttgttctcttgctccaaagacctggaagccttcaaccctgaaagtaaggagctgttagatctggtggaattcacgaacgaaattcagactctgctgggctcctctgtagagtggctccaccccagtgatctggcctcagacaactactggtgagcaagctggacccaccatgtacagtgtgttatagtgttaatccttgtgcatatgtgtcataatacaactatttctgtaaagaaaggacactattacatatgaaaatatctcttctttatataagagaaattactccagtcagaaggacttagaaacatgtttttttccttttaaacttttaagtcagtttttatgaagttgttataatgtttctttacttttcaatgcacacatgctttgggatacgtttgtttttacttggaacatttgtttcttttcttttttaaggagaaaaaaaaatgagtaaaaggagctccacactttgacttaatttcatacaaagctctgatgacaggccatgactgtagagtggtcagaactgtgtggttggtttgagggagcgaattcggggaaggcacttggtgatataactttgttttgtttacagagtacctgctcgggccaggtaaatgctattggatgtaatccagtagtgtgtaatataaattcaaaccatatccacacacaacaactaattgtatgaaacttttatatcctaatttaaaagctgtgaaattagttttcacgcatcaaaccggattgtttatatgtttaaacattttatgctcttatttaaagaagactttgagctatttttttctgtaccctgtaaaatattgaaaactaacataatatgttgaggttgcttggaaatgtacataaaactaaaattttctgaatcgtgtgtttatgtttgaaatctgtgttttaactttgtaagtaaattctctgcctttgtatttatattttacaaaaattttcttaaaaggcaataaaactgttgaggaaaggagaaaattgaa

SEQ ID NO: 3440 - DNA, 2230 bp, Homo sapiens
  source 1..2230: mol_type = unassigned DNA
atgtatgtgctgtgccttataggaccatgatgcaaggagaaagtggtagacggtgtaggactcagccatgttcacatctgcctagatctcatgaccaaaggcacatggcattccactcacagaagggctgcgagtatagtgttggaaacaagcaccgtgatccctttgaagccccagaggacaaagatcttcctgtggagaagtactttgtggagaggcagcctgtgagcgagcctcccgcagaccaggtggcctcggacatgcctcacagccccaccctccgggtggacaggaaacgcaaagtctcaggtgacagcagccacactgagaccactgcggaggaggtgccagaggaccctctgctgaaagccaaacgccgacgagtctctaaagggctccatcctaaaaaacaacgccacttgctgcaccttagagaacgatgggagcagcaggtgtcggcagcagatggcaaacctggccggcaaagcaggaaggaagtgacccaggccactcagcctgaggccattcctcaggggactaacatcactgaagagaaacctggcaggaaaagggcagaggccaaaggcaacagaagctggtcggaagagtctcttaaacccagtgacaatgaacaaggcttgcctgtgttctccggctctccgcccatgaagagtctttcatccaccagtgcaggcggcaaaaagcaggctcagccaagctgcgcaccagcctccaggccgcctgccaaacagcagaaaattaaagaaaaccagaagacagatgtgctgtgtgcagacgaagaagaggattgccaggctgcctccctgctgcagaaatacaccgacaacagcgagaagccatccgggaagagactgtgcaaaaccaaacacttgatccctcaggagtccaggcggggattgccactgacaggggaatactacgtggagaatgccgatggcaaggtgactgtccggagattcagaaagcggccggagcccagttcggactatgatctgtcaccagccaagcaggagccaaagcccttcgaccgcttgcagcaactgctaccagcctcccagtccacacagctgccatgctcaagttcccctcaggagaccacccagtctcgccctatgccgccggaagcacggagacttattgtcaataagaacgctggcgagacccttctgcagcgggcagccaggcttggctatgaggaagtggtcctgtactgcttagagaacaagatttgtgatgtaaatcatcgggacaacgcaggttactgcgccctgcatgaagcttgtgctaggggctggctcaacattgtgcgacacctccttgaatatggcgctgatgtcaactgtagtgcccaggatggaaccaggcctctgcacgatgctgttgagaacgatcacttggaaattgtccgactacttctctcttatggtgctgaccccaccttggctacgtactcaggtagaaccatcatgaaaatgacccacagtgaacttatggaaaagttcttaacagattatttaaatgacctccagggtcgcaatgatgatgacgccagtggcacttgggacttctatggcagctctgtttgtgaaccagatgatgaaagtggctatgatgttttagccaaccccccaggaccagaagaccaggatgatgatgacgatgcctatagcgatgtgtttgaatttgaattttcagagacccccctcttaccgtgttataacatccaagtatctgtggctcaggggccacgaaactggctactgctttcggatgtccttaagaaattgaaaatgtcctcccgcatatttcgctgcaattttccaaacgtggaaattgtcaccattgcagaggcagaattttatcggcaggtttctgcaagtctcttgttctcttgctccaaagacctggaagccttcaaccctgaaagtaaggagctgttagatctggtggaattcacgaacgaaattcagactctgctgggctcctctgtagagtggctccaccccagtgatctggcctcagacaactactggaagtcccctcaaatagctagggggagtgttgaagggaaaaaaacagacgacaagaccagtaaaacagacctgtagaaatgatttaagcagaagaggactggtgaagctgaactaccatcaaagctacgagagatcctacacacccagatttaaaaaataataaaaacttaagggca

SEQ ID NO: 3441 - DNA, 6258 bp, Homo sapiens
  source 1..6258: mol_type = unassigned DNA
gctcgccgcgcttctccggcccggctccttctccgctcgttaacgtcgccaaccccccccacccctcatatctctctccacccacccaaccgccccccgctccttctcgccgcctcgagtccgcttgggggaaaacttcaaagagccggatcgcaggctccctgcctactcccccaccggggatttcagactagacgcttgaagcaaagctgccatcccagaagacgacatgctctcagcaacccccctgtatgggaacgttcacagctggatgaacagcgagagggtccgcatgtgtggggcgagcgaagacaggaaaatccttgtaaatgatggtgacgcttcaaaagccagactggaactgagggaagagaatcccttgaaccacaacgtggtggatgcgagcacggcccataggatcgatggcctggcagcactgagcatggaccgcactggcctgatccgggaagggctgcgggtcccgggaaacatcgtctattctagcttgtgtggactgggctcagagaaaggtcgggaggctgccacaagcactctaggtggccttgggttttcttcggaaagaaatccagagatgcagttcaaaccgaatacacccgagacagtggaggcttctgccgtctctggaaaacccccaaatggcttcagtgctatatacaaaacaccgcctggaatacaaaaaagtgctgtagccacagcagaagcgctgggcttggacaggcctgccagcgacaaacagagccctctcaacatcaatggtgctagttatctgcggctgccctgggtcaatccttacatggagggtgccacgccagccatctaccctttcctcgactcgccaaataagtattcactgaacatgtacaaggccttgctacctcagcagtcctacagcttggcccagccgctgtattctccagtctgcaccaatggggagcgctttctctacctgccgccacctcactacgtcggtccccacatcccatcgtccttggcatcacccatgaggctctcgacaccttcggcctccccagccatcccgcctctcgtccattgcgcagacaaaagcctcccgtggaagatgggcgtcagccctgggaatcctgttgattcccacgcctatcctcacatccagaacagtaagcagcccagggttccctctgccaaggcggtcaccagtggcctgccgggggacacagctctcctgttgcccccctcgcctcggccgtcaccccgagtccaccttcccacccagcctgctgcagacacctactcggagttccacaagcactatgccaggatctccacctctccttcagttgccctgtcaaagccatacatgacagttagcagcgagttccccgcggccaggctctccaatggcaagtatcccaaggctccggaagggggcgaaggtgcccagccagtgcccgggcatgcccggaagacagcggttcaagacagaaaagatggcagctcacctcctctgttggagaagcagaccgttaccaaagacgtcacagataagccactagacttgtcttctaaagtggtggatgtagatgcttccaaagctgaccacatgaaaaagatggctcccacggtcctggttcacagcagggctggaagtggcttagtgctctccggaagtgagattccgaaagaaacactatctcctccaggaaatggttgtgctatctatagatctgaaatcatcagcactgctccctcatcctgggtggtgcccgggccaagtcctaacgaagagaacaatggcaaaagcatgtcgctgaaaaacaaggcattggactgggcgataccacagcagcggagttcatcatgcccgcgcatgggcggcaccgatgctgtcatcactaacgtttcagggtcagtgtcgagtgcaggccgcccagcctccgcatcacccgcccccaatgccaatgcagatggcaccaaaaccagcaggagctctgtagaaaccacaccatccgttattcagcacgtgggccagcccccggccactcctgccaagcacagtagcagcaccagcagcaagggcgccaaagccagcaacccagaaccgagtttcaaagcaaacgagaacggccttccaccaagctctatatttctgtctccaaatgaggcattcaggtccccaccaattccctaccccaggagttacctcccttacccagcccctgagggcattgctgtaagtcccctctccttacatggcaaaggacctgtctaccctcacccagttttgttacccaatggcagtctgtttcctgggcaccttgccccaaagcctgggctgccctatgggcttcccaccggccgtccagagtttgtgacctaccaagatgccctggggttgggcatggtgcatcccatgttgataccacacacgcccatagagattactaaagaggagaaaccagagaggagatcccggtcccatgagagagcccgttacgaggacccaaccctccggaatcggttttccgagattttggaaactagcagcaccaagttacatccagatgtccccaccgacaagaacctaaagccgaaccccaactggaatcaagggaagactgttgtcaaaagcgacaagcttgtctacgtagaccttctccgagaagaaccagatgctaaaactgacacaaacgtgtccaaacccagctttgcagcagagagtgttggccagagcgctgagccccccaagccctcagttgagccggccctgcagcagcaccgtgatttcatcgccctgagagaggagttggggcgcatcagtgacttccacgaaacttatactttcaaacagccagtcttcaccgtaagcaaggacagtgttctggcaggtaccaacaaagagaacctagggttgccagtctcgactccattcctggagccacctctggggagcgatggccctgctgtaacttttggtaaaacccaagaggatcccaaaccattttgtgtgggcagtgccccaccaagtgtggatgtgacccccacctataccaaagatggagctgatgaggctgaatcaaatgatggcaaagttctgaaaccgaagccatctaagctggcaaagagaatcgccaactcagcgggttacgtgggtgaccgattcaaatgtgtcactaccgaactgtatgcagattccagtcagctcagccgggagcaacgggcattgcagatggaaggattacaagaggacagtattttatgtctacccgctgcttactgtgagcgtgcaatgatgcgcttctcagagttggagatgaaagaaagagaaggtggccacccagcaaccaaagactccgagatgtgcaaattcagcccagccgactgggaaaggttgaaaggaaatcaggacaaaaagccaaagtcggtcaccctggaggaggccattgcagaacagaacgaaagtgagagatgcgagtatagtgttggaaacaagcaccgtgatccctttgaagccccagaggacaaagatcttcctgtggagaagtactttgtggagaggcagcctgtgagcgagcctcccgcagaccaggtggcctcggacatgcctcacagccccaccctccgggtggacaggaaacgcaaagtctcaggtgacagcagccacactgagaccactgcggaggaggtgccagaggaccctctgctgaaagccaaacgccgacgagtctctaaagggctccatcctaaaaaacaacgccacttgctgcaccttagagaacgatgggagcagcaggtgtcggcagcagatggcaaacctggccggcaaagcaggaaggaagtgacccaggccactcagcctgaggccattcctcaggggactaacatcactgaagagaaacctggcaggaaaagggcagaggccaaaggcaacagaagctggtcggaagagtctcttaaacccagtgacaatgaacaaggcttgcctgtgttctccggctctccgcccatgaagagtctttcatccaccagtgcaggcggcaaaaagcaggctcagccaagctgcgcaccagcctccaggccgcctgccaaacagcagaaaattaaagaaaaccagaagacagatgtgctgtgtgcagacgaagaagaggattgccaggctgcctccctgctgcagaaatacaccgacaacagcgagaagccatccgggaagagactgtgcaaaaccaaacacttgatccctcaggagtccaggcggggattgccactgacaggggaatactacgtggagaatgccgatggcaaggtgactgtccggagattcagaaagcggccggagcccagttcggactatgatctgtcaccagccaagcaggagccaaagcccttcgaccgcttgcagcaactgctaccagcctcccagtccacacagctgccatgctcaagttcccctcaggagaccacccagtctcgccctatgccgccggaagcacggagacttattgtcaataagaacgctggcgagacccttctgcagcgggcagccaggcttggctatgaggaagtggtcctgtactgcttagagaacaagatttgtgatgtaaatcatcgggacaacgcaggttactgcgccctgcatgaagcttgtgctaggggctggctcaacattgtgcgacacctccttgaatatggcgctgatgtcaactgtagtgcccaggatggaaccaggcctctgcacgatgctgttgagaacgatcacttggaaattgtccgactacttctctcttatggtgctgaccccaccttggctacgtactcaggtagaaccatcatgaaaatgacccacagtgaacttatggaaaagttcttaacagattatttaaatgacctccagggtcgcaatgatgatgacgccagtggcacttgggacttctatggcagctctgtttgtgaaccagatgatgaaagtggctatgatgttttagccaaccccccaggaccagaagaccaggatgatgatgacgatgcctatagcgatgtgtttgaatttgaattttcagagacccccctcttaccgtgttataacatccaagtatctgtggctcaggggccacgaaactggctactgctttcggatgtccttaagaaattgaaaatgtcctcccgcatatttcgctgcaattttccaaacgtggaaattgtcaccattgcagaggcagaattttatcggcaggtttctgcaagtctcttgttctcttgctccaaagacctggaagccttcaaccctgaaagtaaggagctgttagatctggtggaattcacgaacgaaattcagactctgctgggctcctctgtagagtggctccaccccagtgatctggcctcagacaactactggtgagcaagctggacccaccatgtacagtgtgttatagtgttaatccttgtgcatatgtgtcataatacaactatttctgtaaagaaaggacactattacatatgaaaatatctcttctttatataagagaaattactccagtcagaaggacttagaaacatgtttttttccttttaaacttttaagtcagtttttatgaagttgttataatgtttctttacttttcaatgcacacatgctttgggatacgtttgtttttacttggaacatttgtttcttttcttttttaaggagaaaaaaaaatgagtaaaaggagctccacactttgacttaatttcatacaaagctctgatgacaggccatgactgtagagtggtcagaactgtgtggttggtttgagggagcgaattcggggaaggcacttggtgatataactttgttttgtttacagagtacctgctcgggccaggtaaatgctattggatgtaatccagtagtgtgtaatataaattcaaaccatatccacacacaacaactaattgtatgaaacttttatatcctaatttaaaagctgtgaaattagttttcacgcatcaaaccggattgtttatatgtttaaacattttatgctcttatttaaagaagactttgagctatttttttctgtaccctgtaaaatattgaaaactaacataatatgttgaggttgcttggaaatgtacataaaactaaaattttctgaatcgtgtgtttatgtttgaaatctgtgttttaactttgtaagtaaattctctgcctttgtatttatattttacaaaaattttcttaaaaggcaataaaactgttgaggaaaggagaaaattgaa

SEQ ID NO: 3442 - DNA, 288 bp, Homo sapiens
  source 1..288: mol_type = unassigned DNA
tccattcatgcactgaagcgcgtgcagagctgctgatcgctgccattgttactcgcgggcggtgtgggagctgagcctccactctggcgagagataaatggcctctgacagcccctcctcgccaagagagctcctcggatttcaccgcgcggcggctctcagactagacgcttgaagcaaagctgccatcccagaagacgacatgctctcagcaacccccctgtatgggaacgttcacagctggatgaacagcgagagggtccgcatgtgtggggcgagcgaagacag

SEQ ID NO: 3443 - DNA, 2618 bp, Homo sapiens
  source 1..2618: mol_type = unassigned DNA
aagcaaagctgccatcccagaagacgacatgctctcagcaacccccctgtatgggaacgttcacagctggatgaacagcgagagggtccgcatgtgtggggcgagcgaagacaggtgaatgcgcccatctgggccgggcctgagtggagcccacgcccatgctgaagcccccctcaacttctcacagccaccgtgggcccaaaaggggtgggagagaaagagcttcccgcctagtaggccgctcttgatttacagttttaacaggcaacctggctcagtgaagcattgccgccctttaaaagattagcccctaaagcggcctttcagtgcactttcgtccttaatttattatttcatatttatgaaggagaattaatcccagtctatatactgctttaactctaaatgtcaggagtgtgggcccaggtggagcagcattctatgtgcttttaaaacaaatagtttgctcagtaataaatggggagagagccaccgttttccttcattgaagcccaggatctctcattgtcctctgctgcctgttcccagaggccactggcgcctgcttttggtcgtcagacagctctgttatgcttcctaatcagtaattttggagttgtggggtggaggcagctaagcagtagatgattgaagctgctcttcggggtaatgaggaaacttttcctctgccgcttgtcagcgatttttatcctggggatttggaagttggcaccaagcactttctttatcgatgctctctgataacaagtcccagggcagccgcagcagcctggcacagatgtgcagcttccttttcagcctggaacagctgacatttgtatgatactagtgtgtatccccctgtcattttgacaaaggcagtcaaatatggcttttttatcaccatggaaaccagtttcgtaggacatggtccctaactttgttttggaaaaagttttgaaagcctaccctcctgggtaacacggaagtggttgatgacacgaccagccttccagcccccggccactcctgccaagcacagtagcagcaccagcagcaagggcgccaaagccagcaacccagaaccgagtttcaaagcaaacgagaacggccttccaccaagctctatatttctgtctccaaatgaggcattcaggtccccaccaattccctaccccaggagttacctcccttacccagcccctgagggcattgctgtaagtcccctctccttacatggcaaaggacctgtctaccctcacccagttttgttacccaatggcagtctgtttcctgggcaccttgccccaaagcctgggctgccctatgggcttcccaccggccgtccagagtttgtgacctaccaagatgccctggggttgggcatggtgcatcccatgttgataccacacacgcccatagagattactaaagaggagaaaccagagaggagatcccggtcccatgagagagcccgttacgaggacccaaccctccggaatcggttttccgagattttggaaactagcagcaccaagttacatccagatgtccccaccgacaagaacctaaagccgaaccccaactggaatcaagggaagactgttgtcaaaagcgacaagcttgtctacgtagaccttctccgagaagaaccagatgctaaaactgacacaaacgtgtccaaacccagctttgcagcagagagtgttggccagagcgctgagccccccaagccctcagttgagccggccctgcagcagcaccgtgatttcatcgccctgagagaggagttggggcgcatcagtgacttccacgaaacttatactttcaaacagccagtcttcaccgtaagcaaggacagtgttctggcaggtaccaacaaagagaacctagggttgccagtctcgactccattcctggagccacctctggggagcgatggccctgctgtaacttttggtaaaacccaagaggatcccaaaccattttgtgtgggcagtgccccaccaagtgtggatgtgacccccacctataccaaagatggagctgatgaggctgaatcaaatgatggcaaagttctgaaaccgaagccatctaagctggcaaagagaatcgccaactcagcgggttacgtgggtgaccgattcaaatgtgtcactaccgaactgtatgcagattccagtcagctcagccgggagcaacgggcattgcaggtgagcccccccacctgaatttcagttactttaccagttgtcagttttttaatgtgtaaacaggattgggggagtatggtagggcagggcaccaggcagatttggtgaatgaagcttgtggtaatttgaatatatgcaatgtggccagtaagagaacgtgagtggtagcactgaggcgtgtctggatgctttaagttattctgtagattataagggaactccactcaattgctgataaccgatgttttaattattgtgaagggtatctaaagactgcatgacgtttacctatcaattgctttgatttctctgcctgtaagatagcaaatatacctagaagtgctgcttagaatgccttacttgatacctggtagagatgtgtagcagccgcatgtctgtgggatt

SEQ ID NO: 3444 - DNA, 6860 bp, Homo sapiens
  source 1..6860: mol_type = unassigned DNA
acacacacacaccgctctccccctcactctttcgctcgccgcggctgctgccagtgtgtggctctgtctctcctccgctttgctgagccctcccttcttcctctcagttcctagagtccgaccgccgccgccgccgagagagaggagaaggagggggagtggccacagcaggtcctatctggtggtgagtggctgtcatgatctctacagcaccgctctacagcggcgtgcacaactggaccagttctgaccggattcgcatgtgtggcatcaacgaggagagaagagcacctctttctgatgaggagtcaacgacaggcgactgccagcactttggatctcaggagttttgtgtcagcagcagtttttccaaggtggagctcacggcagttggaagtggcagcaatgcccggggggcagacccagatggcagtgctacagaaaaacttgggcacaagtcagaagacaagcctgacgatccccagccaaaaatggactacgctgggaacgtggcagaggctgagggcttcttggtgcccctgagcagcccaggagacgggctcaagcttcccgcatctgacagcgccgaggccagcaacagcagggccgactgctcctggactccactcaacacccaaatgagcaaacaggttgactgctcacccgccggagtaaaggctttggactctcggcaaggtgttggagagaagaatactttcattttggcaactctgggaactggagtccctgtggaggggaccctgcccctggttaccactaacttcagtcctctgccagcccctatctgtccccctgctcccggttcggcctctgtgccccactctgttccagatgcattccaggttcccctctccgtccctgccccagtcccccattcagggcttgttccagtccaagttgccacttcggttccagctccttcccctcccttagcacctgtcccggctctggctccagcgccaccgtcagtgcccacgctcatctctgactcgaaccccctttctgtttcggcctcagtcttggtgcctgtgccagcttctgctcccccttcaggcccggttcccttgtcggctccagctcctgccccgctttcagtcccagtttcagctcctcccttggctctcatccaggctcctgtgcccccttcagctccgaccttggttctcgctcccgtccccactccggttctggctcccatgccagcatccacgcctccagcggcccctgcccctccgtctgtgcccatgcccactccaaccccatcttccggcccaccttctacccccaccctcatccccgcctttgctcctacaccggtgcctgcacccaccccagcccccatctttactccagcccctacacccatgcctgctgccacgccagctgccattcccacctctgcacccatcccggcctccttcagtttgagtagagtgtgctttcctgcagctcaggcaccagctatgcaaaaagtccccctgtcctttcagccagggacagtgctgaccccgagccagccgctggtatatatcccgcctccaagctgtgggcagccactcagtgtggccacactgccaaccactctaggggtttcctccactcttacgctccctgtcctgccgtcctacctgcaggacaggtgtctcccaggcgtgctagcctcccccgagctccgttcttacccgtatgcattttctgtggcccggcctctgacttcggattccaagctggtatctctggaggtgaacaggctcccctgcacttccccatccggtagcaccaccacccagcctgcacccgatggggtccctgggcctttggcagatacctcccttgttactgcttctgccaaggtgcttccaactccacagcctctgctgccagcccccagtgggagctcagccccaccgcaccccgccaagatgcccagtggcaccgagcagcaaacagaagggacttccgttaccttctctcctcttaagtcaccgccacagctggaacgagagatggcctctccacctgagtgcagcgagatgccccttgatctgtcctccaagtccaaccgccagaagcttccattgccgaaccagcgcaagacaccccccatgcctgtgttgacccccgtgcacaccagcagcaaggccctcctctccacagtcctgtctaggtctcagcgcacaacccaggctgccggtggcaatgtcacctcctgcctgggctccacttcctcgccctttgtcatctttcccgagatcgtgaggaatggggacccgagcacctgggtgaagaactcaactgcactgatcagcaccattcctggcacctacgtgggagtggccaacccagtgcctgcatccctgctgctgaacaaagaccccaacctgggcctcaaccgtgacccccgccatctccccaagcaggagcccatctccatcattgatcaaggagagcctaagggcactggtgccacgtgtggcaaaaagggcagccaggctggtgctgagggacagccaagcacagtgaaacgatatactccagcccgcattgcccctgggctgccagggtgccaaaccaaggaactctctttgtggaaacccacggggccggcaaatatttatccccggtgttcagtcaatgggaaacctaccagcacccaggtcctgcctgttggctggtccccgtaccaccaggcgtctctgctttccattggcatttccagtgccgggcagctgacccccagtcagggggcgcccatcaggcccaccagcgttgtttcggagttttctggtgtgccatctctcagctccagcgaagccgtgcacggacttcctgaggggcaaccacggcctgggggctccttcgttccagagcaggaccctgttacaaagaacaaaacttgccggattgctgccaagccttatgaagaacaagtcaatcctgtcctcttgaccctcagccctcagactgggaccctggcactgtctgttcagcctagcggtggggacattcgaatgaatcaggggcctgaggaatcagagagccacctctgctctgacagcactcctaagatggaaggcccccagggggcttgtggcctgaagctggcaggagacacgaagcctaagaaccaagtgctggccacctacatgtcccatgagctggtcctggccaccccccagaacctgcctaagatgcctgagctgcctttgctacctcacgacagccaccccaaggaacttatattggacgtggttccgagcagcaggaggggctccagcacagagcgcccacagcttggaagccaggtggatctggggcgagtgaaaatggagaaggtggatggtgatgtggtcttcaatttagccacctgcttccgggctgatggcctcccagtggctccccagaggggccaagctgaagttcgggctaaggccgggcaggctcgagtgaaacaggaaagcgtaggggtctttgcttgcaagaacaagtggcagccagatgatgtgacggaatctctgccgcccaagaagatgaagtgcggcaaagagaaggacagtgaagagcagcagctccagccacaagccaaggccgtggtccggagttcccacagacccaagtgccggaagctgcccagtgacccccaggaatccaccaagaaaagccccaggggggcttcagattcaggaaaagagcacaatggagtcaggggaaagcacaagcaccggaagccgacaaagccggagtcccagtctccaggaaaacgagccgacagccacgaggaaggttccttggaaaagaaagcaaagagcagtttccgtgactttattcctgtggttctgagcacccgcacgcgcagtcagtctggaagcatctgtagctcctttgctggcatggcagacagtgacatgggaagccaggaagtcttccccacagaagaagaagaggaggtaacccccaccccagctaagcgtcgaaaggtgagaaagacccaacgggacacccagtatcgcagccaccatgcccaggacaagtctctgctgagccagggccgaaggcacctgtggcgagcccgagaaatgccctggaggacagaggctgcccggcaaatgtgggacaccaatgaggaggaggaggaagaagaggaggagggcctgctgaagaggaagaaacgaagacggcagaagagccgaaaatatcagactggggagtacctgacagagcaagaagacgagcagcggcggaaagggagagcagatttaaaggcccgtaagcagaagacttcctcctcccaaagtttggagcaccgcctcaggaacaggaaccttctcttgcccaacaaagtccaggggatctcggattcaccaaacggtttcctcccaaataacctggaagagccagcctgccttgaaaattcagaaaagccatcaggaaaacgaaagtgcaagaccaagcacatggcaaccgtctcagaagaggcaaaggatgttgttctctactgcctccagaaagacagtgaagatgtgaatcaccgtgacaatgctggctacacagccctgcatgaggcttgttcccggggctggaccgacatcctgaacatcctgctggagcacggggccaacgtgaactgcagtgcgcaggacggcacgaggccagttcatgatgcggtggtcaatgacaacctggagaccatctggctcctgctgtcctatggggccgatcccacactggctacctactcgggtcagacagccatgaagctggccagcagcgacaccatgaagcgctttctcagtgatcacctctcggatcttcagggccgggcagagggtgatcccggtgtatcctgggatttttacagcagttctgtgttggaggaaaaagacgggtttgcctgtgacctcctacataatcctcctgggagctcagatcaagaaggagacgatccgatggaggaggatgatttcatgtttgaactctcagacaagcctcttctcccttgctacaacctccaagtgtcagtgtcccgcgggccctgcaactggttcctcttttccgatgtcttgaagaggctgaagctttcctcgaggatctttcaggcccggttcccgcactttgaaatcaccaccatgcccaaggccgagttctacaggcaggtggcctccagtcagctgctgacccctgccgagaggcctggaggcttggacgacagatcccccccaggctcctctgagactgtggagctggtgcggtacgagccagacctacttcggctcctagggtccgaggtggaattccagtcttgcaacagttgaccgggaaaacagcccctcctcttctttctccttccgagttcgcccttcccccacctccttgtctttccccgaccgagcaccagactgcagaatgaggcaataatacggaccaacaagaagccgccttatcaatgccagcattagcgactggactgtttttgtttttttggttacaattagttctcatctccctgtcgtcgtcattgttatcgtggttgctgatgggggtggaaagttgaactccatgtctgaggacaagaggtcccgggggtggtgggaggtggcgccggggtcccttggactggcctccttgttcatgaccaagaccaaacctgggccctggatggccttggcctgtcccgaggagaaatgagaaaatcccagatctctgagcgccccccaactccattcccctgtgttcttctgtcttctgtagtatttattttattagtatttaatttgtattgtttcattggtttctgataagtctgtatcactgtgacgatttgagacaacttgttgtattgagggactttctgtacctccttttctttttctttgttgatgagctctgacaaagctattccctggtgtttttttcccccactggggagggggtgaggtggaatggggtgggggaacatggacttgtgactaacgaagctggttgctgctggcccagggctgggggcttgggggtaaatcctgaggctttggtgctcccccacccacccattcccgccctttgcagcagccccgctatcttgagattagtgttgacagggaggggaggattgtgaggtgaggggttaataagttactctaataaaggagcgtggagaagggatctgaggggtgagggtggcccccctcctcacgccttcttcactgcccccctcagagtgcacaatacgagtttgttcctgcctccactctcccaccccgttctggcctccctgtctcaagatactgagcctctcacctcccagccctcagccacccccatccctgccccttctgagactcacagcacccctttccttcctctcctcccacctcctccctcagcccctcattctccttgggaatctgcagagggctctgggactcactgccggatgtgaaatccaggcgtcagctgtttcctaggcaagggcaggaaagtggtctccagcccttgctccactcatgcctgggggcctggggctgagtggtatccctacctggcctccccctggcctctgggcctccagcgctgggtttgtcgagtgagagagagagaggagcttgggttgcttccctgtccccgccccctctgtggcattgtccctcccactcttatttttctaccaattgctatttttccgaacaatccttgtagagtatgtaccatccaaaggcaggagggcctcgccgtggccggctctggttggagatggtacagttttattgtacaggtgctaaaacaacaacaacaaaaaagaaaatggaaaaaaaaaagattaaaaaaaaaaggaaaaaaaaaaa

SEQ ID NO: 3445 - DNA, 6934 bp, Homo sapiens
  source 1..6934: mol_type = unassigned DNA
tgagccctcccttcttcctctcagttcctagagtccgaccgccgccgccgccgagagagaggagaaggagggggagtggccacagcaggtcctatctggtggtgagtggctgtcatgatctctacagcaccgctctacagcggcgtgcacaactggaccagttctgaccggattcgcatgtgtggcatcaacgaggagagaagagcacctctttctgatgaggagtcaacgacaggcgactgccagcactttggatctcaggagttttgtgtcagcagcagtttttccaaggtggagctcacggcagttggaagtggcagcaatgcccggggggcagacccagatggcagtgctacagaaaaacttgggcacaagtcagaagacaagcctgacgatccccagccaaaaatggactacgctgggaacgtggcagaggctgagggcttcttggtgcccctgagcagcccaggagacgggctcaagcttcccgcatctgacagcgccgaggccagcaacagcagggccgactgctcctggactccactcaacacccaaatgagcaaacaggttgactgctcacccgccggagtaaaggctttggactctcggcaaggtgttggagagaagaatactttcattttggcaactctgggaactggagtccctgtggaggggaccctgcccctggttaccactaacttcagtcctctgccagcccctatctgtccccctgctcccggttcggcctctgtgccccactctgttccagatgcattccaggttcccctctccgtccctgccccagtcccccattcagggcttgttccagtccaagttgccacttcggttccagctccttcccctcccttagcacctgtcccggctctggctccagcgccaccgtcagtgcccacgctcatctctgactcgaaccccctttctgtttcggcctcagtcttggtgcctgtgccagcttctgctcccccttcaggcccggttcccttgtcggctccagctcctgccccgctttcagtcccagtttcagctcctcccttggctctcatccaggctcctgtgcccccttcagctccgaccttggttctcgctcccgtccccactccggttctggctcccatgccagcatccacgcctccagcggcccctgcccctccgtctgtgcccatgcccactccaaccccatcttccggcccaccttctacccccaccctcatccccgcctttgctcctacaccggtgcctgcacccaccccagcccccatctttactccagcccctacacccatgcctgctgccacgccagctgccattcccacctctgcacccatcccggcctccttcagtttgagtagagtgtgctttcctgcagctcaggcaccagctatgcaaaaagtccccctgtcctttcagccagggacagtgctgaccccgagccagccgctggtatatatcccgcctccaagctgtgggcagccactcagtgtggccacactgccaaccactctaggggtttcctccactcttacgctccctgtcctgccgtcctacctgcaggacaggtgtctcccaggcgtgctagcctcccccgagctccgttcttacccgtatgcattttctgtggcccggcctctgacttcggattccaagctggtatctctggaggtgaacaggctcccctgcacttccccatccggtagcaccaccacccagcctgcacccgatggggtccctgggcctttggcagatacctcccttgttactgcttctgccaaggtgcttccaactccacagcctctgctgccagcccccagtgggagctcagccccaccgcaccccgccaagatgcccagtggcaccgagcagcaaacagaagggacttccgttaccttctctcctcttaagtcaccgccacagctggaacgagagatggcctctccacctgagtgcagcgagatgccccttgatctgtcctccaagtccaaccgccagaagcttccattgccgaaccagcgcaagacaccccccatgcctgtgttgacccccgtgcacaccagcagcaaggccctcctctccacagtcctgtctaggtctcagcgcacaacccaggctgccggtggcaatgtcacctcctgcctgggctccacttcctcgccctttgtcatctttcccgagatcgtgaggaatggggacccgagcacctgggtgaagaactcaactgcactgatcagcaccattcctggcacctacgtgggagtggccaacccagtgcctgcatccctgctgctgaacaaagaccccaacctgggcctcaaccgtgacccccgccatctccccaagcaggagcccatctccatcattgatcaaggagagcctaagggcactggtgccacgtgtggcaaaaagggcagccaggctggtgctgagggacagccaagcacagtgaaacgatatactccagcccgcattgcccctgggctgccagggtgccaaaccaaggaactctctttgtggaaacccacggggccggcaaatatttatccccggtgttcagtcaatgggaaacctaccagcacccaggtcctgcctgttggctggtccccgtaccaccaggcgtctctgctttccattggcatttccagtgccgggcagctgacccccagtcagggggcgcccatcaggcccaccagcgttgtttcggagttttctggtgtgccatctctcagctccagcgaagccgtgcacggacttcctgaggggcaaccacggcctgggggctccttcgttccagagcaggaccctgttacaaagaacaaaacttgccggattgctgccaagccttatgaagaacaagtcaatcctgtcctcttgaccctcagccctcagactgggaccctggcactgtctgttcagcctagcggtggggacattcgaatgaatcaggggcctgaggaatcagagagccacctctgctctgacagcactcctaagatggaaggcccccagggggcttgtggcctgaagctggcaggagacacgaagcctaagaaccaagtgctggccacctacatgtcccatgagctggtcctggccaccccccagaacctgcctaagatgcctgagctgcctttgctacctcacgacagccaccccaaggaacttatattggacgtggttccgagcagcaggaggggctccagcacagagcgcccacagcttggaagccaggtggatctggggcgagtgaaaatggagaaggtggatggtgatgtggtcttcaatttagccacctgcttccgggctgatggcctcccagtggctccccagaggggccaagctgaagttcgggctaaggccgggcaggctcgagtgaaacaggaaagcgtaggggtctttgcttgcaagaacaagtggcagccagatgatgtgacggaatctctgccgcccaagaagatgaagtgcggcaaagagaaggacagtgaagagcagcagctccagccacaagccaaggccgtggtccggagttcccacagacccaagtgccggaagctgcccagtgacccccaggaatccaccaagaaaagccccaggggggcttcagattcaggaaaagagcacaatggagtcaggggaaagcacaagcaccggaagccgacaaagccggagtcccagtctccaggaaaacgagccgacagccacgaggaaggttccttggaaaagaaagcaaagagcagtttccgtgactttattcctgtggttctgagcacccgcacgcgcagtcagtctggaagcatctgtagctcctttgctggcatggcagacagtgacatgggaagccaggaagtcttccccacagaagaagaagaggaggtaacccccaccccagctaagcgtcgaaaggtgagaaagacccaacgggacacccagtatcgcagccaccatgcccaggacaagtctctgctgagccagggccgaaggcacctgtggcgagcccgagaaatgccctggaggacagaggctgcccggcaaatgtgggacaccaatgaggaggaggaggaagaagaggaggagggcctgctgaagaggaagaaacgaagacggcagaagagccgaaaatatcagactggggagtacctgacagagcaagaagacgagcagcggcggaaagggagagcagatttaaaggcccgtaagcagaagacttcctcctcccaaagtttggagcaccgcctcaggaacaggaaccttctcttgcccaacaaagtccaggggatctcggattcaccaaacggtttcctcccaaataacctggaagagccagcctgccttgaaaattcagaaaagccatcaggaaaacgaaagtgcaagaccaagcacatggcaaccgtctcagaagaggcaaagggcaaaggtcgttggagccagcagaagacacgatctcccaaatctcccaccccagtgaaacccacagaaccatgtacaccctctaagtcccgaagtgccagctcagaggaggcctcagagtcacctacagcccggcagatccccccagaggcacgtcggctcatagtgaacaaaaatgctggtgagaccctcctgcagagggcggcgcgtcttggctataaggatgttgttctctactgcctccagaaagacagtgaagatgtgaatcaccgtgacaatgctggctacacagccctgcatgaggcttgttcccggggctggaccgacatcctgaacatcctgctggagcacggggccaacgtgaactgcagtgcgcaggacggcacgaggccagttcatgatgcggtggtcaatgacaacctggagaccatctggctcctgctgtcctatggggccgatcccacactggctacctactcgggtcagacagccatgaagctggccagcagcgacaccatgaagcgctttctcagtgatcacctctcggatcttcagggccgggcagagggtgatcccggtgtatcctgggatttttacagcagttctgtgttggaggaaaaagacgggtttgcctgtgacctcctacataatcctcctgggagctcagatcaagaaggagacgatccgatggaggaggatgatttcatgtttgaactctcagacaagcctcttctcccttgctacaacctccaagtgtcagtgtcccgcgggccctgcaactggttcctcttttccgatgtcttgaagaggctgaagctttcctcgaggatctttcaggcccggttcccgcactttgaaatcaccaccatgcccaaggccgagttctacaggcaggtggcctccagtcagctgctgacccctgccgagaggcctggaggcttggacgacagatcccccccaggctcctctgagactgtggagctggtgcggtacgagccagacctacttcggctcctagggtccgaggtggaattccagtcttgcaacagttgaccgggaaaacagcccctcctcttctttctccttccgagttcgcccttcccccacctccttgtctttccccgaccgagcaccagactgcagaatgaggcaataatacggaccaacaagaagccgccttatcaatgccagcattagcgactggactgtttttgtttttttggttacaattagttctcatctccctgtcgtcgtcattgttatcgtggttgctgatgggggtggaaagttgaactccatgtctgaggacaagaggtcccgggggtggtgggaggtggcgccggggtcccttggactggcctccttgttcatgaccaagaccaaacctgggccctggatggccttggcctgtcccgaggagaaatgagaaaatcccagatctctgagcgccccccaactccattcccctgtgttcttctgtcttctgtagtatttattttattagtatttaatttgtattgtttcattggtttctgataagtctgtatcactgtgacgatttgagacaacttgttgtattgagggactttctgtacctccttttctttttctttgttgatgagctctgacaaagctattccctggtgtttttttcccccactggggagggggtgaggtggaatggggtgggggaacatggacttgtgactaacgaagctggttgctgctggcccagggctgggggcttgggggtaaatcctgaggctttggtgctcccccacccacccattcccgccctttgcagcagccccgctatcttgagattagtgttgacagggaggggaggattgtgaggtgaggggttaataagttactctaataaaggagcgtggagaagggatctgaggggtgagggtggcccccctcctcacgccttcttcactgcccccctcagagtgcacaatacgagtttgttcctgcctccactctcccaccccgttctggcctccctgtctcaagatactgagcctctcacctcccagccctcagccacccccatccctgccccttctgagactcacagcacccctttccttcctctcctcccacctcctccctcagcccctcattctccttgggaatctgcagagggctctgggactcactgccggatgtgaaatccaggcgtcagctgtttcctaggcaagggcaggaaagtggtctccagcccttgctccactcatgcctgggggcctggggctgagtggtatccctacctggcctccccctggcctctgggcctccagcgctgggtttgtcgagtgagagagagagaggagcttgggttgcttccctgtccccgccccctctgtggcattgtccctcccactcttatttttctaccaattgctatttttccgaacaatccttgtagagtatgtaccatccaaaggcaggagggcctcgccgtggccggctctggttggagatggtacagttttattgtacaggtgct

SEQ ID NO: 3446 - DNA, 6322 bp, Homo sapiens
  source 1..6322: mol_type = unassigned DNA
tgagccctcccttcttcctctcagttcctagagtccgaccgccgccgccgccgagagagaggagaaggagggggagtggccacagcaggtcctatctggtggtgagtggctgtcatgatctctacagcaccgctctacagcggcgtgcacaactggaccagttctgaccggattcgcatgtgtggcatcaacgaggagagaagagcacctctttctgatgaggagtcaacgacaggcgactgccagcactttggatctcaggagttttgtgtcagcagcagtttttccaaggtggagctcacggcagttggaagtggcagcaatgcccggggggcagacccagatggcagtgctacagaaaaacttgggcacaagtcagaagacaagcctgacgatccccagccaaaaatggactacgctgggaacgtggcagaggctgagggcttcttggtgcccctgagcagcccaggagacgggctcaagcttcccgcatctgacagcgccgaggccagcaacagcagggccgactgctcctggactccactcaacacccaaatgagcaaacaggttgactgctcacccgccggagtaaaggctttggactctcggcaaggtgttggagagaagaatactttcattttggcaactctgggaactggagtccctgtggaggggaccctgcccctggttaccactaacttcagtcctctgccagcccctatctgtccccctgctcccggttcggcctctgtgccccactctgttccagatgcattccaggttcccctctccgtccctgccccagtcccccattcagggcttgttccagtccaagttgccacttcggttccagctccttcccctcccttagcacctgtcccggctctggctccagcgccaccgtcagtgcccacgctcatctctgactcgaaccccctttctgtttcggcctcagtcttggtgcctgtgccagcttctgctcccccttcaggcccggttcccttgtcggctccagctcctgccccgctttcagtcccagtttcagctcctcccttggctctcatccaggctcctgtgcccccttcagctccgaccttggttctcgctcccgtccccactccggttctggctcccatgccagcatccacgcctccagcggcccctgcccctccgtctgtgcccatgcccactccaaccccatcttccggcccaccttctacccccaccctcatccccgcctttgctcctacaccggtgcctgcacccaccccagcccccatctttactccagcccctacacccatgcctgctgccacgccagctgccattcccacctctgcacccatcccggcctccttcagtttgagtagagtgtgctttcctgcagctcaggcaccagctatgcaaaaagtccccctgtcctttcagccagggacagtgctgaccccgagccagccgctggtatatatcccgcctccaagctgtgggcagccactcagtgtggccacactgccaaccactctaggggtttcctccactcttacgctccctgtcctgccgtcctacctgcaggacaggtgtctcccaggcgtgctagcctcccccgagctccgttcttacccgtatgcattttctgtggcccggcctctgacttcggattccaagctggtatctctggaggtgaacaggctcccctgcacttccccatccggtagcaccaccacccagcctgcacccgatggggtccctgggcctttggcagatacctcccttgttactgcttctgccaaggtgcttccaactccacagcctctgctgccagcccccagtgggagctcagccccaccgcaccccgccaagatgcccagtggcaccgagcagcaaacagaagggacttccgttaccttctctcctcttaagtcaccgccacagctggaacgagagatggcctctccacctgagtgcagcgagatgccccttgatctgtcctccaagtccaaccgccagaagcttccattgccgaaccagcgcaagacaccccccatgcctgtgttgacccccgtgcacaccagcagcaaggccctcctctccacagtcctgtctaggtctcagcgcacaacccaggctgccggtggcaatgtcacctcctgcctgggctccacttcctcgccctttgtcatctttcccgagatcgtgaggaatggggacccgagcacctgggtgaagaactcaactgcactgatcagcaccattcctggcacctacgtgggagtggccaacccagtgcctgcatccctgctgctgaacaaagaccccaacctgggcctcaaccgtgacccccgccatctccccaagcaggagcccatctccatcattgatcaaggagagcctaagggcactggtgccacgtgtggcaaaaagggcagccaggctggtgctgagggacagccaagcacagtgaaacgatatactccagcccgcattgcccctgggctgccagggtgccaaaccaaggaactctctttgtggaaacccacggggccggcaaatatttatccccggtgttcagtcaatgggaaacctaccagcacccaggtcctgcctgttggctggtccccgtaccaccaggcgtctctgctttccattggcatttccagtgccgggcagctgacccccagtcagggggcgcccatcaggcccaccagcgttgtttcggagttttctggtgtgccatctctcagctccagcgaagccgtgcacggacttcctgaggggcaaccacggcctgggggctccttcgttccagagcaggaccctgttacaaagaacaaaacttgccggattgctgccaagccttatgaagaacaagtcaatcctgtcctcttgaccctcagccctcagactgggaccctggcactgtctgttcagcctagcggtggggacattcgaatgaatcaggggcctgaggaatcagagagccacctctgctctgacagcactcctaagatggaaggcccccagggggcttgtggcctgaagctggcaggagacacgaagcctaagaaccaagtgctggccacctacatgtcccatgagctggtcctggccaccccccagaacctgcctaagatgcctgagctgcctttgctacctcacgacagccaccccaaggaacttatattggacgtggttccgagcagcaggaggggctccagcacagagcgcccacagcttggaagccaggtggatctggggcgagtgaaaatggagaaggtggatggtgatgtggtcttcaatttagccacctgcttccgggctgatggcctcccagtggctccccagaggggccaagctgaagttcgggctaaggccgggcaggctcgagtgaaacaggaaagcgtaggggtctttgcttgcaagaacaagtggcagccagatgatgtgacggaatctctgccgcccaagaagatgaagtgcggcaaagagaaggacagtgaagagcagcagctccagccacaagccaaggccgtggtccggagttcccacagacccaagtgccggaagctgcccagtgacccccaggaatccaccaagaaaagccccaggggggcttcagattcaggaaaagagcacaatggagtcaggggaaagcacaagcaccggaagccgacaaagccggagtcccagtctccaggaaaacgagccgacagccacgaggaaggttccttggaaaagaaagcaaagagcagtttccgtgactttattcctgtggttctgagcacccgcacgcgcagtcagtctgatttaaaggcccgtaagcagaagacttcctcctcccaaagtttggagcaccgcctcaggaacaggaaccttctcttgcccaacaaagtccaggggatctcggattcaccaaacggtttcctcccaaataacctggaagagccagcctgccttgaaaattcagaaaagccatcaggaaaacgaaagtgcaagaccaagcacatggcaaccgtctcagaagaggcaaaggatgttgttctctactgcctccagaaagacagtgaagatgtgaatcaccgtgacaatgctggctacacagccctgcatgaggcttgttcccggggctggaccgacatcctgaacatcctgctggagcacggggccaacgtgaactgcagtgcgcaggacggcacgaggccagttcatgatgcggtggtcaatgacaacctggagaccatctggctcctgctgtcctatggggccgatcccacactggctacctactcgggtcagacagccatgaagctggccagcagcgacaccatgaagcgctttctcagtgatcacctctcggatcttcagggccgggcagagggtgatcccggtgtatcctgggatttttacagcagttctgtgttggaggaaaaagacgggtttgcctgtgacctcctacataatcctcctgggagctcagatcaagaaggagacgatccgatggaggaggatgatttcatgtttgaactctcagacaagcctcttctcccttgctacaacctccaagtgtcagtgtcccgcgggccctgcaactggttcctcttttccgatgtcttgaagaggctgaagctttcctcgaggatctttcaggcccggttcccgcactttgaaatcaccaccatgcccaaggccgagttctacaggcaggtggcctccagtcagctgctgacccctgccgagaggcctggaggcttggacgacagatcccccccaggctcctctgagactgtggagctggtgcggtacgagccagacctacttcggctcctagggtccgaggtggaattccagtcttgcaacagttgaccgggaaaacagcccctcctcttctttctccttccgagttcgcccttcccccacctccttgtctttccccgaccgagcaccagactgcagaatgaggcaataatacggaccaacaagaagccgccttatcaatgccagcattagcgactggactgtttttgtttttttggttacaattagttctcatctccctgtcgtcgtcattgttatcgtggttgctgatgggggtggaaagttgaactccatgtctgaggacaagaggtcccgggggtggtgggaggtggcgccggggtcccttggactggcctccttgttcatgaccaagaccaaacctgggccctggatggccttggcctgtcccgaggagaaatgagaaaatcccagatctctgagcgccccccaactccattcccctgtgttcttctgtcttctgtagtatttattttattagtatttaatttgtattgtttcattggtttctgataagtctgtatcactgtgacgatttgagacaacttgttgtattgagggactttctgtacctccttttctttttctttgttgatgagctctgacaaagctattccctggtgtttttttcccccactggggagggggtgaggtggaatggggtgggggaacatggacttgtgactaacgaagctggttgctgctggcccagggctgggggcttgggggtaaatcctgaggctttggtgctcccccacccacccattcccgccctttgcagcagccccgctatcttgagattagtgttgacagggaggggaggattgtgaggtgaggggttaataagttactctaataaaggagcgtggagaagggatctgaggggtgagggtggcccccctcctcacgccttcttcactgcccccctcagagtgcacaatacgagtttgttcctgcctccactctcccaccccgttctggcctccctgtctcaagatactgagcctctcacctcccagccctcagccacccccatccctgccccttctgagactcacagcacccctttccttcctctcctcccacctcctccctcagcccctcattctccttgggaatctgcagagggctctgggactcactgccggatgtgaaatccaggcgtcagctgtttcctaggcaagggcaggaaagtggtctccagcccttgctccactcatgcctgggggcctggggctgagtggtatccctacctggcctccccctggcctctgggcctccagcgctgggtttgtcgagtgagagagagagaggagcttgggttgcttccctgtccccgccccctctgtggcattgtccctcccactcttatttttctaccaattgctatttttccgaacaatccttgtagagtatgtaccatccaaaggcaggagggcctcgccgtggccggctctggttggagatggtacagttttattgtacaggtgct

SEQ ID NO: 3447 - DNA, 2221 bp, Homo sapiens
  source 1..2221: mol_type = unassigned DNA
gcctctgctgccagcccccagtgggagctcagccccaccgcaccccgccaagatgcccagtggcaccgagcagcaaacagaagggacttccgttaccttctctcctcttaagtcaccgccacagctggaacgagagatggcctctccacctgagtgcagcgagatgccccttgatctgtcctccaagtccaaccgccagaagcttccattgccgaaccagcgcaagacaccccccatgcctgtgttgacccccgtgcacaccagcagcaaggccctcctctccacagtcctgtctaggtctcagcgcacaacccaggctgccggtggcaatgtcacctcctgcctgggctccacttcctcgccctttgtcatctttcccgagatcgtgaggaatggggacccgagcacctgggtgaagaactcaactgcactgatcagcaccattcctggcacctacgtgggagtggccaacccagtgcctgcatccctgctgctgaacaaagaccccaacctgggcctcaaccgtgacccccgccatctccccaagcaggagcccatctccatcattgatcaaggagagcctaagggcactggtgccacgtgtggcaaaaagggcagccaggctggtgctgagggacagccaagcacagtgaaacgatatactccagcccgcattgcccctgggctgccagggtgccaaaccaaggaactctctttgtggaaacccacggggccggcaaatatttatccccggtgttcagtcaatgggaaacctaccagcacccaggtcctgcctgttggctggtccccgtaccaccaggcgtctctgctttccattggcatttccagtgccgggcagctgacccccagtcagggggcgcccatcaggcccaccagcgttgtttcggagttttctggtgtgccatctctcagctccagcgaagccgtgcacggacttcctgaggggcaaccacggcctgggggctccttcgttccagagcaggaccctgttacaaagaacaaaacttgccggattgctgccaagccttatgaagaacaagtcaatcctgtcctcttgaccctcagccctcagactgggaccctggcactgtctgttcagcctagcggtggggacattcgaatgaatcaggggcctgaggaatcagagagccacctctgctctgacagcactcctaagatggaaggcccccagggggcttgtggcctgaagctggcaggagacacgaagcctaagaaccaagtgctggccacctacatgtcccatgagctggtcctggccaccccccagaacctgcctaagatgcctgagctgcctttgctacctcacgacagccaccccaaggaacttatattggacgtggttccgagcagcaggaggggctccagcacagagcgcccacagcttggaagccaggtggatctggggcgagtgaaaatggagaaggtggatggtgatgtggtcttcaatttagccacctgcttccgggctgatggcctcccagtggctccccagaggggccaagctgaagttcgggctaaggccgggcaggctcgagtgaaacaggaaagcgtaggggtctttgcttgcaagaacaagtggcagccagatgatgtgacggaatctctgccgcccaagaagatgaagtgcggcaaagagaaggacagtgaagagcagcagctccagccacaagccaaggccgtggtccggagttcccacagacccaagtgccggaagctgcccagtgacccccaggaatccaccaagaaaagccccaggggggcttcagattcaggaaaagagcacaatggagtcaggggaaagcacaagcaccggaagccgacaaagccggagtcccagtctccaggaaaacgagccgacagccacgaggaaggttccttggaaaagaaagcaaagagcagtttccgtgactttattcctgtggttctgagcacccgcacgcgcagtcagtctgatttaaaggcccgtaagcagaagacttcctcctcccaaagtttggagcaccgcctcaggaacaggaaccttctcttgcccaacaaagtccaggggatctcggattcaccaaacggtttcctcccaaataacctggaagagccagcctgccttgaaaattcagaaaagccatcaggaaaacgaaagtgcaagaccaagcacatggcaaccgtctcagaagaggcaaag

SEQ ID NO: 3448 - DNA, 5648 bp, Homo sapiens
  source 1..5648: mol_type = unassigned DNA
acgccagctgccattcccacctctgcacccatcccggcctccttcagtttgagtagagtgtgctttcctgcagctcaggcaccagctatgcaaaaagtccccctgtcctttcagccagggacagtgctgaccccgagccagccgctggtatatatcccgcctccaagctgtgggcagccactcagtgtggccacactgccaaccactctaggggtttcctccactcttacgctccctgtcctgccgtcctacctgcaggacaggtgtctcccaggcgtgctagcctcccccgagctccgttcttacccgtatgcattttctgtggcccggcctctgacttcggattccaagctggtatctctggaggtgaacaggctcccctgcacttccccatccggtagcaccaccacccagcctgcacccgatggggtccctgggcctttggcagatacctcccttgttactgcttctgccaaggtgcttccaactccacagcctctgctgccagcccccagtgggagctcagccccaccgcaccccgccaagatgcccagtggcaccgagcagcaaacagaagggacttccgttaccttctctcctcttaagtcaccgccacagctggaacgagagatggcctctccacctgagtgcagcgagatgccccttgatctgtcctccaagtccaaccgccagaagcttccattgccgaaccagcgcaagacaccccccatgcctgtgttgacccccgtgcacaccagcagcaaggccctcctctccacagtcctgtctaggtctcagcgcacaacccaggctgccggtggcaatgtcacctcctgcctgggctccacttcctcgccctttgtcatctttcccgagatcgtgaggaatggggacccgagcacctgggtgaagaactcaactgcactgatcagcaccattcctggcacctacgtgggagtggccaacccagtgcctgcatccctgctgctgaacaaagaccccaacctgggcctcaaccgtgacccccgccatctccccaagcaggagcccatctccatcattgatcaaggagagcctaagggcactggtgccacgtgtggcaaaaagggcagccaggctggtgctgagggacagccaagcacagtgaaacgatatactccagcccgcattgcccctgggctgccagggtgccaaaccaaggaactctctttgtggaaacccacggggccggcaaatatttatccccggtgttcagtcaatgggaaacctaccagcacccaggtcctgcctgttggctggtccccgtaccaccaggcgtctctgctttccattggcatttccagtgccgggcagctgacccccagtcagggggcgcccatcaggcccaccagcgttgtttcggagttttctggtgtgccatctctcagctccagcgaagccgtgcacggacttcctgaggggcaaccacggcctgggggctccttcgttccagagcaggaccctgttacaaagaacaaaacttgccggattgctgccaagccttatgaagaacaagtcaatcctgtcctcttgaccctcagccctcagactgggaccctggcactgtctgttcagcctagcggtggggacattcgaatgaatcaggggcctgaggaatcagagagccacctctgctctgacagcactcctaagatggaaggcccccagggggcttgtggcctgaagctggcaggagacacgaagcctaagaaccaagtgctggccacctacatgtcccatgagctggtcctggccaccccccagaacctgcctaagatgcctgagctgcctttgctacctcacgacagccaccccaaggaacttatattggacgtggttccgagcagcaggaggggctccagcacagagcgcccacagcttggaagccaggtggatctggggcgagtgaaaatggagaaggtggatggtgatgtggtcttcaatttagccacctgcttccgggctgatggcctcccagtggctccccagaggggccaagctgaagttcgggctaaggccgggcaggctcgagtgaaacaggaaagcgtaggggtctttgcttgcaagaacaagtggcagccagatgatgtgacggaatctctgccgcccaagaagatgaagtgcggcaaagagaaggacagtgaagagcagcagctccagccacaagccaaggccgtggtccggagttcccacagacccaagtgccggaagctgcccagtgacccccaggaatccaccaagaaaagccccaggggggcttcagattcaggaaaagagcacaatggagtcaggggaaagcacaagcaccggaagccgacaaagccggagtcccagtctccaggaaaacgagccgacagccacgaggaaggttccttggaaaagaaagcaaagagcagtttccgtgactttattcctgtggttctgagcacccgcacgcgcagtcagtctggaagcatctgtagctcctttgctggcatggcagacagtgacatgggaagccaggaagtcttccccacagaagaagaagaggaggtaacccccaccccagctaagcgtcgaaaggtgagaaagacccaacgggacacccagtatcgcagccaccatgcccaggacaagtctctgctgagccagggccgaaggcacctgtggcgagcccgagaaatgccctggaggacagaggctgcccggcaaatgtgggacaccaatgaggaggaggaggaagaagaggaggagggcctgctgaagaggaagaaacgaagacggcagaagagccgaaaatatcagactggggagtacctgacagagcaagaagacgagcagcggcggaaagggagagcagatttaaaggcccgtaagcagaagacttcctcctcccaaagtttggagcaccgcctcaggaacaggaaccttctcttgcccaacaaagtccaggggatctcggattcaccaaacggtttcctcccaaataacctggaagagccagcctgccttgaaaattcagaaaagccatcaggaaaacgaaagtgcaagaccaagcacatggcaaccgtctcagaagaggcaaagggcaaaggtcgttggagccagcagaagacacgatctcccaaatctcccaccccagtgaaacccacagaaccatgtacaccctctaagtcccgaagtgccagctcagaggaggcctcagagtcacctacagcccggcagatccccccagaggcacgtcggctcatagtgaacaaaaatgctggtgagaccctcctgcagagggcggcgcgtcttggctataaggatgttgttctctactgcctccagaaagacagtgaagatgtgaatcaccgtgacaatgctggctacacagccctgcatgaggcttgttcccggggctggaccgacatcctgaacatcctgctggagcacggggccaacgtgaactgcagtgcgcaggacggcacgaggccagttcatgatgcggtggtcaatgacaacctggagaccatctggctcctgctgtcctatggggccgatcccacactggctacctactcgggtcagacagccatgaagctggccagcagcgacaccatgaagcgctttctcagtgatcacctctcggatcttcagggccgggcagagggtgatcccggtgtatcctgggatttttacagcagttctgtgttggaggaaaaagacgggtttgcctgtgacctcctacataatcctcctgggagctcagatcaagaaggagacgatccgatggaggaggatgatttcatgtttgaactctcagacaagcctcttctcccttgctacaacctccaagtgtcagtgtcccgcgggccctgcaactggttcctcttttccgatgtcttgaagaggctgaagctttcctcgaggatctttcaggcccggttcccgcactttgaaatcaccaccatgcccaaggccgagttctacaggcaggtggcctccagtcagctgctgacccctgccgagaggcctggaggcttggacgacagatcccccccaggctcctctgagactgtggagctggtgcggtacgagccagacctacttcggctcctagggtccgaggtggaattccagtcttgcaacagttgaccgggaaaacagcccctcctcttctttctccttccgagttcgcccttcccccacctccttgtctttccccgaccgagcaccagactgcagaatgaggcaataatacggaccaacaagaagccgccttatcaatgccagcattagcgactggactgtttttgtttttttggttacaattagttctcatctccctgtcgtcgtcattgttatcgtggttgctgatgggggtggaaagttgaactccatgtctgaggacaagaggtcccgggggtggtgggaggtggcgccggggtcccttggactggcctccttgttcatgaccaagaccaaacctgggccctggatggccttggcctgtcccgaggagaaatgagaaaatcccagatctctgagcgccccccaactccattcccctgtgttcttctgtcttctgtagtatttattttattagtatttaatttgtattgtttcattggtttctgataagtctgtatcactgtgacgatttgagacaacttgttgtattgagggactttctgtacctccttttctttttctttgttgatgagctctgacaaagctattccctggtgtttttttcccccactggggagggggtgaggtggaatggggtgggggaacatggacttgtgactaacgaagctggttgctgctggcccagggctgggggcttgggggtaaatcctgaggctttggtgctcccccacccacccattcccgccctttgcagcagccccgctatcttgagattagtgttgacagggaggggaggattgtgaggtgaggggttaataagttactctaataaaggagcgtggagaagggatctgaggggtgagggtggcccccctcctcacgccttcttcactgcccccctcagagtgcacaatacgagtttgttcctgcctccactctcccaccccgttctggcctccctgtctcaagatactgagcctctcacctcccagccctcagccacccccatccctgccccttctgagactcacagcacccctttccttcctctcctcccacctcctccctcagcccctcattctccttgggaatctgcagagggctctgggactcactgccggatgtgaaatccaggcgtcagctgtttcctaggcaagggcaggaaagtggtctccagcccttgctccactcatgcctgggggcctggggctgagtggtatccctacctggcctccccctggcctctgggcctccagcgctgggtttgtcgagtgagagagagagaggagcttgggttgcttccctgtccccgccccctctgtggcattgtccctcccactcttatttttctaccaattgctatttttccgaacaatccttgtagagtatgtaccatccaaaggcaggagggcctcgccgtggccggctctggttggagatggtacagttttattgtacaggtgctaaaacaacaacaacaaaaaagaaaatgg

SEQ ID NO: 3449 - DNA, 7127 bp, Homo sapiens
  source 1..7127: mol_type = unassigned DNA
ggggagtggccacagcaggtcctatctggtggtgagtggctgtcatgatctctacagcaccgctctacagcggcgtgcacaactggaccagttctgaccggattcgcatgtgtggcatcaacgaggagagaagagcacctctttctgatgaggagtcaacgacaggcgactgccagcactttggatctcaggagttttgtgtcagcagcagtttttccaaggtggagctcacggcagttggaagtggcagcaatgcccggggggcagacccagatggcagtgctacagaaaaacttgggcacaagtcagaagacaagcctgacgatccccagccaaaaatggactacgctgggaacgtggcagaggctgagggcttcttggtgcccctgagcagcccaggagacgggctcaagcttcccgcatctgacagcgccgaggccagcaacagcagggccgactgctcctggactccactcaacacccaaatgagcaaacaggttgactgctcacccgccggagtaaaggctttggactctcggcaaggtgttggagagaagaatactttcattttggcaactctgggaactggagtccctgtggaggggaccctgcccctggttaccactaacttcagtcctctgccagcccctatctgtccccctgctcccggttcggcctctgtgccccactctgttccagatgcattccaggttcccctctccgtccctgccccagtcccccattcagggcttgttccagtccaagttgccacttcggttccagctccttcccctcccttagcacctgtcccggctctggctccagcgccaccgtcagtgcccacgctcatctctgactcgaaccccctttctgtttcggcctcagtcttggtgcctgtgccagcttctgctcccccttcaggcccggttcccttgtcggctccagctcctgccccgctttcagtcccagtttcagctcctcccttggctctcatccaggctcctgtgcccccttcagctccgaccttggttctcgctcccgtccccactccggttctggctcccatgccagcatccacgcctccagcggcccctgcccctccgtctgtgcccatgcccactccaaccccatcttccggcccaccttctacccccaccctcatccccgcctttgctcctacaccggtgcctgcacccaccccagcccccatctttactccagcccctacacccatgcctgctgccacgccagctgccattcccacctctgcacccatcccggcctccttcagtttgagtagagtgtgctttcctgcagctcaggcaccagctatgcaaaaagtccccctgtcctttcagccagggacagtgctgaccccgagccagccgctggtatatatcccgcctccaagctgtgggcagccactcagtgtggccacactgccaaccactctaggggtttcctccactcttacgctccctgtcctgccgtcctacctgcaggacaggtgtctcccaggcgtgctagcctcccccgagctccgttcttacccgtatgcattttctgtggcccggcctctgacttcggattccaagctggtatctctggaggtgaacaggctcccctgcacttccccatccggtagcaccaccacccagcctgcacccgatggggtccctgggcctttggcagatacctcccttgttactgcttctgccaaggtgcttccaactccacagcctctgctgccagcccccagtgggagctcagccccaccgcaccccgccaagatgcccagtggcaccgagcagcaaacagaagggacttccgttaccttctctcctcttaagtcaccgccacagctggaacgagagatggcctctccacctgagtgcagcgagatgccccttgatctgtcctccaagtccaaccgccagaagcttccattgccgaaccagcgcaagacaccccccatgcctgtgttgacccccgtgcacaccagcagcaaggccctcctctccacagtcctgtctaggtctcagcgcacaacccaggctgccggtggcaatgtcacctcctgcctgggctccacttcctcgccctttgtcatctttcccgagatcgtgaggaatggggacccgagcacctgggtgaagaactcaactgcactgatcagcaccattcctggcacctacgtgggagtggccaacccagtgcctgcatccctgctgctgaacaaagaccccaacctgggcctcaaccgtgacccccgccatctccccaagcaggagcccatctccatcattgatcaaggagagcctaagggcactggtgccacgtgtggcaaaaagggcagccaggctggtgctgagggacagccaagcacagtgaaacgatatactccagcccgcattgcccctgggctgccagggtgccaaaccaaggaactctctttgtggaaacccacggggccggcaaatatttatccccggtgttcagtcaatgggaaacctaccagcacccaggtcctgcctgttggctggtccccgtaccaccaggcgtctctgctttccattggcatttccagtgccgggcagctgacccccagtcagggggcgcccatcaggcccaccagcgttgtttcggagttttctggtgtgccatctctcagctccagcgaagccgtgcacggacttcctgaggggcaaccacggcctgggggctccttcgttccagagcaggaccctgttacaaagaacaaaacttgccggattgctgccaagccttatgaagaacaagtcaatcctgtcctcttgaccctcagccctcagactgggaccctggcactgtctgttcagcctagcggtggggacattcgaatgaatcaggggcctgaggaatcagagagccacctctgctctgacagcactcctaagatggaaggcccccagggggcttgtggcctgaagctggcaggagacacgaagcctaagaaccaagtgctggccacctacatgtcccatgagctggtcctggccaccccccagaacctgcctaagatgcctgagctgcctttgctacctcacgacagccaccccaaggaacttatattggacgtggttccgagcagcaggaggggctccagcacagagcgcccacagcttggaagccaggtggatctggggcgagtgaaaatggagaaggtggatggtgatgtggtcttcaatttagccacctgcttccgggctgatggcctcccagtggctccccagaggggccaagctgaagttcgggctaaggccgggcaggctcgagtgaaacaggaaagcgtaggggtctttgcttgcaagaacaagtggcagccagatgatgtgacggaatctctgccgcccaagaagatgaagtgcggcaaagagaaggacagtgaagagcagcagctccagccacaagccaaggccgtggtccggagttcccacagacccaagtgccggaagctgcccagtgacccccaggaatccaccaagaaaagccccaggggggcttcagattcaggaaaagagcacaatggagtcaggggaaagcacaagcaccggaagccgacaaagccggagtcccagtctccaggaaaacgagccgacagccacgaggaaggttccttggaaaagaaagcaaagagcagtttccgtgactttattcctgtggttctgagcacccgcacgcgcagtcagtctggaagcatctgtagctcctttgctggcatggcagacagtgacatgggaagccaggaagtcttccccacagaagaagaagaggaggtaacccccaccccagctaagcgtcgaaaggtgagaaagacccaacgggacacccagtatcgcagccaccatgcccaggacaagtctctgctgagccagggccgaaggcacctgtggcgagcccgagaaatgccctggaggacagaggctgcccggcaaatgtgggacaccaatgaggaggaggaggaagaagaggaggagggcctgctgaagaggaagaaacgaagacggcagaagagccgaaaatatcagactggggagtacctgacagagcaagaagacgagcagcggcggaaagggagagcagatttaaaggcccgtaagcagaagacttcctcctcccaaagtttggagcaccgcctcaggaacaggaaccttctcttgcccaacaaagtccaggggatctcggattcaccaaacggtttcctcccaaataacctggaagagccagcctgccttgaaaattcagaaaagccatcaggaaaacgaaagtgcaagaccaagcacatggcaaccgtctcagaagaggcaaaggatgttgttctctactgcctccagaaagacagtgaagatgtgaatcaccgtgacaatgctggctacacagccctgcatgaggcttgttcccggggctggaccgacatcctgaacatcctgctggagcacggggccaacgtgaactgcagtgcgcaggacggcacgaggccagttcatgatgcggtggtcaatgacaacctggagaccatctggctcctgctgtcctatggggccgatcccacactggctacctactcgggtcagacagccatgaagctggccagcagcgacaccatgaagcgctttctcagtgatcacctctcggatcttcagggccgggcagagggtgatcccggtgtatcctgggatttttacagcagttctgtgttggaggaaaaagacgggtttgcctgtgacctcctacataatcctcctgggagctcagatcaagaaggagacgatccgatggaggaggatgatttcatgtttgaactctcagacaagcctcttctcccttgctacaacctccaagtgtcagtgtcccgcgggccctgcaactggttcctcttttccgatgtcttgaagaggctgaagctttcctcgaggatctttcaggcccggttcccgcactttgaaatcaccaccatgcccaaggccgagttctacaggcaggtggcctccagtcagctgctgacccctgccgagaggcctggaggcttggacgacagatcccccccaggctcctctgagactgtggagctggtgcggtacgagccagacctacttcggctcctagggtccgaggtggaattccagtcttgcaacagttgaccgggaaaacagcccctcctcttctttctccttccgagttcgcccttcccccacctccttgtctttccccgaccgagcaccagactgcagaatgaggcaataatacggaccaacaagaagccgccttatcaatgccagcattagcgactggactgtttttgtttttttggttacaattagttctcatctccctgtcgtcgtcattgttatcgtggttgctgatgggggtggaaagttgaactccatgtctgaggacaagaggtcccgggggtggtgggaggtggcgccggggtcccttggactggcctccttgttcatgaccaagaccaaacctgggccctggatggccttggcctgtcccgaggagaaatgagaaaatcccagatctctgagcgccccccaactccattcccctgtgttcttctgtcttctgtagtatttattttattagtatttaatttgtattgtttcattggtttctgataagtctgtatcactgtgacgatttgagacaacttgttgtattgagggactttctgtacctccttttctttttctttgttgatgagctctgacaaagctattccctggtgtttttttcccccactggggagggggtgaggtggaatggggtgggggaacatggacttgtgactaacgaagctggttgctgctggcccagggctgggggcttgggggtaaatcctgaggctttggtgctcccccacccacccattcccgccctttgcagcagccccgctatcttgagattagtgttgacagggaggggaggattgtgaggtgaggggttaataagttactctaataaaggagcgtggagaagggatctgaggggtgagggtggcccccctcctcacgccttcttcactgcccccctcagagtgcacaatacgagtttgttcctgcctccactctcccaccccgttctggcctccctgtctcaagatactgagcctctcacctcccagccctcagccacccccatccctgccccttctgagactcacagcacccctttccttcctctcctcccacctcctccctcagcccctcattctccttgggaatctgcagagggctctgggactcactgccggatgtgaaatccaggcgtcagctgtttcctaggcaagggcaggaaagtggtctccagcccttgctccactcatgcctgggggcctggggctgagtggtatccctacctggcctccccctggcctctgggcctccagcgctgggtttgtcgagtgagagagagagaggagcttgggttgcttccctgtccccgccccctctgtggcattgtccctcccactcttatttttctaccaattgctatttttccgaacaatccttgtagagtatgtaccatccaaaggcaggagggcctcgccgtggccggctctggttggagatggtacagttttattgtacaggtgctaaaacaacaacaacaaaaaagaaaatggaaaaaaaaaagattaaaaaaaaaaggaaaaaaaaaaagccagtttgaggatgggacaatctgttctctagaggctcctgagccatgcgggagcattggtggttattttctttgtattgtgtttgttctttgttcctgggggggaagttctcggcccccttctgtaggactgctccccacccccaccatactgcccagttggttttgaacagttgttttccctttttaagaaaaaaaaatacatatatatatacatatatatatataaagttgaggggttttggactttaatttgttggttttgttggggttcctggtattgtgtagtttatttcatgttctgtttgcctttccttttttcgcatttgggtgtatattctggctgccctttatgtttcattttaagcaactggctgtggagtcaaaaacacttgcatactgaaaaacctgtgtcaggg

SEQ ID NO: 3450 - DNA, 1454 bp, Homo sapiens
  source 1..1454: mol_type = unassigned DNA
gaaaggacccggggcggggccgaacgcagcttccccaaggtgcaggcgcggtgaaaccatcgagacggagggccagagagtcacggcggttttcgtaacaccccagggcctgtaaggtttggtgtttccctttcaagatgccactttcagactttattctggctctgaaggacaatccctactttggggctggatttgggctggtgggtgtgggcacagccctggccctggcccggaagggtgtccaactgggcctggtggcattccggcgccattacatgatcacactggaagtccctgctcgagacaggagctatgcctggttgcttagctggctcacccgccacagtacccgtactcagcacctcagtgtcgagacttcgtaccttcagcatgagagtggccgcatttccactaagtttgaatttgtccccagccctggaaaccattttatctggtatcgggggaaatggattcgggtagaacgaagtcgagagatgcagatgatagacttgcagacggggactccttgggaatctgtcaccttcacggccctgggcactgaccgaaaggttttcttcaacatcctggaggaagctcgagagctagccttgcagcaggaggaagggaagaccgtgatgtacacagctgtgggctctgaatggcgtccctttggctatccacgccgccggcgaccactgaattctgtggttctacaacagggtctggctgaccgaattgtcagagacgtccaggaattcatcgataaccccaagtggtacactgacagaggcattccttacagacgtggctacctgctttatgggccccctggttgcggaaagagcagttttatcacagccctggctggggaactggagcacagcatctgcctgctgagcctcacggactccagcctctctgatgaccgactcaaccacctgctgagcgtggccccgcagcagagcctggtactcctggaggatgtggatgctgcttttctcagtcgagacttggctgtggagaacccagtaaagtaccaaggcctaggtcgcctcaccttcagtggactgctcaatgccttggatggtgtggcttccaccgaggcccgcatcgtgttcatgaccaccaaccacgttgacaggctggaccctgccctgatacgcccggggcgagtggacctgaaggagtacgtgggctactgctcacactggcagctgacccagatgttccagaggttctatccagggcaggcaccttccttagctgagaactttgcagaacatgtccttcgagctacaaaccagatcagtcctgcccaggtgcagggctacttcatgctgtataaaaatgaccctgtaggggcaattcacaatgctgagtctctgaggaggtgatcaggctgggctcagctcagctctcctcctctagctcaataaacatctgccacacta

SEQ ID NO: 3451 - DNA, 1583 bp, Homo sapiens
  source 1..1583: mol_type = unassigned DNA
aaaccatcgagacggagggccagagagtcacggcggatcttattgtctacgatgtgacgatccgtggagaaagtagcagatgggcagattttcatttggggagaatgagggagaaaagaacgggcattccgagccaagagcactgcatgagcaaggagttgggaggttgcttacttgttgaacatatttgttgcgtatttgcatatttgctaaacaggttttcgtaacaccccagggcctgtaaggtttggtgtttccctttcaagatgccactttcagactttattctggctctgaaggacaatccctactttggggctggatttgggctggtgggtgtgggcacagccctggccctggcccggaagggtgtccaactgggcctggtggcattccggcgccattacatgatcacactggaagtccctgctcgagacaggagctatgcctggttgcttagctggctcacccgccacagtacccgtactcagcacctcagtgtcgagacttcgtaccttcagcatgagagtggccgcatttccactaagtttgaatttgtccccagccctggaaaccattttatctggtatcgggggaaatggattcgggtagaacgaagtcgagagatgcagatgatagacttgcagacggggactccttgggaatctgtcaccttcacggccctgggcactgaccgaaaggttttcttcaacatcctggaggaagctcgagagctagccttgcagcaggaggaagggaagaccgtgatgtacacagctgtgggctctgaatggcgtccctttggctatccacgccgccggcgaccactgaattctgtggttctacaacagggtctggctgaccgaattgtcagagacgtccaggaattcatcgataaccccaagtggtacactgacagaggcattccttacagacgtggctacctgctttatgggccccctggttgcggaaagagcagttttatcacagccctggctggggaactggagcacagcatctgcctgctgagcctcacggactccagcctctctgatgaccgactcaaccacctgctgagcgtggccccgcagcagagcctggtactcctggaggatgtggatgctgcttttctcagtcgagacttggctgtggagaacccagtaaagtaccaaggcctaggtcgcctcaccttcagtggactgctcaatgccttggatggtgtggcttccaccgaggcccgcatcgtgttcatgaccaccaaccacgttgacaggctggaccctgccctgatacgcccggggcgagtggacctgaaggagtacgtgggctactgctcacactggcagctgacccagatgttccagaggttctatccagggcaggcaccttccttagctgagaactttgcagaacatgtccttcgagctacaaaccagatcagtcctgcccaggtgcagggctacttcatgctgtataaaaatgaccctgtaggggcaattcacaatgctgagtctctgaggaggtgatcaggctgggctcagctcagctctcctcctctagctcaataaacatctgccacacta

SEQ ID NO: 3452 - DNA, 1525 bp, Homo sapiens
  source 1..1525: mol_type = unassigned DNA
atcgagacggagggccagagagtcacggcggatcttattgtctacgatgtgacgatccgtggagaaagtagcagatgggcagattttcatttggggagaatgagggagaaaagaacgggcattccgagccaagagcactgcatgagcaaggagttgggaggttttcgtaacaccccagggcctgtaaggtttggtgtttccctttcaagatgccactttcagactttattctggctctgaaggacaatccctactttggggctggatttgggctggtgggtgtgggcacagccctggccctggcccggaagggtgtccaactgggcctggtggcattccggcgccattacatgatcacactggaagtccctgctcgagacaggagctatgcctggttgcttagctggctcacccgccacagtacccgtactcagcacctcagtgtcgagacttcgtaccttcagcatgagagtggccgcatttccactaagtttgaatttgtccccagccctggaaaccattttatctggtatcgggggaaatggattcgggtagaacgaagtcgagagatgcagatgatagacttgcagacggggactccttgggaatctgtcaccttcacggccctgggcactgaccgaaaggttttcttcaacatcctggaggaagctcgagagctagccttgcagcaggaggaagggaagaccgtgatgtacacagctgtgggctctgaatggcgtccctttggctatccacgccgccggcgaccactgaattctgtggttctacaacagggtctggctgaccgaattgtcagagacgtccaggaattcatcgataaccccaagtggtacactgacagaggcattccttacagacgtggctacctgctttatgggccccctggttgcggaaagagcagttttatcacagccctggctggggaactggagcacagcatctgcctgctgagcctcacggactccagcctctctgatgaccgactcaaccacctgctgagcgtggccccgcagcagagcctggtactcctggaggatgtggatgctgcttttctcagtcgagacttggctgtggagaacccagtaaagtaccaaggcctaggtcgcctcaccttcagtggactgctcaatgccttggatggtgtggcttccaccgaggcccgcatcgtgttcatgaccaccaaccacgttgacaggctggaccctgccctgatacgcccggggcgagtggacctgaaggagtacgtgggctactgctcacactggcagctgacccagatgttccagaggttctatccagggcaggcaccttccttagctgagaactttgcagaacatgtccttcgagctacaaaccagatcagtcctgcccaggtgcagggctacttcatgctgtataaaaatgaccctgtaggggcaattcacaatgctgagtctctgaggaggtgatcaggctgggctcagctcagctctcctcctctagctcaataaacatctgccacact

SEQ ID NO: 3453 - DNA, 1584 bp, Homo sapiens
  source 1..1584: mol_type = unassigned DNA
gtcacggcggatcttattgtctacgatgtgacgatccgtggagaaagtagcagatgggcagattttcatttggggagaatgagggagaaaagaacgggcattccgagccaagagcactgcatgagcaaggagttgggaggttgcttacttgttgaacatatttgttgcgtatttgcatatttgctaaacaggtagtgttaggagctaatccatgaaaggttttcgtaacaccccagggcctgtaaggtttggtgtttccctttcaagatgccactttcagactttattctggctctgaaggacaatccctactttggggctggatttgggctggtgggtgtgggcacagccctggccctggcccggaagggtgtccaactgggcctggtggcattccggcgccattacatgatcacactggaagtccctgctcgagacaggagctatgcctggttgcttagctggctcacccgccacagtacccgtactcagcacctcagtgtcgagacttcgtaccttcagcatgagagtggccgcatttccactaagtttgaatttgtccccagccctggaaaccattttatctggtatcgggggaaatggattcgggtagaacgaagtcgagagatgcagatgatagacttgcagacggggactccttgggaatctgtcaccttcacggccctgggcactgaccgaaaggttttcttcaacatcctggaggaagctcgagagctagccttgcagcaggaggaagggaagaccgtgatgtacacagctgtgggctctgaatggcgtccctttggctatccacgccgccggcgaccactgaattctgtggttctacaacagggtctggctgaccgaattgtcagagacgtccaggaattcatcgataaccccaagtggtacactgacagaggcattccttacagacgtggctacctgctttatgggccccctggttgcggaaagagcagttttatcacagccctggctggggaactggagcacagcatctgcctgctgagcctcacggactccagcctctctgatgaccgactcaaccacctgctgagcgtggccccgcagcagagcctggtactcctggaggatgtggatgctgcttttctcagtcgagacttggctgtggagaacccagtaaagtaccaaggcctaggtcgcctcaccttcagtggactgctcaatgccttggatggtgtggcttccaccgaggcccgcatcgtgttcatgaccaccaaccacgttgacaggctggaccctgccctgatacgcccggggcgagtggacctgaaggagtacgtgggctactgctcacactggcagctgacccagatgttccagaggttctatccagggcaggcaccttccttagctgagaactttgcagaacatgtccttcgagctacaaaccagatcagtcctgcccaggtgcagggctacttcatgctgtataaaaatgaccctgtaggggcaattcacaatgctgagtctctgaggaggtgatcaggctgggctcagctcagctctcctcctctagctcaataaacatctgccacacta

SEQ ID NO: 3454 - DNA, 1430 bp, Homo sapiens
  source 1..1430: mol_type = unassigned DNA
cacggcggtgagagggctgagtgacgggttaccccaaaccatgtggctggaggcgcgagctggggttttcgtaacaccccagggcctgtaaggtttggtgtttccctttcaagatgccactttcagactttattctggctctgaaggacaatccctactttggggctggatttgggctggtgggtgtgggcacagccctggccctggcccggaagggtgtccaactgggcctggtggcattccggcgccattacatgatcacactggaagtccctgctcgagacaggagctatgcctggttgcttagctggctcacccgccacagtacccgtactcagcacctcagtgtcgagacttcgtaccttcagcatgagagtggccgcatttccactaagtttgaatttgtccccagccctggaaaccattttatctggtatcgggggaaatggattcgggtagaacgaagtcgagagatgcagatgatagacttgcagacggggactccttgggaatctgtcaccttcacggccctgggcactgaccgaaaggttttcttcaacatcctggaggaagctcgagagctagccttgcagcaggaggaagggaagaccgtgatgtacacagctgtgggctctgaatggcgtccctttggctatccacgccgccggcgaccactgaattctgtggttctacaacagggtctggctgaccgaattgtcagagacgtccaggaattcatcgataaccccaagtggtacactgacagaggcattccttacagacgtggctacctgctttatgggccccctggttgcggaaagagcagttttatcacagccctggctggggaactggagcacagcatctgcctgctgagcctcacggactccagcctctctgatgaccgactcaaccacctgctgagcgtggccccgcagcagagcctggtactcctggaggatgtggatgctgcttttctcagtcgagacttggctgtggagaacccagtaaagtaccaaggcctaggtcgcctcaccttcagtggactgctcaatgccttggatggtgtggcttccaccgaggcccgcatcgtgttcatgaccaccaaccacgttgacaggctggaccctgccctgatacgcccggggcgagtggacctgaaggagtacgtgggctactgctcacactggcagctgacccagatgttccagaggttctatccagggcaggcaccttccttagctgagaactttgcagaacatgtccttcgagctacaaaccagatcagtcctgcccaggtgcagggctacttcatgctgtataaaaatgaccctgtaggggcaattcacaatgctgagtctctgaggaggtgatcaggctgggctcagctcagctctcctcctctagctcaataaacatctgccacacta

SEQ ID NO: 3455 - DNA, 583 bp, Homo sapiens
  source 1..583: mol_type = unassigned DNA
gagacggagggccagagagtcacggcggggtctgctgggagccagccattgaaggtgctggagcagagagagatatggtattggagctgatccctatgatgaaagatctggacccttgtgtagatgttccgtgaagcaggaggtgaagacctattaaaatgccatttcaagaactacgattttaaagacagtttaggtgggaggttttcgtaacaccccagggcctgtaaggtttggtgtttccctttcaagatgccactttcagactttattctggctctgaaggacaatccctactttggggctggatttgggctggtgggtgtgggcacagccctggccctggcccggaagggtgtccaactgggcctggtggcattccggcgccattacatgatcacactggaagtccctgctcgagacaggagctatgcctggttgcttagctggctcacccgccacagtacccgtactcagcacctcagtgtcgagacttcgtaccttcagcatgagagtggccgcatttccactaagtttgaatttgtccccagccctggaaaccattttatctggtatcggggga

SEQ ID NO: 3456 - DNA, 804 bp, Homo sapiens
  source 1..804: mol_type = unassigned DNA
aaggaggacgctgagccgtcaagattaagaaccttcacctgcgggagggcagggtgaggtaggagacaggtgggcaccagagaagaaatacgcttatcttccgggcaggagggctgaggaagagaaaggacagactaaggcagagagaaggcctggagaaacaacgggccccggcctagcgacccaggttcccacctgcctctggctctgactcaccgcgtggtcttggacagacacagtcgcttcgcttctctgggcctcagctttcctatctgtaaaatggaggtgatgacagtgtccacatcgtcgggcaggagctggatcataagagccagcgaactggaaaggcggtttgtaacctggaaggcttgggatggagcatcgtcatgattttgtcctgagagcagcaggggtctgctgggagccagccattgaaggtgctggagcagagagagatatggtattggagctgatccctatgatgaaagatctggacccttgtgtagatgttccgtgaagcaggaggttttcgtaacaccccagggcctgtaaggtttggtgtttccctttcaagatgccactttcagactttattctggctctgaaggacaatccctactttggggctggatttgggctggtgggtgtgggcacagccctggccctggcccggaagggtgtccaactgggcctggtggcattccggcgccattacatgatcacactggaagtccctgctcgagacaggagctatgcctggttgcttagctggctcacccgccacagtacccgtactcagcacct

SEQ ID NO: 3457 - DNA, 1036 bp, Homo sapiens
  source 1..1036: mol_type = unassigned DNA
cgggagggcagggtgaggtaggagacaggtgggcaccagagaagaaatacgcttatcttccgggcaggagggctgaggaagagaaaggacagactaaggcagagagaaggcctggagaaacaacgggccccggcctagcgacccaggttcccacctgcctctggctctgactcaccgcgtggtcttggacagacacagtcgcttcgcttctctgggcctcagctttcctatctgtaaaatggaggtgatgacagtgtccacatcgtcgggcaggagctggatcataagagccagcgaactggaaaggcggtttgtaacctggaaggcttgggatggagcatcgtcatgattttgtcctgagagcagcaggttttcgtaacaccccagggcctgtaaggtttggtgtttccctttcaagatgccactttcagactttattctggctctgaaggacaatccctactttggggctggatttgggctggtgggtgtgggcacagccctggccctggcccggaagggtgtccaactgggcctggtggcattccggcgccattacatgatcacactggaagtccctgctcgagacaggagctatgcctggttgcttagctggctcacccgccacagtacccgtactcagcacctcagtgtcgagacttcgtaccttcagcatgagagtggccgcatttccactaagtttgaatttgtccccagccctggaaaccattttatctggtatcgggggaaatggattcgggtagaacgaagtcgagagatgcagatgatagacttgcagacggggactccttgggaatctgtcaccttcacggccctgggcactgaccgaaaggttttcttcaacatcctggaggaagctcgagagctagccttgcagcaggaggaagggaagaccgtgatgtacacagctgtgggctctgaatggcgtccctttggctatccacgccgccggcgaccactgaattctgtggttctacaacagggtctggctgaccgaattgtcagagacgtccag

SEQ ID NO: 3458 - DNA, 2015 bp, Homo sapiens
  source 1..2015: mol_type = unassigned DNA
aaaccatgtggctggaggcgcgagctggggtgtgggcgaggttcaggagggggttcctgggtgtcgcggaggggccggggacgggagagctttgtctgtggccttccatgcataggtgttttggaattctggatcccagttctgaggctcagccgaggtcactgctgtcagctcacctccctgcatgccaggcgcagggcaaagtggccggggttcggggttggaggagaggtgtactagaaacaactttgctcttgtccctcaggatcttattgtctacgatgtgacgatccgtggagaaagtagcagatgggcagattttcatttggggagaatgagggagaaaagaacgggcattccgagccaagagcactgcatgagcaaggagttgggaggttgcttacttgttgaacatatttgttgcgtatttgcatatttgctaaacaggtagtgttaggagctaatccatgaaaggtaggtgggcgccgtattgtagagagccttgagtaccaggctgagtttatacccaattcaggggtctgctgggagccagccattgaaggtgctggagcagagagagatatggtattggagctgatccctatgatgaaagatctggacccttgtgtagatgttccgtgaagcaggaggttttcgtaacaccccagggcctgtaaggtttggtgtttccctttcaagatgccactttcagactttattctggctctgaaggacaatccctactttggggctggatttgggctggtgggtgtgggcacagccctggccctggcccggaagggtgtccaactgggcctggtggcattccggcgccattacatgatcacactggaagtccctgctcgagacaggagctatgcctggttgcttagctggctcacccgccacagtacccgtactcagcacctcagtgtcgagacttcgtaccttcagcatgagagtggccgcatttccactaagtttgaatttgtccccagccctggaaaccattttatctggtatcgggggaaatggattcgggtagaacgaagtcgagagatgcagatgatagacttgcagacggggactccttgggaatctgtcaccttcacggccctgggcactgaccgaaaggttttcttcaacatcctggaggaagctcgagagctagccttgcagcaggaggaagggaagaccgtgatgtacacagctgtgggctctgaatggcgtccctttggctatccacgccgccggcgaccactgaattctgtggttctacaacagggtctggctgaccgaattgtcagagacgtccaggaattcatcgataaccccaagtggtacactgacagaggcattccttacagacgtggctacctgctttatgggccccctggttgcggaaagagcagttttatcacagccctggctggggaactggagcacagcatctgcctgctgagcctcacggactccagcctctctgatgaccgactcaaccacctgctgagcgtggccccgcagcagagcctggtactcctggaggatgtggatgctgcttttctcagtcgagacttggctgtggagaacccagtaaagtaccaaggcctaggtcgcctcaccttcagtggactgctcaatgccttggatggtgtggcttccaccgaggcccgcatcgtgttcatgaccaccaaccacgttgacaggctggaccctgccctgatacgcccggggcgagtggacctgaaggagtacgtgggctactgctcacactggcagctgacccagatgttccagaggttctatccagggcaggcaccttccttagctgagaactttgcagaacatgtccttcgagctacaaaccagatcagtcctgcccaggtgcagggctacttcatgctgtataaaaatgaccctgtaggggcaattcacaatgctgagtctctgaggaggtgatcaggctgggctcagctcagctctcctcctctagctcaataaacatctgccacact

SEQ ID NO: 3459 - DNA, 1483 bp, Homo sapiens
  source 1..1483: mol_type = unassigned DNA
acgggttaccccaaaccatgtggctggaggcgcgagctggggggtctgctgggagccagccattgaaggtgctggagcagagagagatatggtattggagctgatccctatgatgaaagatctggacccttgtgtagatgttccgtgaagcaggaggttttcgtaacaccccagggcctgtaaggtttggtgtttccctttcaagatgccactttcagactttattctggctctgaaggacaatccctactttggggctggatttgggctggtgggtgtgggcacagccctggccctggcccggaagggtgtccaactgggcctggtggcattccggcgccattacatgatcacactggaagtccctgctcgagacaggagctatgcctggttgcttagctggctcacccgccacagtacccgtactcagcacctcagtgtcgagacttcgtaccttcagcatgagagtggccgcatttccactaagtttgaatttgtccccagccctggaaaccattttatctggtatcgggggaaatggattcgggtagaacgaagtcgagagatgcagatgatagacttgcagacggggactccttgggaatctgtcaccttcacggccctgggcactgaccgaaaggttttcttcaacatcctggaggaagctcgagagctagccttgcagcaggaggaagggaagaccgtgatgtacacagctgtgggctctgaatggcgtccctttggctatccacgccgccggcgaccactgaattctgtggttctacaacagggtctggctgaccgaattgtcagagacgtccaggaattcatcgataaccccaagtggtacactgacagaggcattccttacagacgtggctacctgctttatgggccccctggttgcggaaagagcagttttatcacagccctggctggggaactggagcacagcatctgcctgctgagcctcacggactccagcctctctgatgaccgactcaaccacctgctgagcgtggccccgcagcagagcctggtactcctggaggatgtggatgctgcttttctcagtcgagacttggctgtggagaacccagtaaagtaccaaggcctaggtcgcctcaccttcagtggactgctcaatgccttggatggtgtggcttccaccgaggcccgcatcgtgttcatgaccaccaaccacgttgacaggctggaccctgccctgatacgcccggggcgagtggacctgaaggagtacgtgggctactgctcacactggcagctgacccagatgttccagaggttctatccagggcaggcaccttccttagctgagaactttgcagaacatgtccttcgagctacaaaccagatcagtcctgcccaggtgcagggctacttcatgctgtataaaaatgaccctgtaggggcaattcacaatgctgagtctctgaggaggtgatcaggctgggctcagctc

SEQ ID NO: 3460 - DNA, 815 bp, Homo sapiens
  source 1..815: mol_type = unassigned DNA
cccagagccggcgggagccgcatctctatggtcggccgcggctggaacggcccccggggcccgctttgtgcgaccgcctccggctcagccgcctctaggatattggggatgtggaagccactctctcttcctcttgccggctgccggggttttcgtaacaccccagggcctgtaaggtttggtgtttccctttcaagatgccactttcagactttattctggctctgaaggacaatccctactttggggctggatttgggctggtgggtgtgggcacagccctggccctggcccggaagggtgtccaactgggcctggtggcattccggcgccattacatgatcacactggaagtccctgctcgagacaggagctatgcctggttgcttagctggctcacccgccacagtacccgtactcagcacctcagtgtcgagacttcgtaccttcagcatgagagtggccgcatttccactaagtttgaatttgtccccagccctggaaaccattttatctggtatcgggggaaatggattcgggtagaacgaagtcgagagatgcagatgatagacttgcagacggggactccttgggaatctgtcaccttcacggccctgggcactgaccgaaaggttttcttcaacatcctggaggaagctcgagagctagccttgcagcaggaggaagggaagaccgtgatgtacacagctgtgggctctgaatggcgtccctttggctatccacgccgccggcgaccactgaattctgtggttctacaacagggtctggctgaccgaattgtcagagacgtccag

SEQ ID NO: 3461 - DNA, 2063 bp, Homo sapiens
  source 1..2063: mol_type = unassigned DNA
aattttccatgctggaagtggaaggaattgcttgctcatttatattctctatcctgtggaaagccttccctcccaccccttgagccagtgagtcacttcctctctgcaaacctctaaagcctcctttctttctcagcccagacctggccctctggagagggttttggagtcctgggtaggcagggtacctcaggcagcaggcagcacaccttggatgtgagctgaatggattttcaaatttcacagaaggagcctccatgctggagaaagtatgtatgaaaatgagtgcgaatgtcaactcctgctaaaagaaatgcttgaacggcttaacaaggaagctgatgaagccttgctgcataacctacgccttcagctggaagcccaatttctgcaagatgatatcagtgcggcaaaggacaggcacaagaagaatcttctggaagttcagacctatatcagcatcctgcagcagatcatccacaccactcctccagcatccattgtgacgagtgggatgagggaggagaagctcctgacggagcgggaggtggccgccctgcggagtcagctggaggagggccgggaggtgctctcccacctgcaggcgcagagagtggagctgcaggcacagacaacaactctggaacaagctattaaaagtgcccatgagtgttatgacgatgagattcagctttataacgagcagattgagacactgcgcaaggagattgaggagacagagcgggtcctggagaagtcttcttacgactgccggcagctggcggtcgcccagcaaaccctgaagaatgagctggaccggtatcatcgtatcatcgagattgaaggcaacaggctgacctctgccttcattgaaactcccattcccctgttcacccagagccatggagtctctctcagcactggatccggtgggaaagatcttaccagagctctgcaggatataacagcagcaaaaccaagacaaaaagccctccccaagaatgttccaaggagaaaagagattataacaaaagacaaaaccaacggagctctggaagatgcaccattaaaaggtttggaagacacaaagctggtacaggtggtacttaaagaggaaagtgaatctaagtttgaatcagaaagtaaagaagtaagtcccctgacacaagaaggggctccagaggatgtgccagatggagggcagataagcaaaggctttgggaaactatacaggaaggtcaaggagaaagtgagaagccccaaagagcctgagacccccactgagctctacaccaaagagcggcacgtgctggtcacaggggatgccaattacgtggaccctagattctatgtctcctccatcacagctaaaggtggggtggctgtttctgttgcggaagactctgtgctttatgacggccaggtggagccctctcctgagtcacccaagccccctttagagaatgggcaggtgggtctgcaggagaaagaagatggacaaccaattgaccagcagcctatagacaaggagattgagccagatggtgcagagctggaaggccctgaagagaaacgtgagggtgaggagcgggacgaagagtccaggagaccctgtgccatggtcacacccggtgcagaggaaccatctatacctgagcctccaaagcctgcggctgatcaggatggagctgaggtgcttgggactaggagcagaagcctgccagaaaaaggccctcccaaggctttggcctataagacagtggaagtggtggaatctatcgagaagatttccacggagagcattcagacatatgaagaaaccgctgtgatcgtggagaccatgattggaaagacaaagtcagacaagaagaaatcaggagagaagagctcttaaaatgcccaggcttgatgggataaaatgtatttggggccactgtaggggtaatgctttgatattttagagcaaatgataaaagggtgagggttcctgtttggattagaccatagttgacccatctggcattgccaacgaagccttcattaaaatgttttctttgcttgca

SEQ ID NO: 3462 - DNA, 2207 bp, Homo sapiens
  source 1..2207: mol_type = unassigned DNA
gccggctcggcgccgcccgcgcgcccgcgccagagcagccatgtaccggcgcagctacgtcttccagacccgcaaggagcagtacgagcacgccgacgaggcttcgcgcgccgccgagcccgagcgcccggccgacgagggctgggctggggcaacgagcctggcggcgctgcaggggctcggcgagcgcgtggccgcccacgtccagcgggcccgcgccctcgagcagcgccatgccgggctccggaggcagctggatgccttccagcgcctgggcgagctggccgggcccgaggacgccctcgcccgccaagtcgagagcaaccgccagcgcgtccgggacctggaggccgagcgcgcccggctggagcgccagggcaccgaggcgcagcgcgcgctcgacgagttccgaagcaagtatgaaaatgagtgcgaatgtcaactcctgctaaaagaaatgcttgaacggcttaacaaggaagctgatgaagccttgctgcataacctacgccttcagctggaagcccaatttctgcaagatgatatcagtgcggcaaaggacaggcacaagaagaatcttctggaagttcagacctatatcagcatcctgcagcagatcatccacaccactcctccagcatccattgtgacgagtgggatgagggaggagaagctcctgacggagcgggaggtggccgccctgcggagtcagctggaggagggccgggaggtgctctcccacctgcaggcgcagagagtggagctgcaggcacagacaacaactctggaacaagctattaaaagtgcccatgagtgttatgacgatgagattcagctttataacgagcagattgagacactgcgcaaggagattgaggagacagagcgggtcctggagaagtcttcttacgactgccggcagctggcggtcgcccagcaaaccctgaagaatgagctggaccggtatcatcgtatcatcgagattgaaggcaacaggctgacctctgccttcattgaaactcccattcccctgttcacccagagccatggagtctctctcagcactggatccggtgggaaagatcttaccagagctctgcaggatataacagcagcaaaaccaagacaaaaagccctccccaagaatgttccaaggagaaaagagattataacaaaagacaaaaccaacggagctctggaagatgcaccattaaaaggtttggaagacacaaagctggtacaggtggtacttaaagaggaaagtgaatctaagtttgaatcagaaagtaaagaagtaagtcccctgacacaagaaggggctccagaggatgtgccagatggagggcagataagcaaaggctttgggaaactatacaggaaggtcaaggagaaagtgagaagccccaaagagcctgagacccccactgagctctacaccaaagagcggcacgtgctggtcacaggggatgccaattacgtggaccctagattctatgtctcctccatcacagctaaaggtggggtggctgtttctgttgcggaagactctgtgctttatgacggccaggtggagccctctcctgagtcacccaagccccctttagagaatgggcaggtgggtctgcaggagaaagaagatggacaaccaattgaccagcagcctatagacaaggagattgagccagatggtgcagagctggaaggccctgaagagaaacgtgagggtgaggagcgggacgaagagtccaggagaccctgtgccatggtcacacccggtgcagaggaaccatctatacctgagcctccaaagcctgcggctgatcaggatggagctgaggtgcttgggactaggagcagaagcctgccagaaaaaggccctcccaaggctttggcctataagacagtggaagtggtggaatctatcgagaagatttccacggagagcattcagacatatgaagaaaccgctgtgatcgtggagaccatgattggaaagacaaagtcagacaagaagaaatcaggagagaagagctcttaaaatgcccaggcttgatgggataaaatgtatttggggccactgtaggggtaatgctttgatattttagagcaaatgataaaagggtgagggttcctgtttggattagaccatagttgacccatctggcattgccaacgaagccttcattaaaatgttttctttgcttgca

SEQ ID NO: 3463 - DNA, 2183 bp, Homo sapiens
  source 1..2183: mol_type = unassigned DNA
gaggcgaccgtggccatgcagagtgctctgtgagtcaccgttaatttcagatggggtaaggtgaagagacgttccttgggagcccagaggagtacaggatctgatcccaagccctttaccaacaggccgcatgacacagcacttgtgagtgaggctgaacaagagaaatgagatttgaggatgtttcctgaggtcctactgtgtgccagctgcggccatgttagctaccaggaatatgaagatgaataaggagatcacaagtgaaaacagaaatgccaagataaacttggcccaagttcccttgggaattctcaggatcctacctggtgcagcagatcacaccagggagatgttactggatctttgatgagtggagcatccacagaggaaggaagtatgaaaatgagtgcgaatgtcaactcctgctaaaagaaatgcttgaacggcttaacaaggaagctgatgaagccttgctgcataacctacgccttcagctggaagcccaatttctgcaagatgatatcagtgcggcaaaggacaggcacaagaagaatcttctggaagttcagacctatatcagcatcctgcagcagatcatccacaccactcctccagcatccattgtgacgagtgggatgagggaggagaagctcctgacggagcgggaggtggccgccctgcggagtcagctggaggagggccgggaggtgctctcccacctgcaggcgcagagagtggagctgcaggcacagacaacaactctggaacaagctattaaaagtgcccatgagtgttatgacgatgagattcagctttataacgagcagattgagacactgcgcaaggagattgaggagacagagcgggtcctggagaagtcttcttacgactgccggcagctggcggtcgcccagcaaaccctgaagaatgagctggaccggtatcatcgtatcatcgagattgaaggcaacaggctgacctctgccttcattgaaactcccattcccctgttcacccagagccatggagtctctctcagcactggatccggtgggaaagatcttaccagagctctgcaggatataacagcagcaaaaccaagacaaaaagccctccccaagaatgttccaaggagaaaagagattataacaaaagacaaaaccaacggagctctggaagatgcaccattaaaaggtttggaagacacaaagctggtacaggtggtacttaaagaggaaagtgaatctaagtttgaatcagaaagtaaagaagtaagtcccctgacacaagaaggggctccagaggatgtgccagatggagggcagataagcaaaggctttgggaaactatacaggaaggtcaaggagaaagtgagaagccccaaagagcctgagacccccactgagctctacaccaaagagcggcacgtgctggtcacaggggatgccaattacgtggaccctagattctatgtctcctccatcacagctaaaggtggggtggctgtttctgttgcggaagactctgtgctttatgacggccaggtggagccctctcctgagtcacccaagccccctttagagaatgggcaggtgggtctgcaggagaaagaagatggacaaccaattgaccagcagcctatagacaaggagattgagccagatggtgcagagctggaaggccctgaagagaaacgtgagggtgaggagcgggacgaagagtccaggagaccctgtgccatggtcacacccggtgcagaggaaccatctatacctgagcctccaaagcctgcggctgatcaggatggagctgaggtgcttgggactaggagcagaagcctgccagaaaaaggccctcccaaggctttggcctataagacagtggaagtggtggaatctatcgagaagatttccacggagagcattcagacatatgaagaaaccgctgtgatcgtggagaccatgattggaaagacaaagtcagacaagaagaaatcaggagagaagagctcttaaaatgcccaggcttgatgggataaaatgtatttggggccactgtaggggtaatgctttgatattttagagcaaatgataaaagggtgagggttcctgtttggattagaccatagttgacccatctggcattgccaacgaagccttcattaaaatgttttctttgcttgc

SEQ ID NO: 3464 - DNA, 2075 bp, Homo sapiens
  source 1..2075: mol_type = unassigned DNA
cctttctttctcagcccagacctggccctctggagagggttttggagtcctgggtaggcagggtacctcaggcagcaggcagcacaccttggatgtgagctgaatggattttcaaatttcacagaaggagcctccatgctggagaaagtatagacagggtctcactatgttgcccagaatggggtgcagtggctattcacaggaatgatcattgctcactgcagccttgaactcccggtctccagtgatcctcccgcctcagcctctcaagtagctgggattacaggtatgaaaatgagtgcgaatgtcaactcctgctaaaagaaatgcttgaacggcttaacaaggaagctgatgaagccttgctgcataacctacgccttcagctggaagcccaatttctgcaagatgatatcagtgcggcaaaggacaggcacaagaagaatcttctggaagttcagacctatatcagcatcctgcagcagatcatccacaccactcctccagcatccattgtgacgagtgggatgagggaggagaagctcctgacggagcgggaggtggccgccctgcggagtcagctggaggagggccgggaggtgctctcccacctgcaggcgcagagagtggagctgcaggcacagacaacaactctggaacaagctattaaaagtgcccatgagtgttatgacgatgagattcagctttataacgagcagattgagacactgcgcaaggagattgaggagacagagcgggtcctggagaagtcttcttacgactgccggcagctggcggtcgcccagcaaaccctgaagaatgagctggaccggtatcatcgtatcatcgagattgaaggcaacaggctgacctctgccttcattgaaactcccattcccctgttcacccagagccatggagtctctctcagcactggatccggtgggaaagatcttaccagagctctgcaggatataacagcagcaaaaccaagacaaaaagccctccccaagaatgttccaaggagaaaagagattataacaaaagacaaaaccaacggagctctggaagatgcaccattaaaaggtttggaagacacaaagctggtacaggtggtacttaaagaggaaagtgaatctaagtttgaatcagaaagtaaagaagtaagtcccctgacacaagaaggggctccagaggatgtgccagatggagggcagataagcaaaggctttgggaaactatacaggaaggtcaaggagaaagtgagaagccccaaagagcctgagacccccactgagctctacaccaaagagcggcacgtgctggtcacaggggatgccaattacgtggaccctagattctatgtctcctccatcacagctaaaggtggggtggctgtttctgttgcggaagactctgtgctttatgacggccaggtggagccctctcctgagtcacccaagccccctttagagaatgggcaggtgggtctgcaggagaaagaagatggacaaccaattgaccagcagcctatagacaaggagattgagccagatggtgcagagctggaaggccctgaagagaaacgtgagggtgaggagcgggacgaagagtccaggagaccctgtgccatggtcacacccggtgcagaggaaccatctatacctgagcctccaaagcctgcggctgatcaggatggagctgaggtgcttgggactaggagcagaagcctgccagaaaaaggccctcccaaggctttggcctataagacagtggaagtggtggaatctatcgagaagatttccacggagagcattcagacatatgaagaaaccgctgtgatcgtggagaccatgattggaaagacaaagtcagacaagaagaaatcaggagagaagagctcttaaaatgcccaggcttgatgggataaaatgtatttggggccactgtaggggtaatgctttgatattttagagcaaatgataaaagggtgagggttcctgtttggattagaccatagttgacccatctggcattgccaacgaagccttcattaaaatgttttctttgcttgc

SEQ ID NO: 3465 - DNA, 1558 bp, Homo sapiens
  source 1..1558: mol_type = unassigned DNA
cgtgaccaggccacagggatgctggggctgtaaaccaaaagccactggactctgtaaacccactgggcaccacagaggcagaaggggtgatgagtgagaggcgagtggtagtggacttgcccaccagtgccagctccagcatgcccctccagaggcgcagggcgtccttcagggggccacggtcatcatcctccctggagagccccccagcctccaggaccaatgccatgagtggccttgtccgagcacccggggtctatgtaggaacagcacccagtgggtgcataggtggcttgggtgcccgtgtgacccgccgggccctcggcatcagcagtgtcttccttcagggcctgcggagctcaggcctggccaccgtgccggctccaggtttggagagggaccatggtgctgttgaggacctagggggctgcctggtggaatatatggccaaagtgcacgcccttgagcaagtcagtcaggagctggaaacacaactgcggatgcacctggagagcaaagccacacgctcgggaaactggggtgccctacgggcttcctgggccagcagctgccagcaggtgggtgaggcagtcttggaaaatgcccggctcatgctgcagacagaaactatccaggccggagcagatgactttaaagagagatatgaaaatgagcagccatttcgaaaggcggcagaagaggaaattaactctctgtataaagtcattgatgaggctaatttgactaaaatggacctggagagtcaaatagaaagtctgaaagaagaacttggctctctatcaagaaactatgaagaggatgtgaagctgctgcacaaacagttggcagggtgtgagctggaacaaatggatgctcccattggcactggtctggacgacatccttgagacgatcagaattcagtgggagagagatgttgaaaagaaccgggtggaggcaggagccctgctccaagctaagcaacaggcggaggtggcccacatgtcccagacccaggaggagaagctggcagctgccctcagggtggagttacacaacacttcgtgccaagtccagagcctccaggctgagacagaatccttacgtgccctgaaacgaggcctggagaacaccttgcacgatgccaagcactggcatgacatggagctccagaacctgggcgctgtggtcggccggctggaggcggagctcagggaaatccgagcggaggcggagcagcagcaacaggagcgcgcgcatctgctggcccgcaagtgccagctgcagaaggacgtggcgtcctaccacgccctgctggacagggaggagagcggctgatggagaaacttcctctttttcatgaagaaaacacccttcctcaacagctgacccaagaagttgcttgaggagctttctcctgagctccagtccctgctggattccctggttaattcagcttgagctgaaaagcttcctggaagtggagaggatccttctgctttaatctgagtagtctgtagcttgagcaatctcccttgtcctccttcaaataaatgctt

SEQ ID NO: 3466 - DNA, 2143 bp, Homo sapiens
  source 1..2143: mol_type = unassigned DNA
ggaagttttccggcggctaccgggaagtcgctgaagacagagcgatggtagttctggaggcctcgctccggggccgacccgaggccacagtgcctccgcggtagaccggacttgggtgacgggctccgggctcccgaggtgaagagcatcgggggctgagggatggaagggtctaagacgtccaacaacagcaccatgcaggtgagcttcgtgtgccagcgctgcagccagcccctgaaactggacacgagtttcaagatcctggaccgtgtcaccatccaggaactcacagctccattacttaccacagcccaggcgaaaccaggagagacccaggaggaagagactaactcaggagaggagccatttattgaaactcctcgccaggatggtgtctctcgcagattcatccccccagccaggatgatgtccacagaaagtgccaacagcttcactctgattggggaggcatctgatggcggcaccatggagaacctcagccgaagactgaaggtcactggggacctttttgacatcatgtcgggccagacagatgtggatcacccactctgtgaggaatgcacagatactcttttagaccagctggacactcagctcaacgtcactgaaaatgagtgtcagaactacaaacgctgtttggagatcttagagcaaatgaatgaggatgacagtgaacagttacagatggagctaaaggagctggcactagaggaggagaggctgatccaggagctggaagacgtggaaaagaaccgcaagatagtggcagaaaatctcgagaaggtccaggctgaggctgagagactggatcaggaggaagctcagtatcagagagaatacagtgaatttaaacgacagcagctggagctggatgatgagctgaagagtgttgaaaaccagatgcgttatgcccagacgcagctggataagctgaagaaaaccaacgtctttaatgcaaccttccacatctggcacagtggacagtttggcacaatcaataacttcaggctgggtcgcctgcccagtgttcccgtggaatggaatgagattaatgctgcttggggccagactgtgttgctgctccatgctctggccaataagatgggtctgaaatttcagagataccgacttgttccttacggaaaccattcatatctggagtctctgacagacaaatctaaggagctgccgttatactgttctggggggttgcggtttttctgggacaacaagtttgaccatgcaatggtggctttcctggactgtgtgcagcagttcaaagaagaggttgagaaaggcgagacacgtttttgtcttccctacaggatggatgtggagaaaggcaagattgaagacacaggaggcagtggcggctcctattccatcaaaacccagtttaactctgaggagcagtggacaaaagctctcaagttcatgctgacgaatcttaagtggggtcttgcttgggtgtcctcacaattttataacaaatgacttttttccttagggggaggtttgccttaaaggcttttaattttgttttgtttgcaaacatgttttaaattaaattcgggtaatattaaacagtacatgtttacaataccaaaaaagaaaaaatccacaaaagccactttattttaaaatatcatgtgacagatactttccagagctacaacatgccatctatagttgccagccctggtcagttttgattcttaaccccatggactcctttccctttcttctctgaaaaaaactaatttaaatttgcttttcttttttttaactgagttgaattgagattgatgtgttttcactggatttttatctctctcaacttcctgcacttaacaatatgaaatagaaacttttgtctttactgagatgaggatatgtttgagatgcacagttggataatgtgggaaaatgacatctaagctttacctggtcaccatgtgatgtgatcagatgcttgaaatttaacacttttcacttggttcttatactgaatgccgactctgctctgtgttagagatatgaaatggtgtttgatactgtttgagacattatggagagatttaattatttgtaataaaagatttgctgcagtctgaaaactgcc

SEQ ID NO: 3467 - DNA, 1565 bp, Homo sapiens
  source 1..1565: mol_type = unassigned DNA
ccggcggctaccgggaagtcgctgaagacagagcgatggtagttctggaggcctcgctccggggccgacccgaggccacagtgcctccgcggtagaccggacttgggtgacgggctccgggctcccgagggatggaagggtctaagacgtccaacaacagcaccatgcaggtgagcttcgtgtgccagcgctgcagccagcccctgaaactggacacgagtttcaagatcctggaccgtgtcaccatccaggaactcacagctccattacttaccacagcccaggcgaaaccaggagagacccaggaggaagagactaactcaggagaggagccatttattgaaactcctcgccaggatggtgtctctcgcagattcatccccccagccagacgctgtttggagatcttagagcaaatgaatgaggatgacagtgaacagttacagatggagctaaaggagctggcactagaggaggagaggctgatccaggagctggaagacgtggaaaagaaccgcaagatagtggcagaaaatctcgagaaggtccaggctgaggctgagagactggatcaggaggaagctcagtatcagagagaatacagtgaatttaaacgacagcagctggagctggatgatgagctgaagagtgttgaaaaccagatgcgttatgcccagacgcagctggataagctgaagaaaaccaacgtctttaatgcaaccttccacatctggcacagtggacagtttggcacaatcaataacttcaggctgggtcgcctgcccagtgttcccgtggaatggaatgagattaatgctgcttggggccagactgtgttgctgctccatgctctggccaataagatgggtctgaaatttcagagataccgacttgttccttacggaaaccattcatatctggagtctctgacagacaaatctaaggatggatgtggagaaaggcaagattgaagacacaggaggcagtggcggctcctattccatcaaaacccagtttaactctgaggagcagtggacaaaagctctcaagttcatgctgacgaatcttaagtggggtcttgcttgggtgtcctcacaattttataacaaatgacttttttccttagggggaggtttgccttaaaggcttttaattttgttttgtttgcaaacatgttttaaattaaattcgggtaatattaaacagtacatgtttacaataccaaaaaagaaaaaatccacaaaagccactttattttaaaatatcatgtgacagatactttccagagctacaacatgccatctatagttgccagccctggtcagttttgattcttaaccccatggactcctttccctttcttctctgaaaaaaactaatttaaatttgcttttcttttttttaactgagttgaattgagattgatgtgttttcactggatttttatctctctcaacttcctgcacttaacaatatgaaatagaaacttttgtctttactgagatgaggatatgtttgagatgcacagttggataatgtgggaaaatgacatctaagctttacct

SEQ ID NO: 3468 - DNA, 2500 bp, Homo sapiens
  source 1..2500: mol_type = unassigned DNA
ccggcggctaccgggaagtcgctgaagacagagcgatggtagttctggaggcctcgctccggggccgacccgaggccacagtgcctccgcggtagaccggacttgggtgacgggctccgggctcccgagggatggaagggtctaagacgtccaacaacagcaccatgcaggtgagcttcgtgtgccagcgctgcagccagcccctgaaactggacacgagtttcaagatcctggaccgtgtcaccatccaggaactcacagctccattacttaccacagcccaggcgaaaccaggagagacccaggaggaagagactaactcaggagaggagccatttattgaaactcctcgccaggatggtgtctctcgcagattcatccccccagccaggtgcctactacttctcagcccccattccttgccaaaggctagtagaattttaattaaatccaggaatcgagacctggagccaggtgatagagatgcatcatcacctagccttttggccctttcagaaaagatgtattcccttatacctggcccgtcaccttccagtatggattttttcctgtagctgttcacagagtgggaaaggatagtagctttaatgatgaagtattgaaaaaaattgagggagtgattgaccaatcaccaagagatgggctcttgagaagtttcaaactagcaaatgttgttagatgttcaggtccttagttctcattgctgcaggtaaagagcttgctggcaaggggtataatattttctaaaatggcctttcctggttctcccttcttttccactgtagacatatgaattttttatgctccctctccctccttagtccaccaaggccaaccttcatgctgagtgtccctgtggaagaccagcatggccttcctttgggagagaggtacccttgggaggtcagtcgggctaggagtgggtatgttccttgaggcccctcagctggtgcttgagagtctctgccactggcattgtagtaggtggaggaagcctctctgttccctcatgtggcccgtgggcggggggctgtctgcaggatgatgtccacagaaagtgccaacagcttcactctgattggggaggcatctgatggcggcaccatggagaacctcagccgaagactgaaggtcactggggacctttttgacatcatgtcgggccagacagatgtggatcacccactctgtgaggaatgcacagatactcttttagaccagctggacactcagctcaacgtcactgaaaatgagtgtcagaactacaaacgctgtttggagatcttagagcaaatgaatgaggatgacagtgaacagttacagatggagctaaaggagctggcactagaggaggagaggctgatccaggagctggaagacgtggaaaagaaccgcaagatagtggcagaaaatctcgagaaggtccaggctgaggctgagagactggatcaggaggaagctcagtatcagagagaatacagtgaatttaaacgacagcagctggagctggatgatgagctgaagagtgttgaaaaccagatgcgttatgcccagacgcagctggataagctgaagaaaaccaacgtctttaatgcaaccttccacatctggcacagtggacagtttggcacaatcaataacttcaggctgggtcgcctgcccagtgttcccgtggaatggaatgagattaatgctgcttggggccagactgtgttgctgctccatgctctggccaataagatgggtctgaaatttcagagataccgacttgttccttacggaaaccattcatatctggagtctctgacagacaaatctaaggagctgccgttatactgttctggggggttgcggtttttctgggacaacaagtttgaccatgcaatggtggctttcctggactgtgtgcagcagttcaaagaagaggttgagaaaggcgagacacgtttttgtcttccctacaggatggatgtggagaaaggcaagattgaagacacaggaggcagtggcggctcctattccatcaaaacccagtttaactctgaggagcagtggacaaaagctctcaagttcatgctgacgaatcttaagtggggtcttgcttgggtgtcctcacaattttataacaaatgacttttttccttagggggaggtttgccttaaaggcttttaattttgttttgtttgcaaacatgttttaaattaaattcgggtaatattaaacagtacatgtttacaataccaaaaaagaaaaaatccacaaaagccactttattttaaaatatcatgtgacagatactttccagagctacaacatgccatctatagttgccagccctggtcagttttgattcttaaccccatggactcctttccctttcttctctgaaaaaaactaatttaaatttgcttttcttttttttaactgagttgaattgagattgatgtgttttcactggatttttatctctctcaactt

SEQ ID NO: 3469 - DNA, 7508 bp, Homo sapiens
  source 1..7508: mol_type = unassigned DNA
ctgaggctcagccctcctcggagcccaccatctcgaggctcctggactgtaagggacccctgcagtccccagagcagaggccagcaggggctgagactatgaggcaagcagcccatcgacccaggcctccttaggaccagcccagccacccagcaagcgaaagagcagcagcagagagcagagccggagataaaggaccacagcggaccactggggatcacccccagcagctcctgaagcctctggccgggctgaggggttgcgacagacggccagacccacagacactgacagacacacaacgacaccgatgcacacagctgcacgacactgacacactcagatacaaccagggacagcatcacatactgccacagccctgcaatacagacacccacacacacacacacaaacaactggcaactctgaaatgggcagacagtgacacacagcaccacccccctcaacacacagaagtgggggcacccatcttcccaacacatgagacagcattgacctgcacggacagacctggagacacacacacgcaccctcacccaggcgcagctgtcggtggcctctgcacatcctccctacccccacagggacaccctcgctcctccacatactcgcgcacacacacagctaccagcaaacatagctcacatacccctggctccagctccagcagccctggcgccttctgcagcctcctttgtgggtggggaagagctcagccaaccttggatggagcgtcggtgaagcaagagctcagaggggagaggggctggcctggcatgaccctcgccagtccccccacctggctgggtgatgtcccccggcccgggttctggggccccttggcagtaccatggagcaactgacaaccctcccacggcctggggaccctggagccatggagccatgggcactgcccacctggcatagctggactccaggtcgagggggtgaacctagcagtgcagccccaagcatcgctgatactcctccggcagctctgcagcttcaagaactgaggtctgaggagagttccaagcccaaaggagacgggagctccaggcccgtggggggaactgaccctgaaggagcagaggcttgtctgcccagcctgggccagcaagcatccagctctggacccgcctgccagaggccagaggatgaggaagtggaggctttcctgaaggccaagctgaatatgagctttggggacaggcccaatctggagctgctgagggccctgggggagctgcggcagcgctgtgccatccttaaggaggaaaaccagatgctgaggaagagcagcttccctgagacagaagagaaggtgcggaggctgaagaggaagaacgccgagctggcggtcattgccaagcgcctggaggagagggcccgaaagctgcaggaaacgaacctgagggtggagggtccccagtggctccacgtgcgggacttcgatcggctgctgcgcgagtcccagcgggaggtgctgcggctgcagaggcagatcgcgctgcgcaaccagcgggagacgctcccgctcccgccgtcctggcccccgggccctgctctccaggccagagcaggggcgcctgctcccggggccccgggagaggccacgccccaggaggatgcggacaacctacccgtgattctaggggagccagagaaagagcagagggtgcagcagctggaatcggagctcagcaagaagcggaagaaatgcgagagcctggagcaggaagcccggaaaaagcagaggcgatgtgaggagctggaactgcagctgagacaagcgcagaatgagaatgcccgcctggtggaggagaactcccggctcagtgggagagccacagagaaggagcaggtggagtgggagaatgcggagctgaggggccagctcctgggggtgacacaggagagggactcagcccttcgcaagagccagggcctgcagagcaagctggagagcctggagcaagtgctgaagcacatgcgggaggtggcccagcggcggcagcagctggaggtggagcatgaacaggctcggctcagcctacgggagaagcaggaggaggtccggagactgcagcaggcccaggctgaagcccagagggaacatgaaggagccgtgcagctgctggagtctaccttggattccatgcaggcccgggttcgagagctcgaagaacagtgccgcagccaaaccgagcagttcagcctcctggcacaggaactccaggctttccgcctgcacccgggccccttggatctgctcacatctgccctggactgtgggagccttggagactgcccaccacccccctgctgctgctccattccccagccttgccgggggtctggccccaaagaccttgacctcccgccgggctcccctgggcgctgcaccccaaagtcttccgagcctgcccctgccactctcactggggtccctcgaaggacagccaagaaggcagagtctctctccaactcctcccactccgagtccatccacaacagccccaagtcatgccctacacctgaggtggacacagccagtgaggtagaggagctggaggcagacagtgtctccctgctcccagctgcgccagagggcagccggggaggagccaggatccaggtcttcctagcacgttatagctacaacccctttgagggtcccaatgagaatccagaagcagagcttccgctgacagctggcgagtacatctacatctatggcaacatggatgaggatggcttttttgaaggagagctcatggatggccgaaggggcctggtcccttccaattttgtagagcgtgtgtcggatgatgacctcctgacctccctccctccagagctggccgatttgtcccacagctcaggccctgaactcagtttcctgagtgtaggtgggggtggcagcagtagcgggggccaaagcagtgtgggaaggagccagcccagacctgaggaggaggatgcaggggacgagctcagtctgagcccatcaccggagggcctgggcgagcctcctgccgtgccttacccccgccgtctggtggtcctcaagcagctggcccacagcgtggtgctggcctgggagccgcctcctgagcaagtggagctacacggcttccatatctgtgtgaatggggagctgcgacaggccctggggcctggggcgccacccaaggccgtgctggagaacctggacctgtgggccgggccccttcacatttctgtccaggccctgactagccggggcagctctgacccactgcgctgttgcttggcggtgggtgcccgggccggagtggtgcccagccagctgcgggtccatcggttgacagccacatctgctgagatcacctgggtgcccggcaatagcaacttggcccatgccatctacctcaatggggaagagtgcccacctgccagccccagtacctactgggccaccttctgccacttacggcctggcacaccctatcaggcccaagtggaggctcagctcccaccccaagggccctgggaaccaggctgggagaggctggagcagcgggctgccaccctgcagttcaccacactcccagcaggcccacctgatgcccctctggatgtgcagatcgagcctgggccctcccctgggatcttgatcatcagttggctcccagtcaccatcgatgctgctggcacatccaacggtgtccgggtcacaggctatgccatctacgctgatgggcagaagatcatggaggtggcctcacccacggcaggcagtgtactggtggagttgtcccagctgcagctgctgcaggtgtgtcgtgaggtggtcgtgcgcaccatgtcgccccacggggagtcggcggactccatcccggctcctatcactcccgccctggctccggccagcctgccagcccgagtctcctgcccctcaccgcacccaagcccagaggccagagcgccccttgcttcagcctccccagggcctggagaccccagctctcctctccagcaccctgctccccttggaactcaagagcctccaggagcaccccctgcaagcccttccagagagatggcaaaagggtcccacgaggaccctccagcaccttgctcccaggaggaggctggggcagcagtgctgggcacctcagaggagaggacagccagcacatctaccctgggtgagaaggaccctggccccgcagctccctcactggccaagcaggaggccgagtggactgcaggagaggcctgtccggcctccagctccacccagggagcacgggcccagcaggcgccaaataccgagatgtgccaaggaggagacccagggtctgggctgaggcccagggctgagaaggaggacacagcagagcttggggttcatctggtgaactccctcgtggaccacggccgcaactcagacctgtcagacatccaggaggaagaggaagaggaggaggaggaggaggaagaggagctgggttccaggacttgctccttccagaagcaggttgctggcaacagcatcagggagaatggggccaagtcccagcccgaccccttttgtgagactgacagcgatgaggagatcttggagcagatcctggagctgcccctccagcagttctgtagcaagaagctctttagcatcccggaggaggaggaagaggaagaggaggacgaggaggaggagaagtcaggggcaggctgttcttcccgagaccctggcccgcctgaacctgcattgctggggctgggctgtgacagtggtcagccccgaagacctggccagtgtcccttgtctcctgagtcctccagggctggagactgcctggaagacatgcctggattagttggtggaagcagccggaggagaggagggggctcccctgagaagcccccaagccgcaggcggcctccagatccccgagaacactgcagccgacttctcagcaacaatgggccccaggcctctggacgactgggccccacacgggagaggggtggcctccccgtaattgagggccccaggactggactagaggctagcgggagaggccggctgggcccttcccggaggtgctcccgtggccgggcgctggagcctggcctggccagctgcctttcccccaagtgcttggaaatcagcattgaatatgattcggaggatgagcaggaggcgggcagcgggggcatcagcatcaccagctcctgctaccctggagatggggaggcctggggcacagcaactgtaggaaggcccagggggcctccgaaggccaattcaggccccaagccctacccacgcctcccagcctgggagaaaggggaaccagagcggagaggccgcagtgcgacgggcagagccaaggagccactctcccgggcaacagagaccggagaggccagagggcaggacggctctgggcggaggggcccccagaagagaggtgtccgagtcctcaggccaagcactgcagagctagtccctgcgaggagcccctcagaaacactggcttaccagcacctacccgtcaggatctttgtggctctgtttgactatgaccccgtgtcaatgtcgcccaatcctgatgctggagaagaagagcttcccttccgagagggtcagatcctgaaggtgtttggggacaaggatgccgatggcttctaccagggcgaaggtgggggccggacaggctacattccctgcaacatggtggctgaggtggctgtggacagccctgctgggagacagcaactgctccagcggggttatttgtccccagatattctccttgagggctcagggaatggtccgtttgtgtactccacagcccacacaactgggcctcctcccaagccccgccgctccaagaaagctgagtcggaaggccctgcccagccctgtccaggcccccctaagctggtcccctctgctgacctgaaagctccccactccatggtggctgcatttgactacaacccccaggagagttcccccaatatggacgtggaggcagagctgcccttccgggcaggggatgtcattactgtgtttgggggcatggacgatgacggtttctactatggggaattaaatggacaaaggggcctggttccatccaacttcctggagggccctgggcctgaggcaggcggcctggacagggaacccaggacaccccaggctgagagtcagagaacgaggaggagaagagtccagtgctagatggagatagatatatgtagagagagcaacatgactggggctgcaccacacaagggtccccagggcccccaggtgggccttgtacccccagctctggcagcgcccccaggattgaacgtggggagccccagggcagaagcgagaaggtgtggggtttcttctccaaggggaagcagctcctcaggaggctgggctctgggaagaaggagtgaagctgtggcccatcctgcaggcagaagaggccctgagaggcccccagatcactgtctctgctgagcagggaaggctcagactgggcccagagcccccgttcttctgcgttaacactgtggcattcagagggaatcaaagagccttggtgaaggtcagagctaaatggctccttaaggatgaactctctagagaagcaccttcctcctacaggaggggaaactgagcccacagtgagtatgtaacttgaccaaggtcactgagccaggactggacccaggaccctcgcgtcctggtccacccacctcgtctactagtgtcccacagtgctgcgctagtcccttctgccacccttcccagtcccaggacgggccctggagggagaaaggagcctgtgccccctgatggctctggctgtcctgatcctgtcttccctcccctgaaggaaagtttgcactggattttattggagccccatctccccagcgggcaggcgggcggagcctgtatatatgtatatactcagtgcctcagttcagcttcctccacctcgcttccactgcacaggcccaggaaggagaaaggccaagccaaagtgggccccaccctgcccccgtcgtgctccatccttccctgccggggcctgctggcccctgtaaggtcccgcccccaaagaccctggggccagcggggccgaaagcggagttgggtttgccttattttgctcattggattcaagttcttttgcatagttttcttctaacccctgttggagtccaggggctggagaaaaggacagatttatgcagctattttcatacattccctgttcagagtggggtaggggttctccgccgttacccgatccactccatcccccaccctctgaggggtgagtgtgtctttgcatgtttcctttgctgtggtgggagatagtttgactgaacccccaccttgaccttggtctccaggggtgtggaatggtgggggaatttgtttaaaaagacattttattataataaagtctattttc

SEQ ID NO: 3470 - DNA, 7688 bp, Homo sapiens
  source 1..7688: mol_type = unassigned DNA
ctgaggctcagccctcctcggagcccaccatctcgaggctcctggactgtaagggacccctgcagtccccagagcagaggccagcaggggctgagactatgaggcaagcagcccatcgacccaggcctccttaggaccagcccagccacccagcaagcgaaagagcagcagcagagagcagagccggagataaaggaccacagcggaccactggggatcacccccagcagctcctgaagcctctggccgggctgaggggttgcgacagacggccagacccacagacactgacagacacacaacgacaccgatgcacacagctgcacgacactgacacactcagatacaaccagggacagcatcacatactgccacagccctgcaatacagacacccacacacacacacacaaacaactggcaactctgaaatgggcagacagtgacacacagcaccacccccctcaacacacagaagtgggggcacccatcttcccaacacatgagacagcattgacctgcacggacagacctggagacacacacacgcaccctcacccaggcgcagctgtcggtggcctctgcacatcctccctacccccacagggacaccctcgctcctccacatactcgcgcacacacacagctaccagcaaacatagctcacatacccctggctccagctccagcagccctggcgccttctgcagcctcctttgtgggtggggaagagctcagccaaccttggatggagcgtcggtgaagcaagagctcagaggggagaggggctggcctggcatgaccctcgccagtccccccacctggctgggtgatgtcccccggcccgggttctggggccccttggcagtaccatggagcaactgacaaccctcccacggcctggggaccctggagccatggagccatgggcactgcccacctggcatagctggactccaggtcgagggggtgaacctagcagtgcagccccaagcatcgctgatactcctccggcagctctgcagcttcaagaactgaggtctgaggagagttccaagcccaaaggagacgggagctccaggcccgtggggggaactgaccctgaaggagcagaggcttgtctgcccagcctgggccagcaagcatccagctctggacccgcctgccagaggccagaggatgaggaagtggaggctttcctgaaggccaagctgaatatgagctttggggacaggcccaatctggagctgctgagggccctgggggagctgcggcagcgctgtgccatccttaaggaggaaaaccagatgctgaggaagagcagcttccctgagacagaagagaaggtgcggaggctgaagaggaagaacgccgagctggcggtcattgccaagcgcctggaggagagggcccgaaagctgcaggaaacgaacctgagggtggtgagtgcccccttgccccggccggggaccagcttggagttgtgtcggaaggccctagcccgccagcgagcccgggacctcagtgagacagccagtgcactgctggccaaggacaagcagattgctgccttgcagcgggagtgcagggagctgcaggccaggctcactctggtgggcaaggagggtccccagtggctccacgtgcgggacttcgatcggctgctgcgcgagtcccagcgggaggtgctgcggctgcagaggcagatcgcgctgcgcaaccagcgggagacgctcccgctcccgccgtcctggcccccgggccctgctctccaggccagagcaggggcgcctgctcccggggccccgggagaggccacgccccaggaggatgcggacaacctacccgtgattctaggggagccagagaaagagcagagggtgcagcagctggaatcggagctcagcaagaagcggaagaaatgcgagagcctggagcaggaagcccggaaaaagcagaggcgatgtgaggagctggaactgcagctgagacaagcgcagaatgagaatgcccgcctggtggaggagaactcccggctcagtgggagagccacagagaaggagcaggtggagtgggagaatgcggagctgaggggccagctcctgggggtgacacaggagagggactcagcccttcgcaagagccagggcctgcagagcaagctggagagcctggagcaagtgctgaagcacatgcgggaggtggcccagcggcggcagcagctggaggtggagcatgaacaggctcggctcagcctacgggagaagcaggaggaggtccggagactgcagcaggcccaggctgaagcccagagggaacatgaaggagccgtgcagctgctggagtctaccttggattccatgcaggcccgggttcgagagctcgaagaacagtgccgcagccaaaccgagcagttcagcctcctggcacaggaactccaggctttccgcctgcacccgggccccttggatctgctcacatctgccctggactgtgggagccttggagactgcccaccacccccctgctgctgctccattccccagccttgccgggggtctggccccaaagaccttgacctcccgccgggctcccctgggcgctgcaccccaaagtcttccgagcctgcccctgccactctcactggggtccctcgaaggacagccaagaaggcagagtctctctccaactcctcccactccgagtccatccacaacagccccaagtcatgccctacacctgaggtggacacagccagtgaggtagaggagctggaggcagacagtgtctccctgctcccagctgcgccagagggcagccggggaggagccaggatccaggtcttcctagcacgttatagctacaacccctttgagggtcccaatgagaatccagaagcagagcttccgctgacagctggcgagtacatctacatctatggcaacatggatgaggatggcttttttgaaggagagctcatggatggccgaaggggcctggtcccttccaattttgtagagcgtgtgtcggatgatgacctcctgacctccctccctccagagctggccgatttgtcccacagctcaggccctgaactcagtttcctgagtgtaggtgggggtggcagcagtagcgggggccaaagcagtgtgggaaggagccagcccagacctgaggaggaggatgcaggggacgagctcagtctgagcccatcaccggagggcctgggcgagcctcctgccgtgccttacccccgccgtctggtggtcctcaagcagctggcccacagcgtggtgctggcctgggagccgcctcctgagcaagtggagctacacggcttccatatctgtgtgaatggggagctgcgacaggccctggggcctggggcgccacccaaggccgtgctggagaacctggacctgtgggccgggccccttcacatttctgtccaggccctgactagccggggcagctctgacccactgcgctgttgcttggcggtgggtgcccgggccggagtggtgcccagccagctgcgggtccatcggttgacagccacatctgctgagatcacctgggtgcccggcaatagcaacttggcccatgccatctacctcaatggggaagagtgcccacctgccagccccagtacctactgggccaccttctgccacttacggcctggcacaccctatcaggcccaagtggaggctcagctcccaccccaagggccctgggaaccaggctgggagaggctggagcagcgggctgccaccctgcagttcaccacactcccagcaggcccacctgatgcccctctggatgtgcagatcgagcctgggccctcccctgggatcttgatcatcagttggctcccagtcaccatcgatgctgctggcacatccaacggtgtccgggtcacaggctatgccatctacgctgatgggcagaagatcatggaggtggcctcacccacggcaggcagtgtactggtggagttgtcccagctgcagctgctgcaggtgtgtcgtgaggtggtcgtgcgcaccatgtcgccccacggggagtcggcggactccatcccggctcctatcactcccgccctggctccggccagcctgccagcccgagtctcctgcccctcaccgcacccaagcccagaggccagagcgccccttgcttcagcctccccagggcctggagaccccagctctcctctccagcaccctgctccccttggaactcaagagcctccaggagcaccccctgcaagcccttccagagagatggcaaaagggtcccacgaggaccctccagcaccttgctcccaggaggaggctggggcagcagtgctgggcacctcagaggagaggacagccagcacatctaccctgggtgagaaggaccctggccccgcagctccctcactggccaagcaggaggccgagtggactgcaggagaggcctgtccggcctccagctccacccagggagcacgggcccagcaggcgccaaataccgagatgtgccaaggaggagacccagggtctgggctgaggcccagggctgagaaggaggacacagcagagcttggggttcatctggtgaactccctcgtggaccacggccgcaactcagacctgtcagacatccaggaggaagaggaagaggaggaggaggaggaggaagaggagctgggttccaggacttgctccttccagaagcaggttgctggcaacagcatcagggagaatggggccaagtcccagcccgaccccttttgtgagactgacagcgatgaggagatcttggagcagatcctggagctgcccctccagcagttctgtagcaagaagctctttagcatcccggaggaggaggaagaggaagaggaggacgaggaggaggagaagtcaggggcaggctgttcttcccgagaccctggcccgcctgaacctgcattgctggggctgggctgtgacagtggtcagccccgaagacctggccagtgtcccttgtctcctgagtcctccagggctggagactgcctggaagacatgcctggattagttggtggaagcagccggaggagaggagggggctcccctgagaagcccccaagccgcaggcggcctccagatccccgagaacactgcagccgacttctcagcaacaatgggccccaggcctctggacgactgggccccacacgggagaggggtggcctccccgtaattgagggccccaggactggactagaggctagcgggagaggccggctgggcccttcccggaggtgctcccgtggccgggcgctggagcctggcctggccagctgcctttcccccaagtgcttggaaatcagcattgaatatgattcggaggatgagcaggaggcgggcagcgggggcatcagcatcaccagctcctgctaccctggagatggggaggcctggggcacagcaactgtaggaaggcccagggggcctccgaaggccaattcaggccccaagccctacccacgcctcccagcctgggagaaaggggaaccagagcggagaggccgcagtgcgacgggcagagccaaggagccactctcccgggcaacagagaccggagaggccagagggcaggacggctctgggcggaggggcccccagaagagaggtgtccgagtcctcaggccaagcactgcagagctagtccctgcgaggagcccctcagaaacactggcttaccagcacctacccgtcaggatctttgtggctctgtttgactatgaccccgtgtcaatgtcgcccaatcctgatgctggagaagaagagcttcccttccgagagggtcagatcctgaaggtgtttggggacaaggatgccgatggcttctaccagggcgaaggtgggggccggacaggctacattccctgcaacatggtggctgaggtggctgtggacagccctgctgggagacagcaactgctccagcggggttatttgtccccagatattctccttgagggctcagggaatggtccgtttgtgtactccacagcccacacaactgggcctcctcccaagccccgccgctccaagaaagctgagtcggaaggccctgcccagccctgtccaggcccccctaagctggtcccctctgctgacctgaaagctccccactccatggtggctgcatttgactacaacccccaggagagttcccccaatatggacgtggaggcagagctgcccttccgggcaggggatgtcattactgtgtttgggggcatggacgatgacggtttctactatggggaattaaatggacaaaggggcctggttccatccaacttcctggagggccctgggcctgaggcaggcggcctggacagggaacccaggacaccccaggctgagagtcagagaacgaggaggagaagagtccagtgctagatggagatagatatatgtagagagagcaacatgactggggctgcaccacacaagggtccccagggcccccaggtgggccttgtacccccagctctggcagcgcccccaggattgaacgtggggagccccagggcagaagcgagaaggtgtggggtttcttctccaaggggaagcagctcctcaggaggctgggctctgggaagaaggagtgaagctgtggcccatcctgcaggcagaagaggccctgagaggcccccagatcactgtctctgctgagcagggaaggctcagactgggcccagagcccccgttcttctgcgttaacactgtggcattcagagggaatcaaagagccttggtgaaggtcagagctaaatggctccttaaggatgaactctctagagaagcaccttcctcctacaggaggggaaactgagcccacagtgagtatgtaacttgaccaaggtcactgagccaggactggacccaggaccctcgcgtcctggtccacccacctcgtctactagtgtcccacagtgctgcgctagtcccttctgccacccttcccagtcccaggacgggccctggagggagaaaggagcctgtgccccctgatggctctggctgtcctgatcctgtcttccctcccctgaaggaaagtttgcactggattttattggagccccatctccccagcgggcaggcgggcggagcctgtatatatgtatatactcagtgcctcagttcagcttcctccacctcgcttccactgcacaggcccaggaaggagaaaggccaagccaaagtgggccccaccctgcccccgtcgtgctccatccttccctgccggggcctgctggcccctgtaaggtcccgcccccaaagaccctggggccagcggggccgaaagcggagttgggtttgccttattttgctcattggattcaagttcttttgcatagttttcttctaacccctgttggagtccaggggctggagaaaaggacagatttatgcagctattttcatacattccctgttcagagtggggtaggggttctccgccgttacccgatccactccatcccccaccctctgaggggtgagtgtgtctttgcatgtttcctttgctgtggtgggagatagtttgactgaacccccaccttgaccttggtctccaggggtgtggaatggtgggggaatttgtttaaaaagacattttattataataaagtctattttc

SEQ ID NO: 3471 - DNA, 7626 bp, Homo sapiens
  source 1..7626: mol_type = unassigned DNA
ctgaggctcagccctcctcggagcccaccatctcgaggctcctggactgtaagggacccctgcagtccccagagcagaggccagcaggggctgagactatgaggcaagcagcccatcgacccaggcctccttaggaccagcccagccacccagcaagcgaaagagcagcagcagagagcagagccggagataaaggaccacagcggaccactggggatcacccccagcagctcctgaagcctctggccgggctgaggggttgcgacagacggccagacccacagacactgacagacacacaacgacaccgatgcacacagctgcacgacactgacacactcagatacaaccagggacagcatcacatactgccacagccctgcaatacagacacccacacacacacacacaaacaactggcaactctgaaatgggcagacagtgacacacagcaccacccccctcaacacacagaagtgggggcacccatcttcccaacacatgagacagcattgacctgcacggacagacctggagacacacacacgcaccctcacccaggcgcagctgtcggtggcctctgcacatcctccctacccccacagggacaccctcgctcctccacatactcgcgcacacacacagctaccagcaaacatagctcacatacccctggctccagctccagcagccctggcgccttctgcagcctcctttgtgggtggggaagagctcagccaaccttggatggagcgtcggtgaagcaagagctcagaggggagaggggctggcctggcatgaccctcgccagtccccccacctggctgggtgatgtcccccggcccgggttctggggccccttggcagtaccatggagcaactgacaaccctcccacggcctggggaccctggagccatggagccatgggcactgcccacctggcatagctggactccaggtcgagggggtgaacctagcagtgcagccccaagcatcgctgatactcctccggcagctctgcagcttcaagaactgaggtctgaggagagttccaagcccaaaggagacgggagctccaggcccgtggggggaactgaccctgaaggagcagaggcttgtctgcccagcctgggccagcaagcatccagctctggacccgcctgccagaggccagaggatgaggaagtggaggctttcctgaaggccaagctgaatatgagctttggggacaggcccaatctggagctgctgagggccctgggggagctgcggcagcgctgtgccatccttaaggaggaaaaccagatgctgaggaagagcagcttccctgagacagaagagaaggtgcggaggctgaagaggaagaacgccgagctggcggtcattgccaagcgcctggaggagagggcccgaaagctgcaggaaacgaacctgagggtggtgagtgcccccttgccccggccggggaccagcttggagttgtgtcggaaggccctagcccgccagcgagcccgggacctcagtgagacagccagtgcactgctggccaaggacaagcagattgctgccttgcagcgggagtgcagggagctgcaggccaggctcactctggtgggcaaggagggtccccagtggctccacgtgcgggacttcgatcggctgctgcgcgagtcccagcgggaggtgctgcggctgcagaggcagatcgcgctgcgcaaccagcgggagacgctcccgctcccgccgtcctggcccccgggccctgctctccaggccagagcaggggcgcctgctcccggggccccgggagaggccacgccccaggaggatgcggacaacctacccgtgattctaggggagccagagaaagagcagagggtgcagcagctggaatcggagctcagcaagaagcggaagaaatgcgagagcctggagcaggaagcccggaaaaagcagaggcgatgtgaggagctggaactgcagctgagacaagcgcagaatgagaatgcccgcctggtggaggagaactcccggctcagtgggagagccacagagaaggagcaggtggagtgggagaatgcggagctgaggggccagctcctgggggtgacacaggagagggactcagcccttcgcaagagccagggcctgcagagcaagctggagagcctggagcaagtgctgaagcacatgcgggaggtggcccagcggcggcagcagctggaggtggagcatgaacaggctcggctcagcctacgggagaagcaggaggaggtccggagactgcagcaggcccaggctgaagcccagagggaacatgaaggagccgtgcagctgctggagtctaccttggattccatgcaggcccgggttcgagagctcgaagaacagtgccgcagccaaaccgagcagttcagcctcctggcacaggaactccaggctttccgcctgcacccgggccccttggatctgctcacatctgccctggactgtgggagccttggagactgcccaccacccccctgctgctgctccattccccagccttgccgggggtctggccccaaagaccttgacctcccgccgggctcccctgggcgctgcaccccaaagtcttccgagcctgcccctgccactctcactggggtccctcgaaggacagccaagaaggcagagtctctctccaactcctcccactccgagtccatccacaacagccccaagtcatgccctacacctgaggtggacacagccagtgaggtagaggagctggaggcagacagtgtctccctgctcccagctgcgccagagggcagccggggaggagccaggatccaggtcttcctagcacgttatagctacaacccctttgagggtcccaatgagaatccagaagcagagcttccgctgacagctggcgagtacatctacatctatggcaacatggatgaggatggcttttttgaaggagagctcatggatggccgaaggggcctggtcccttccaattttgtagagcgtgtgtcggatgatgacctcctgacctccctccctccagagctggccgatttgtcccacagctcaggccctgaactcagtttcctgagtgtaggtgggggtggcagcagtagcgggggccaaagcagtgtgggaaggagccagcccagacctgaggaggaggatgcaggggacgagctcagtctgagcccatcaccggagggcctgggcgagcctcctgccgtgccttacccccgccgtctggtggtcctcaagcagctggcccacagcgtggtgctggcctgggagccgcctcctgagcaagtggagctacacggcttccatatctgtgtgaatggggagctgcgacaggccctggggcctggggcgccacccaaggccgtgctggagaacctggacctgtgggccgggccccttcacatttctgtccaggccctgactagccggggcagctctgacccactgcgctgttgcttggcggtgggtgcccgggccggagtggtgcccagccagctgcgggtccatcggttgacagccacatctgctgagatcacctgggtgcccggcaatagcaacttggcccatgccatctacctcaatggggaagagtgcccacctgccagccccagtacctactgggccaccttctgccacttacggcctggcacaccctatcaggcccaagtggaggctcagctcccaccccaagggccctgggaaccaggctgggagaggctggagcagcgggctgccaccctgcagttcaccacactcccagcaggcccacctgatgcccctctggatgtgcagatcgagcctgggccctcccctgggatcttgatcatcagttggctcccagtcaccatcgatgctgctggcacatccaacggtgtccgggtcacaggctatgccatctacgctgatgggcagaagatcatggaggtggcctcacccacggcaggcagtgtactggtggagttgtcccagctgcagctgctgcaggtgtgtcgtgaggtggtcgtgcgcaccatgtcgccccacggggagtcggcggactccatcccggctcctatcactcccgccctggctccggccagcctgccagcccgagtctcctgcccctcaccgcacccaagcccagaggccagagcgccccttgcttcagcctccccagggcctggagaccccagctctcctctccagcaccctgctccccttggaactcaagagcctccaggagcaccccctgcaagcccttccagagagatggcaaaagggtcccacgaggaccctccagcaccttgctcccaggaggaggctggggcagcagtgctgggcacctcagaggagaggacagccagcacatctaccctgggtgagaaggaccctggccccgcagctccctcactggccaagcaggaggccgagtggactgcaggagaggcctgtccggcctccagctccacccagggagcacgggcccagcaggcgccaaataccgagatgtgccaaggaggagacccagggtctgggctgaggcccagggctgagaaggaggacacagcagagcttggggttcatctggtgaactccctcgtggaccacggccgcaactcagacctgtcagacatccaggaggaagaggaagaggaggaggaggaggaggaagaggagctgggttccaggacttgctccttccagaagcaggttgctggcaacagcatcagggagaatggggccaagtcccagcccgaccccttttgtgagactgacagcgatgaggagatcttggagcagatcctggagctgcccctccagcagttctgtagcaagaagctctttagcatcccggaggaggaggaagaggaagaggaggacgaggaggaggagaagtcaggggcaggctgttcttcccgagaccctggcccgcctgaacctgcattgctggggctgggctgtgacagtggtcagccccgaagacctggccagtgtcccttgtctcctgagtcctccagggctggagactgcctggaagacatgcctggattagttggtggaagcagccggaggagaggagggggctcccctgagaagcccccaagccgcaggcggcctccagatccccgagaacactgcagccgacttctcagcaacaatgggccccaggcctctggacgactgggccccacacgggagaggggtggcctccccgtaattgagggccccaggactggactagaggctagcgggagaggccggctgggcccttcccggaggtgctcccgtggccgggcgctggagcctggcctggccagctgcctttcccccaagtgcttggaaatcagcattgaatatgattcggaggatgagcaggaggcgggcagcgggggcatcagcatcaccagctcctgctaccctggagatggggaggcctggggcacagcaactgtaggaaggcccagggggcctccgaaggccaattcaggccccaagccctacccacgcctcccagcctgggagaaaggggaaccagagcggagaggccgcagtgcgacgggcagagccaaggagccactctcccgggcaacagagaccggagaggccagagggcaggacggctctgggcggaggggcccccagaagagaggtgtccgagtcctcaggccaagcactgcagagctagtccctgcgaggagcccctcagaaacactggcttaccagcacctacccgtcaggatctttgtggctctgtttgactatgaccccgtgtcaatgtcgcccaatcctgatgctggagaagaagagcttcccttccgagagggtcagatcctgaaggtgtttggggacaaggatgccgatggcttctaccagggcgaaggtgggggccggacaggctacattccctgcaacatggtggctgaggtggctgtggacagccctgctgggagacagcaactgctccagcggggttatttgtccccagatattctccttgagggctcagggaatggtccgtttgtgtactccacagcccacacaactgggcctcctcccaagccccgccgctccaagaaagctgagtcggaaggccctgcccagccctgtccaggcccccctaagctggtcccctctgctgacctgaaagctccccactccatggtggctgcatttgactacaacccccaggagagttcccccaatatggacgtggaggcagagctgcccttccgggcaggggatgtcattactgtgtttgggggcatggacgatgacggtttctactatggggaattaaatggacaaaggggcctggttccatccaacttcctggagggccctgggcctgaggcaggcggcctggacagggaacccaggacaccccaggctgagagtcaggactggggctgcaccacacaagggtccccagggcccccaggtgggccttgtacccccagctctggcagcgcccccaggattgaacgtggggagccccagggcagaagcgagaaggtgtggggtttcttctccaaggggaagcagctcctcaggaggctgggctctgggaagaaggagtgaagctgtggcccatcctgcaggcagaagaggccctgagaggcccccagatcactgtctctgctgagcagggaaggctcagactgggcccagagcccccgttcttctgcgttaacactgtggcattcagagggaatcaaagagccttggtgaaggtcagagctaaatggctccttaaggatgaactctctagagaagcaccttcctcctacaggaggggaaactgagcccacagtgagtatgtaacttgaccaaggtcactgagccaggactggacccaggaccctcgcgtcctggtccacccacctcgtctactagtgtcccacagtgctgcgctagtcccttctgccacccttcccagtcccaggacgggccctggagggagaaaggagcctgtgccccctgatggctctggctgtcctgatcctgtcttccctcccctgaaggaaagtttgcactggattttattggagccccatctccccagcgggcaggcgggcggagcctgtatatatgtatatactcagtgcctcagttcagcttcctccacctcgcttccactgcacaggcccaggaaggagaaaggccaagccaaagtgggccccaccctgcccccgtcgtgctccatccttccctgccggggcctgctggcccctgtaaggtcccgcccccaaagaccctggggccagcggggccgaaagcggagttgggtttgccttattttgctcattggattcaagttcttttgcatagttttcttctaacccctgttggagtccaggggctggagaaaaggacagatttatgcagctattttcatacattccctgttcagagtggggtaggggttctccgccgttacccgatccactccatcccccaccctctgaggggtgagtgtgtctttgcatgtttcctttgctgtggtgggagatagtttgactgaacccccaccttgaccttggtctccaggggtgtggaatggtgggggaatttgtttaaaaagacattttattataataaagtctattttc

SEQ ID NO: 3472 - DNA, 1364 bp, Homo sapiens
  source 1..1364: mol_type = unassigned DNA
acttccccgggagccggaagtcccgtctcacggttgccctggcagcgcgcgaggctggtgagtcggcagccctgtggcagccggcgggctggtttccatggttgcacgattaggaaccaccagctgctgcatcccatggccaggggtggcgtccaggtggcagagcagctaggaacgcaaggcctgaacctggggccagacaccctgctctcccggccatggtcaacgaccctccagtacctgccttactgtgggcccaggaggtgggccaagtcttggcaggccgtgcccgcaggctgctgctgcagtttggggtgctcttctgcaccatcctccttttgctctgggtgtctgtcttcctctatggctccttctactattcctatatgccgacagtcagccacctcagccctgtgcatttctactacaggaccgactgtgattcctccaccacctcactctgctccttccctgttgccaatgtctcgctgactaagggtggacgtgatcgggtgctgatgtatggacagccgtatcgtgttaccttagagcttgagctgccagagtcccctgtgaatcaagatttgggcatgttcttggtcaccatttcctgctacaccagaggtggccgaatcatctccacttcttcgcgttcggtgatgctgcattaccgctcagacctgctccagatgctggacacactggtcttctctagcctcctgctatttggctttgcagagcagaagcagctgctggaggtggaactctacgcagactatagagagaactcgtacgtgccgaccactggagcgatcattgagatccacagcaagcgcatccagctgtatggagcctacctccgcatccacgcgcacttcactgggctcaggttaacatccgaaaaagagacaattcccggaaggaagtccaacgaaggatctctgctcatcagccagggcctgaaggccaggaggagtcaactccgcaatcagatgttacagaggatggtgagagccctgaagatccctcagggacagagggtcagctgtccgaggaggagaaaccagatcagcagcccctgagcggagaagaggagctagagcctgaggccagtgatggttcaggctcctgggaagatgcagctttgctgacggaggccaacctgcctgctcctgctcctgcttctgcttctgcccctgtcctagagactctgggcagctctgaacctgctgggggtgctctccgacagcgccccacctgctctagttcctgaagaaaaggggcagactcctcacattccagcactttcccacctgactcctctcccctcgtttttccttcaataaactattttgtgtcagctt

SEQ ID NO: 3473 - DNA, 1683 bp, Homo sapiens
  source 1..1683: mol_type = unassigned DNA
agtcgcccccctcctcctttcctccctctactctgacacagcacttagcacctgaatcttcgtttctctcccagggaccctccattttccatatccaggaaaatgtgatgcgccacaggtatcagcgtctggatcgccacttcacgttttagccacaagtgactcagtggaagatccagagtcaacagaggctcgtcaggaagatgtctacagaaaaggtagaccaaaaggaggaagctggggaaaaagaggtgtgcggagaccagatcaaaggaccggacaaagaggaggaaccaccagctgctgcatcccatggccaggggtggcgtccaggtggcagagcagctaggaacgcaaggcctgaacctggggccagacaccctgctctcccggccatggtcaacgaccctccagtacctgccttactgtgggcccaggaggtgggccaagtcttggcaggccgtgcccgcaggctgctgctgcagtttggggtgctcttctgcaccatcctccttttgctctgggtgtctgtcttcctctatggctccttctactattcctatatgccgacagtcagccacctcagccctgtgcatttctactacaggaccgactgtgattcctccaccacctcactctgctccttccctgttgccaatgtctcgctgactaagggtggacgtgatcgggtgctgatgtatggacagccgtatcgtgttaccttagagcttgagctgccagagtcccctgtgaatcaagatttgggcatgttcttggtcaccatttcctgctacaccagaggtggccgaatcatctccacttcttcgcgttcggtgatgctgcattaccgctcagacctgctccagatgctggacacactggtcttctctagcctcctgctatttggctttgcagagcagaagcagctgctggaggtggaactctacgcagactatagagagaactcgtacgtgccgaccactggagcgatcattgagatccacagcaagcgcatccagctgtatggagcctacctccgcatccacgcgcacttcactgggctcagatacctgctatacaacttcccgatgacctgcgccttcataggtgttgccagcaacttcaccttcctcagcgtcatcgtgctcttcagctacatgcagtgggtgtgggggggcatctggccccgacaccgcttctctttgcaggttaacatccgaaaaagagacaattcccggaaggaagtccaacgaaggatctctgctcatcagccagggcctgaaggccaggaggagtcaactccgcaatcagatgttacagaggatggtgagagccctgaagatccctcagggacagagggtcagctgtccgaggaggagaaaccagatcagcagcccctgagcggagaagaggagctagagcctgaggccagtgatggttcaggctcctgggaagatgcagctttgctgacggaggccaacctgcctgctcctgctcctgcttctgcttctgcccctgtcctagagactctgggcagctctgaacctgctgggggtgctctccgacagcgccccacctgctctagttcctgaagaaaaggggcagactcctcacattccagcactttcccacctgactcctctcccctcgtttttccttcaataaactattttgtgtcagctt

SEQ ID NO: 3474 - DNA, 1693 bp, Homo sapiens
  source 1..1693: mol_type = unassigned DNA
cggcgggctggtttccatggttgcacgattaggtaggggctccgggcgctttgcccacccccgagctggaggggactggcgggaagcggcggttggctgcagggcgctccgccgggcgtggggtgtagccgtgtcggtgagcgagctctgctcgaggcggagaggagaaactcgggaagcaattgtggctactctaaggctactggtttcgagtcaggccgtgcgaccttaggcaagtcgcacattctctccgtgcagctgcctagcagtgtggattcagtatcaccgtgtgtgtaaagctctttctaagaatcgtaaggaaccaccagctgctgcatcccatggccaggggtggcgtccaggtggcagagcagctaggaacgcaaggcctgaacctggggccagacaccctgctctcccggccatggtcaacgaccctccagtacctgccttactgtgggcccaggaggtgggccaagtcttggcaggccgtgcccgcaggctgctgctgcagtttggggtgctcttctgcaccatcctccttttgctctgggtgtctgtcttcctctatggctccttctactattcctatatgccgacagtcagccacctcagccctgtgcatttctactacaggaccgactgtgattcctccaccacctcactctgctccttccctgttgccaatgtctcgctgactaagggtggacgtgatcgggtgctgatgtatggacagccgtatcgtgttaccttagagcttgagctgccagagtcccctgtgaatcaagatttgggcatgttcttggtcaccatttcctgctacaccagaggtggccgaatcatctccacttcttcgcgttcggtgatgctgcattaccgctcagacctgctccagatgctggacacactggtcttctctagcctcctgctatttggctttgcagagcagaagcagctgctggaggtggaactctacgcagactatagagagaactcgtacgtgccgaccactggagcgatcattgagatccacagcaagcgcatccagctgtatggagcctacctccgcatccacgcgcacttcactgggctcagatacctgctatacaacttcccgatgacctgcgccttcataggtgttgccagcaacttcaccttcctcagcgtcatcgtgctcttcagctacatgcagtgggtgtgggggggcatctggccccgacaccgcttctctttgcaggttaacatccgaaaaagagacaattcccggaaggaagtccaacgaaggatctctgctcatcagccagggcctgaaggccaggaggagtcaactccgcaatcagatgttacagaggatggtgagagccctgaagatccctcagggacagagggtcagctgtccgaggaggagaaaccagatcagcagcccctgagcggagaagaggagctagagcctgaggccagtgatggttcaggctcctgggaagatgcagctttgctgacggaggccaacctgcctgctcctgctcctgcttctgcttctgcccctgtcctagagactctgggcagctctgaacctgctgggggtgctctccgacagcgccccacctgctctagttcctgaagaaaaggggcagactcctcacattccagcactttcccacctgactcctctcccctcgtttttccttcaata

SEQ ID NO: 3475 - DNA, 1516 bp, Homo sapiens
  source 1..1516: mol_type = unassigned DNA
tacaaaagcggccggcggagaggggcgggacttccccgggagccggaagtcccgtctcacggttgccctggcagcgcgcgaggctggtgagtcggcagccctgtggcagccggcgggctggtttccatggttgcacgattaggaaccaccagctgctgcatcccatggccaggggtggcgtccaggtggcagagcagctaggaacgcaaggcctgaacctggggccagacaccctgctctcccggccatggtcaacgaccctccagtacctgccttactgtgggcccaggaggtgggccaagtcttggcaggccgtgcccgcaggctgctgctgcagtttggggtgctcttctgcaccatcctccttttgctctgggtgtctgtcttcctctatggctccttctactattcctatatgccgacagtcagccacctcagccctgtgcatttctactacaggaccgactgtgattcctccaccacctcactctgctccttccctgttgccaatgtctcgctgactaagggtggacgtgatcgggtgctgatgtatggacagccgtatcgtgttaccttagagcttgagctgccagagtcccctgtgaatcaagatttgggcatgttcttggtcaccatttcctgctacaccagaggtggccgaatcatctccacttcttcgcgttcggtgatgctgcattaccgctcagacctgctccagatgctggacacactggtcttctctagcctcctgctatttggctttgcagagcagaagcagctgctggaggtggaactctacgcagactatagagagaactcgtacgtgccgaccactggagcgatcattgagatccacagcaagcgcatccagctgtatggagcctacctccgcatccacgcgcacttcactgggctcagatacctgctatacaacttcccgatgacctgcgccttcataggtgttgccagcaacttcaccttcctcagcgtcatcgtgctcttcagctacatgcagtgggtgtgggggggcatctggccccgacaccgcttctctttgcaggttaacatccgaaaaagagacaattcccggaaggaagtccaacgaaggatctctgctcatcagccagggcctgaaggccaggaggagtcaactccgcaatcagatgttacagaggatggtgagagccctgaagatccctcagggacagagggtcagctgtccgaggaggagaaaccagatcagcagcccctgagcggagaagaggagctagagcctgaggccagtgatggttcaggctcctgggaagatgcagctttgctgacggaggccaacctgcctgctcctgctcctgcttctgcttctgcccctgtcctagagactctgggcagctctgaacctgctgggggtgctctccgacagcgccccacctgctctagttcctgaagaaaaggggcagactcctcacattccagcactttcccacctgactcctctcccctcgtttttccttcaata

SEQ ID NO: 3476 - DNA, 1440 bp, Homo sapiens
  source 1..1440: mol_type = unassigned DNA
tacaaaagcggccggcggagaggggcgggacttccccgggagccggaagtcccgtctcacggttgccctggcagcgcgcgaggctggaaccaccagctgctgcatcccatggccaggggtggcgtccaggtggcagagcagctaggaacgcaaggcctgaacctggggccagacaccctgctctcccggccatggtcaacgaccctccagtacctgccttactgtgggcccaggaggtgggccaagtcttggcaggccgtgcccgcaggctgctgctgcagtttggggtgctcttctgcaccatcctccttttgctctgggtgtctgtcttcctctatggctccttctactattcctatatgccgacagtcagccacctcagccctgtgcatttctactacaggaccgactgtgattcctccaccacctcactctgctccttccctgttgccaatgtctcgctgactaagggtggacgtgatcgggtgctgatgtatggacagccgtatcgtgttaccttagagcttgagctgccagagtcccctgtgaatcaagatttgggcatgttcttggtcaccatttcctgctacaccagaggtggccgaatcatctccacttcttcgcgttcggtgatgctgcattaccgctcagacctgctccagatgctggacacactggtcttctctagcctcctgctatttggctttgcagagcagaagcagctgctggaggtggaactctacgcagactatagagagaactcgtacgtgccgaccactggagcgatcattgagatccacagcaagcgcatccagctgtatggagcctacctccgcatccacgcgcacttcactgggctcagatacctgctatacaacttcccgatgacctgcgccttcataggtgttgccagcaacttcaccttcctcagcgtcatcgtgctcttcagctacatgcagtgggtgtgggggggcatctggccccgacaccgcttctctttgcaggttaacatccgaaaaagagacaattcccggaaggaagtccaacgaaggatctctgctcatcagccagggcctgaaggccaggaggagtcaactccgcaatcagatgttacagaggatggtgagagccctgaagatccctcagggacagagggtcagctgtccgaggaggagaaaccagatcagcagcccctgagcggagaagaggagctagagcctgaggccagtgatggttcaggctcctgggaagatgcagctttgctgacggaggccaacctgcctgctcctgctcctgcttctgcttctgcccctgtcctagagactctgggcagctctgaacctgctgggggtgctctccgacagcgccccacctgctctagttcctgaagaaaaggggcagactcctcacattccagcactttcccacctgactcctctc

SEQ ID NO: 3477 - DNA, 2038 bp, Homo sapiens
  source 1..2038: mol_type = unassigned DNA
atcttaggtataaaatcggctccagtcgcggtaactgaagccaagctccgcccctaccctcctaagagttcctctgctgtacgactgcactcccgcaccctcccctaaatcccccctcttcggcctgtttaccttttaacttggcttcgttgcacgtttgtgtgtgtgtgtttgctcttcgcagcctcttgagcgtcttttgtacttaattcttacactgtggacgctctctcgcgcccgccatcccccgacccctctgatctccgatccttgacgatgtctagcctgcattgattggcccttttccctgggtatggcagatctattgcttgatgatcctctccccccaagaattctaacacaggagctgtcctgaggctctggatgactttattcttcaaatggctttaccctcccagtagctccagggaccctccattttccatatccaggaaaatgtgatgcgccacaggtatcagcgtctggatcgccacttcacgttttagccacaagtgactcagtggaagatccagagtcaacagaggctcgtcaggaagatgtctacagaaaaggtagaccaaaaggaggaagctggggaaaaagaggtgtgcggagaccagatcaaaggaccggacaaagaggaggaaccaccagctgctgcatcccatggccaggggtggcgtccaggtggcagagcagctaggaacgcaaggcctgaacctggggccagacaccctgctctcccggccatggtcaacgaccctccagtacctgccttactgtgggcccaggaggtgggccaagtcttggcaggccgtgcccgcaggctgctgctgcagtttggggtgctcttctgcaccatcctccttttgctctgggtgtctgtcttcctctatggctccttctactattcctatatgccgacagtcagccacctcagccctgtgcatttctactacaggaccgactgtgattcctccaccacctcactctgctccttccctgttgccaatgtctcgctgactaagggtggacgtgatcgggtgctgatgtatggacagccgtatcgtgttaccttagagcttgagctgccagagtcccctgtgaatcaagatttgggcatgttcttggtcaccatttcctgctacaccagaggtggccgaatcatctccacttcttcgcgttcggtgatgctgcattaccgctcagacctgctccagatgctggacacactggtcttctctagcctcctgctatttggctttgcagagcagaagcagctgctggaggtggaactctacgcagactatagagagaactcgtacgtgccgaccactggagcgatcattgagatccacagcaagcgcatccagctgtatggagcctacctccgcatccacgcgcacttcactgggctcagatacctgctatacaacttcccgatgacctgcgccttcataggtgttgccagcaacttcaccttcctcagcgtcatcgtgctcttcagctacatgcagtgggtgtgggggggcatctggccccgacaccgcttctctttgcaggttaacatccgaaaaagagacaattcccggaaggaagtccaacgaaggatctctgctcatcagccagggcctgaaggccaggaggagtcaactccgcaatcagatgttacagaggatggtgagagccctgaagatccctcagggacagagggtcagctgtccgaggaggagaaaccagatcagcagcccctgagcggagaagaggagctagagcctgaggccagtgatggttcaggctcctgggaagatgcagctttgctgacggaggccaacctgcctgctcctgctcctgcttctgcttctgcccctgtcctagagactctgggcagctctgaacctgctgggggtgctctccgacagcgccccacctgctctagttcctgaagaaaaggggcagactcctcacattccagcactttcccacctgactcctctcccctcgtttttccttcaataaactattttgtgtcagcttc

SEQ ID NO: 3478 - DNA, 992 bp, Homo sapiens
  source 1..992: mol_type = unassigned DNA
atggttgcacgattaggtaggggctccgggcgctttgcccacccccgagctggaggggactggcgggaagcggcggttggctgcagggcgctccgccgggcgtggggtgtagccgtgtcggtgagcgagctctgctcgaggcggagaggagaaactcgggaagcaattgtggctactctaaggctactggtttcgagtcaggccgtgcgaccttaggaaccaccagctgctgcatcccatggccaggggtggcgtccaggtggcagagcagctaggaacgcaaggcctgaacctggggccagacaccctgctctcccggccatggtcaacgaccctccagtacctgccttactgtgggcccaggaggtgggccaagtcttggcaggccgtgcccgcaggctgctgctgcagtttggggtgctcttctgcaccatcctccttttgctctgggtgtctgtcttcctctatggctccttctactattcctatatgccgacagtcagccacctcagccctgtgcatttctactacaggaccgactgtgattcctccaccacctcactctgctccttccctgttgccaatgtctcgctgactaagggtggacgtgatcgggtgctgatgtatggacagccgtatcgtgttaccttagagcttgagctgccagagtcccctgtgaatcaagatttgggcatgttcttggtcaccatttcctgctacaccagaggtggccgaatcatctccacttcttcgcgttcggtgatgctgcattaccgctcagacctgctccagatgctggacacactggtcttctctagcctcctgctatttggctttgcagagcagaagcagctgctggaggtggaactctacgcagactatagagagaactcgtacgtgccgaccactggagcgatcattgagatccacagcaagcgcatccagctgtatggagcctacctccgcatccacgcgcacttcactgggctcag

SEQ ID NO: 3479 - DNA, 794 bp, Homo sapiens
  source 1..794: mol_type = unassigned DNA
agtgattcttcgttatggccgcccgtgtgccttcgactcaatcgggaggacaccgaaatccagatttcggggttgcagggcgcgggccccggcttggttagggcaggggcagccattttgagaccagaagagggcggaagggaccatattgagaacgccggttgcctgggggccgccattttaagagaagccctgtacggtaaactccgtgacgtgggggctgccatgttggtacggccatcttggaatgggagtggctgtgggcgcagccatcttagatctattgcttgatgatcctctccccccaagaattctaacacaggagctgtcctgaggctctggatgactttattcttcaaatggctttaccctcccagtagctccagggaccctccattttccatatccaggaaaatgtgatgcgccacaggtatcagcgtctggatcgccacttcacgttttagccacaagtgactcagtggaagatccagagtcaacagaggctcgtcaggaagatgtctacagaaaaggtagaccaaaaggaggaagctggggaaaaagaggtgtgcggagaccagatcaaaggaccggacaaagaggaggaaccaccagctgctgcatcccatggccaggggtggcgtccaggtggcagagcagctaggaacgcaaggcctgaacctggggccagacaccctgctctcccggccatggtcaacgaccctccagtacctgccttactgtgggcccaggaggtgggccaagtcttggcaggccgtgcccgcaggctgctgctg

SEQ ID NO: 3480 - DNA, 865 bp, Homo sapiens
  source 1..865: mol_type = unassigned DNA
ctctgatctccgatccttgacgatgtctagcctgcattgattggcccttttccctggggaccctccattttccatatccaggaaaatgtgatgcgccacaggtatcagcgtctggatcgccacttcacgttttagccacaagtgactcagtggaagatccagagtcaacagaggctcgtcaggaagatgtctacagaaaaggtagaccaaaaggaggaagctggggaaaaagaggtgtgcggagaccagatcaaaggaccggacaaagaggaggaaccaccagctgctgcatcccatggccaggggtggcgtccaggtggcagagcagctaggaacgcaaggcctgaacctggggccagacaccctgctctcccggccatggtcaacgaccctccagtacctgccttactgtgggcccaggaggtgggccaagtcttggcaggccgtgcccgcaggctgctgctgcagtttggggtgctcttctgcaccatcctccttttgctctgggtgtctgtcttcctctatggctccttctactattcctatatgccgacagtcagccacctcagccctgtgcatttctactacaggaccgactgtgattcctccaccacctcactctgctccttccctgttgccaatgtctcgctgactaagggtggacgtgatcgggtgctgatgtatggacagccgtatcgtgttaccttagagcttgagctgccagagtcccctgtgaatcaagatttgggcatgttcttggtcaccatttcctgctacaccagaggtggccgaatcatctccacttcttcgcgttcggtgatgctgcattaccgctcagacctgctccagatgctggacacactgg

SEQ ID NO: 3481 - DNA, 553 bp, Homo sapiens
  source 1..553: mol_type = unassigned DNA
agagtctgacggggccctgctgtgggtggagcaaagggtgcctcatatctctggggtgcttggggtcggccacaaaggtggtaggaaatggggtcgacagataggtgagggtgggccttgtgcttcagataacctcacatggtcaggcaagggttagggatgggatgcaaggagcctaaggggctcacaacaattactgacctaaggaagggcccaggagagggaaaagggaggagttgtgagaagggacaggggagctcagaggagagcacagaagaacttcttctcccggaaggggttctccgaagtgggcacaggggtgatgaggggatcctcacaggcgtgggcatcacaggaccctccattttccatatccaggaaaatgtgatgcgccacaggtatcagcgtctggatcgccacttcacgttttagccacaagtgactcagtggaagatccagagtcaacagaggctcgtcaggaagatgtctacagaaaaggtagaccaaaaggaggaagctggggaaaaagaggtgtgcggagaccagatcaaag

SEQ ID NO: 3482 - DNA, 539 bp, Homo sapiens
  source 1..539: mol_type = unassigned DNA
agtgattcttcgttatggccgcccgtgtgccttcgactcaatcgggaggacaccgaaatccagatttcggggttgcagggcgcgggccccggcttggttagggcaggggcagccattttgagaccagaagagggcggaagggaccatattgagaacgccggttgcctgggggccgccattttaagagaagccctctctgaagacctcaaccaaccctgatgaggagggcacatcacccctgtctgctccagtgagccccaacaggagaaaaacaggccattacttacctgaagccacaagcggcagtagcagccctgggtgtaggggaccctccattttccatatccaggaaaatgtgatgcgccacaggtatcagcgtctggatcgccacttcacgttttagccacaagtgactcagtggaagatccagagtcaacagaggctcgtcaggaagatgtctacagaaaaggtagaccaaaaggaggaagctggggaaaaagaggtgtgcggagaccagatcaaaggaccggacaaagagg

SEQ ID NO: 3483 - DNA, 662 bp, Homo sapiens
  source 1..662: mol_type = unassigned DNA
attttgagaccagaagagggcggaagggaccatattgagaacgccggttgcctgggggccgccattttaagagaagccctgtacggtaaactccgtgacgtgggggctgccatgttggtacggccatcttggaatgggagtggctgtgggcgcagccatcttagggaccctccattttccatatccaggaaaatgtgatgcgccacaggtatcagcgtctggatcgccacttcacgttttagccacaagtgactcagtggaagatccagagtcaacagaggctcgtcaggaagatgtctacagaaaaggtagaccaaaaggaggaagctggggaaaaagaggtgtgcggagaccagatcaaaggaccggacaaagaggaggaaccaccagctgctgcatcccatggccaggggtggcgtccaggtggcagagcagctaggaacgcaaggcctgaacctggggccagacaccctgctctcccggccatggtcaacgaccctccagtacctgccttactgtgggcccaggaggtgggccaagtcttggcaggccgtgcccgcaggctgctgctgcagtttggggtgctcttctgcaccatcctccttttgctctgggtgtctgtcttcctctatggctccttctactattcctatatgccgaca

SEQ ID NO: 3484 - DNA, 585 bp, Homo sapiens
  source 1..585: mol_type = unassigned DNA
acctgaatcttcgtttctctcccagggaccctccattttccatatccaggaaaatgtgatgcgccacaggtatcagcgtctggatcgccacttcacgttttagccacaagtgactcagtggaagatccagagtcaacagaggctcgtcaggaagatgtctacagaaaaggtagaccaaaaggaggaagctggggaaaaagaggtgtgcggagaccagatcaaaggaccggacaaagaggaggaacgcaaggcctgaacctggggccagacaccctgctctcccggccatggtcaacgaccctccagtacctgccttactgtgggcccaggaggtgggccaagtcttggcaggccgtgcccgcaggctgctgctgcagtttggggtgctcttctgcaccatcctccttttgctctgggtgtctgtcttcctctatggctccttctactattcctatatgccgacagtcagccacctcagccctgtgcatttctactacaggaccgactgtgattcctccaccacctcactctgctccttccctgttgccaatgtctcgctgactaagggtggacgtgatcgggtgc

SEQ ID NO: 3485 - DNA, 1829 bp, Homo sapiens
  source 1..1829: mol_type = unassigned DNA
tcaggggtcagaacactggtggagcagatcctttagcctctggattttagggccatggtagagggggtgttgccctaaattccagccctggtctcagcccaacaccctccaagaagaaattagaggggccatggccaggctgtgctagccgttgcttctgagcagattacaagaagggactaagacaaggactcctttgtggaggtcctggcttagggagtcaagtgacggcggctcagcactcacgtgggcagtgccagcctctaagagtgggcaggggcactggccacagagtcccagggagtcccaccagcctagtcgccagaccttctgtgggatcatcggacccacctggaaccccacctgctggccctcacggaagaacaacagctgatgtttgagaaactgactctgtattgcgacagctacatccagctcatccccatttccttcgtgctggggaaaggtgcggactgcagccagtgaaactgaagttagacgttaggcttctacgtgacgctggtcgtgacccgctggtggaaccagtacgagaacctgccgtggcccgaccgcctcatgagcctggtgtcgggcttcgtcgaaggcaaggacgagcaaggccggctgctgcggcgcacgctcatccgctacgccaacctgggcaacgtgctcatcctgcgcagcgtcagcaccgcagtctacaagcgcttccccagcgcccagcacctggtgcaagcagcctgaacaaagaggagatggagttccagcccaatcaggaggacgaggaggatgctcacgctggcatcattggccgcttcctaggcctgcagtcccatgatcaccatcctcccagggcaaactcaaggaccaaactactgtggcccaagagggaatcccttctccacgagggcctgcccaaaaaccacaaggcagccaaacagaacgttaggggccaggaagacaacaaggcctggaagcttaaggctgtggacgccttcaagtctgccccactgtatcagaggccaggctactacagtgccccacagacgcccctcagccccactcccatgttcttccccctagaaccatcagcgccgtcaaagcttcacagtgtcacaggcatagacaccaaagacaaaagcttaaagactgtgagttctggggccaagaaaagttttgaattgctctcagagagcgatggggccttgatggagcacccagaagtatctcaagtgaggaggaaaactgtggagtttaacctgacggatatgccagagatccccgaaaatcacctcaaagaacctttggaacaatcaccaaccaacatacacactacactcaaagatcacatggatccttattgggccttggaaaacaggtctgtcctccacctgaaccaggggcactgcattgccctgtgccccaccccagcttcccttgctctgagcctacccttcctccacaatttcctagggttccatcactgccagagcacactggacctacgcccagcactggcttggggtatatacttggccaccttcacagggatcctagggaagtgttcgggaccttttctcacttcaccctggtatcacccggaagacttcttgggaccaggtgaaggaagatgaggttgtgctgaccagaatgctgctggagaactgccccagggctgacaggccaggcttagctgagcagatgttatcactggccccaacttactttgagcaagggtggctgacccaaaaccatgaggtggcagtcagctggatgacagatgaacacttcccccataactatttagggtagtacccaagcactacagg

SEQ ID NO: 3486 - DNA, 2598 bp, Homo sapiens
  source 1..2598: mol_type = unassigned DNA
caaggctgggaccagaaaccaggactgttgactgcagcccggtattcattctttccatagcccacagggctgtcaaagaccccagggcctagtcagaggctcctccttcctggagagttcctggcacagaagttgaagctcagcacagccccctaacccccaactctctctgcaaggcctcaggggtcagaacactggtggagcagatcctttagcctctggattttagggccatggtagagggggtgttgccctaaattccagccctggtctcagcccaacaccctccaagaagaaattagaggggccatggccaggctgtgctagccgttgcttctgagcagattacaagaagggactaagacaaggactcctttgtggaggtcctggcttagggagtcaagtgacggcggctcagcactcacgtgggcagtgccagcctctaagagtgggcaggggcactggccacagagtcccagggagtcccaccagcctagtcgccagaccttctgtgggatcatcggacccacctggaaccccacctgacccaagcccacctgctgcagcccactgcctggccatgaccatcacttacacaagccaagtggctaatgcccgcttaggctccttctcccgcctgctgctgtgctggcggggcagcatctacaagctgctatatggcgagttcttaatcttcctgctctgctactacatcatccgctttatttataggctggccctcacggaagaacaacagctgatgtttgagaaactgactctgtattgcgacagctacatccagctcatccccatttccttcgtgctgggcttctacgtgacgctggtcgtgacccgctggtggaaccagtacgagaacctgccgtggcccgaccgcctcatgagcctggtgtcgggcttcgtcgaaggcaaggacgagcaaggccggctgctgcggcgcacgctcatccgctacgccaacctgggcaacgtgctcatcctgcgcagcgtcagcaccgcagtctacaagcgcttccccagcgcccagcacctggtgcaagcaggctttatgactccggcagaacacaagcagttggagaaactgagcctaccacacaacatgttctgggtgccctgggtgtggtttgccaacctgtcaatgaaggcgtggcttggaggtcgaatccgggaccctatcctgctccagagcctgctgaacgagatgaacaccttgcgtactcagtgtggacacctgtatgcctacgactggattagtatcccactggtgtatacacaggtggtgactgtggcggtgtacagcttcttcctgacttgtctagttgggcggcagtttctgaacccagccaaggcctaccctggccatgagctggacctcgttgtgcccgtcttcacgttcctgcagttcttcttctatgttggctggctgaaggtgtccctgttggctgtggatgagatgcaccaggacctgcctcggatggagccggacatgtactggaataagcccgagccacagcccccctacacagctgcttccgcccagttccgtcgagcctcctttatgggctccaccttcaacatcagcctgaacaaagaggagatggagttccagcccaatcaggaggacgaggaggatgctcacgctggcatcattggccgcttcctaggcctgcagtcccatgatcaccatcctcccagggcaaactcaaggaccaaactactgtggcccaagagggaatcccttctccacgagggcctgcccaaaaaccacaaggcagccaaacagaacgttaggggccaggaagacaacaaggcctggaagcttaaggctgtggacgccttcaagtctgccccactgtatcagaggccaggctactacagtgccccacagacgcccctcagccccactcccatgttcttccccctagaaccatcagcgccgtcaaagcttcacagtgtcacaggcatagacaccaaagacaaaagcttaaagactgtgagttctggggccaagaaaagttttgaattgctctcagagagcgatggggccttgatggagcacccagaagtatctcaagtgaggaggaaaactgtggagtttaacctgacggatatgccagagatccccgaaaatcacctcaaagaacctttggaacaatcaccaaccaacatacacactacactcaaagatcacatggatccttattgggccttggaaaacagggatgaagcacattcctaacctgcttcctaatggggatgcttcgccagccaggtcctcacctgtgtgtacaccagcaggacactgatccagtcacagccatacagctgtccacactgaagaacatgtcctacaacagcctgaatcaaatggttagcttaatagataaaaatcccagactacttcagcctttaatgccttttattcataaaaactgtgaaagctagactgaaccattggaaacatttaactcagactctggattcagagtcgggaacccttagttctatctgaatccaagacagccacaccttagtatactgcccaaactaatgagtttaataaatacaaatactcgtttc

SEQ ID NO: 3487 - DNA, 2740 bp, Homo sapiens
  source 1..2740: mol_type = unassigned DNA
agataagggcactgaggctgagagaggagctgaaacctacccggggtcaccacacacaggtggcaaggctgggaccagaaaccaggactgttgactgcagcccggtattcattctttccatagcccacagggctgtcaaagaccccagggcctagtcagaggctcctccttcctggagagttcctggcacagaagttgaagctcagcacagccccctaacccccaactctctctgcaaggcctcaggggtcagaacactggtggagcagatcctttagcctctggattttagggccatggtagagggggtgttgccctaaattccagccctggtctcagcccaacaccctccaagaagaaattagaggggccatggccaggctgtgctagccgttgcttctgagcagattacaagaagggactaagacaaggactcctttgtggaggtcctggcttagggagtcaagtgacggcggctcagcactcacgtgggcagtgccagcctctaagagtgggcaggggcactggccacagagtcccagggagtcccaccagcctagtcgccagaccttctgtgggatcatcggacccacctggaaccccacctgacccaagcccacctgctgcagcccactgcctggccatgaccatcacttacacaagccaagtggctaatgcccgcttaggctccttctcccgcctgctgctgtgctggcggggcagcatctacaagctgctatatggcgagttcttaatcttcctgctctgctactacatcatccgctttatttataggctggccctcacggaagaacaacagctgatgtttgagaaactgactctgtattgcgacagctacatccagctcatccccatttccttcgtgctgggcttctacgtgacgctggtcgtgacccgctggtggaaccagtacgagaacctgccgtggcccgaccgcctcatgagcctggtgtcgggcttcgtcgaaggcaaggacgagcaaggccggctgctgcggcgcacgctcatccgctacgccaacctgggcaacgtgctcatcctgcgcagcgtcagcaccgcagtctacaagcgcttccccagcgcccagcacctggtgcaagcaggctttatgactccggcagaacacaagcagttggagaaactgagcctaccacacaacatgttctgggtgccctgggtgtggtttgccaacctgtcaatgaaggcgtggcttggaggtcgaatccgggaccctatcctgctccagagcctgctgaacgagatgaacaccttgcgtactcagtgtggacacctgtatgcctacgactggattagtatcccactggtgtatacacaggtggtgactgtggcggtgtacagcttcttcctgacttgtctagttgggcggcagtttctgaacccagccaaggcctaccctggccatgagctggacctcgttgtgcccgtcttcacgttcctgcagttcttcttctatgttggctggctgaaggtggcagagcagctcatcaacccctttggagaggatgatgatgattttgagaccaactggattgtcgacaggaatttgcaggtgtccctgttggctgtggatgagatgcaccaggacctgcctcggatggagccggacatgtactggaataagcccgagccacagcccccctacacagctgcttccgcccagttccgtcgagcctcctttatgggctccaccttcaacatcagcctgaacaaagaggagatggagttccagcccaatcaggaggacgaggaggatgctcacgctggcatcattggccgcttcctaggcctgcagtcccatgatcaccatcctcccagggcaaactcaaggaccaaactactgtggcccaagagggaatcccttctccacgagggcctgcccaaaaaccacaaggcagccaaacagaacgttaggggccaggaagacaacaaggcctggaagcttaaggctgtggacgccttcaagtctgccccactgtatcagaggccaggctactacagtgccccacagacgcccctcagccccactcccatgttcttccccctagaaccatcagcgccgtcaaagcttcacagtgtcacaggcatagacaccaaagacaaaagcttaaagactgtgagttctggggccaagaaaagttttgaattgctctcagagagcgatggggccttgatggagcacccagaagtatctcaagtgaggaggaaaactgtggagtttaacctgacggatatgccagagatccccgaaaatcacctcaaagaacctttggaacaatcaccaaccaacatacacactacactcaaagatcacatggatccttattgggccttggaaaacagggatgaagcacattcctaacctgcttcctaatggggatgcttcgccagccaggtcctcacctgtgtgtacaccagcaggacactgatccagtcacagccatacagctgtccacactgaagaacatgtcctacaacagcctgaatcaaatggttagcttaatagataaaaatcccagactacttcagcctttaatgccttttattcataaaaactgtgaaagctagactgaaccattggaaacatttaactcagactctggattcagagtcgggaacccttagttctatctgaatccaagacagccacaccttagtatactgcccaaactaatgagtttaataaatacaaatactcgtt

SEQ ID NO: 3488 - DNA, 1023 bp, Homo sapiens
  source 1..1023: mol_type = unassigned DNA
acagagtcccagggagtcccaccagcctagtcgccagaccttctgtgggatcatcggacccacctggaaccccacctgacccaagcccacctgctgcagcccactgcctggccatgaccatcacttacacaagccaagtggctaatgcccgcttaggctccttctcccgcctgctgctgtgctggcggggcagcatctacaagctgctatatggcgagttcttaatcttcctgctctgctactacatcatccgctttatttataggctggccctcacggaagaacaacagctgatgtttgagaaactgactctgtattgcgacagctacatccagctcatccccatttccttcgtgctgggcttctacgtgacgctggtcgtgacccgctggtggaaccagtacgagaacctgccgtggcccgaccgcctcatgagcctggtgtcgggcttcgtcgaaggcaaggacgagcaaggccggctgctgcggcgcacgctcatccgctacgccaacctgggcaacgtgctcatcctgcgcagcgtcagcaccgcagtctacaagcgcttccccagcgcccagcacctggtgcaagcaggctttatgactccggcagaacacaagcagttggagaaactgagcctaccacacaacatgttctgggtgccctgggtgtggtttgccaacctgtcaatgaaggcgtggcttggaggtcgaatccgggaccctatcctgctccagagcctgctgaacgagatgaacaccttgcgtactcagtgtggacacctgtatgcctacgactggattagtatcccactggtgtatacacagcctgaacaaagaggagatggagttccagcccaatcaggaggacgaggaggatgctcacgctggcatcattggccgcttcctaggcctgcagtcccatgatcaccatcctcccagggcaaactcaaggaccaaactactgtggcccaagagggaatcccttctccacgagggcctgcccaaaaaccacaaggcagcc

SEQ ID NO: 3489 - DNA, 4267 bp, Homo sapiens
  source 1..4267: mol_type = unassigned DNA
caccagcctagtcgccagaccttctgtgggatcatcggacccacctggaaccccacctgctggccctcacggaagaacaacagctgatgtttgagaaactgactctgtattgcgacagctacatccagctcatccccatttccttcgtgctgggcttctacgtgacgctggtcgtgacccgctggtggaaccagtacgagaacctgccgtggcccgaccgcctcatgagcctggtgtcgggcttcgtcgaaggcaaggacgagcaaggccggctgctgcggcgcacgctcatccgctacgccaacctgggcaacgtgctcatcctgcgcagcgtcagcaccgcagtctacaagcgcttccccagcgcccagcacctggtgcaagcaggctttatgactccggcagaacacaagcagttggagaaactgagcctaccacacaacatgttctgggtgccctgggtgtggtttgccaacctgtcaatgaaggcgtggcttggaggtcgaatccgggaccctatcctgctccagagcctgctgaacgagatgaacaccttgcgtactcagtgtggacacctgtatgcctacgactggattagtatcccactggtgtatacacaggtggtgactgtggcggtgtacagcttcttcctgacttgtctagttgggcggcagtttctgaacccagccaaggcctaccctggccatgagctggacctcgttgtgcccgtcttcacgttcctgcagttcttcttctatgttggctggctgaaggtggcagagcagctcatcaacccctttggagaggatgatgatgattttgagaccaactggattgtcgacaggaatttgcaggtgtccctgttggctgtggatgagatgcaccaggacctgcctcggatggagccggacatgtactggaataagcccgagccacagcccccctacacagctgcttccgcccagttccgtcgagcctcctttatgggctccaccttcaacatcagcctgaacaaagaggagatggagttccagcccaatcaggaggacgaggaggatgctcacgctggcatcattggccgcttcctaggcctgcagtcccatgatcaccatcctcccagggcaaactcaaggaccaaactactgtggcccaagagggaatcccttctccacgagggcctgcccaaaaaccacaaggcagccaaacagaacgttaggggccaggaagacaacaaggcctggaagcttaaggctgtggacgccttcaagtctgccccactgtatcagaggccaggctactacagtgccccacagacgcccctcagccccactcccatgttcttccccctagaaccatcagcgccgtcaaagcttcacagtgtcacaggcatagacaccaaagacaaaagcttaaagactgtgagttctggggccaagaaaagttttgaattgctctcagagagcgatggggccttgatggagcacccagaagtatctcaagtgaggaggaaaactgtggagtttaacctgacggatatgccagagatccccgaaaatcacctcaaagaacctttggaacaatcaccaaccaacatacacactacactcaaagatcacatggatccttattgggccttggaaaacaggtctgtcctccacctgaaccaggggcactgcattgccctgtgccccaccccagcttcccttgctctgagcctacccttcctccacaatttcctagggttccatcactgccagagcacactggacctacgcccagcactggcttggggtatatacttggccaccttcacagggatcctagggaagtgttcgggaccttttctcacttcaccctggtatcacccggaagacttcttgggaccaggtgaaggaagatgaggttgtgctgaccagaatgctgctggagaactgccccagggctgacaggccaggcttagctgagcagatgttatcactggccccaacttactttgagcaagggtggctgacccaaaaccatgaggtggcagtcagctggatgacagatgaacacttcccccataactatttagggtagtacccaagcactacaggaaagggtggcaggaactgcctcactcctaggaactggtagatggtgaggttgagggtgtccagcgcccttaggtcattttctcactgcctgggaacctcaccaaaatacttcttgcttccttggggtcagcccaaagctgtcacaaaatcagatatttccctttattccagatttcctggacactttcacccaattataaacaccccacttcagccccaatcacgtgggaggaagtgtaacttcccttttctggattctcaagcagttactttcacggtcagaacacgcagctattatgattgaaaacttaaaagggcaacaatttcagtcttgcttctagggctagacaggaacttggcaaacatctgtggcctgttcagcaaaggatgttaatatttaagaatcttgtcttgggctgggtgtggaggcaagtggatcacaggaggtcaggagtttgagaccaacctggccaacatgatgaaaccccatctctaccaaaaaaaatacaaatcagctgggcgtcgtggtgtgcctgtagtcccaacgcaggaggttgaggggagaattgcttgaacccaggaggtggtggttgcagtgagattgagcaactgcaatccagcctgggcgacggagtgagactgtctcaaaaaaaaaaaaaaaaggatcgtctcaacctttgccctcctactgcaacattttggtatttgaaatgaagggaccttccatacttatgctgttaatactttcattctcactagggatgaagcacattcctaacctgcttcctaatggggatgcttcgccagccaggtcctcacctgtgtgtacaccagcaggacactgatccagtcacagccatacagctgtccacactgaagaacatgtcctacaacagcctgaatcaaatggttagcttaatagataaaaatcccagactacttcagcctttaatgccttttattcataaaaactgtgaaagctagactgaaccattggaaacatttaactcagactctggattcagagtcgggaacccttagttctatctgaatccaagacagccacaccttagtatactgcccaaactaatgagtttaataaatacaaatactcgtttctttttgattagtgtgattagaactgaacaacggcacttaaggaatctggaagatagcctggatagatttctgattcatcccaagacctcaaagacaacacctgggtaccaaatttctttatttgaaggaatggtacaaatcaaagaacttaagtggatgttttggtacaacttatagaaaaggtaaaggaaaccccaacatgcatgcactgccttggtgaccagggaagtcaccccacggctatggggaaattagcccgaggcttagctttcattatcactgtctcccagggtgtgcttgtcaaagagatattccgccaagccagattcgggcgctcccatcttgcgcaagttggtcacgtggtcacccaattctttgatggctttcacctgctcattcaggtaatgtgtctcaatgaagtcacacaactgcaaaacaatggggaagacagttagtgggcagctttcccaatccctaaggcaaatgatttcctccatttatttcctggggttccaatactcacatgggggtcatttttgtcagtggccagtttgtgcagttccagtagtgactgattcacatttttttccaaatgtaatgcacactccattgcattcagcccgctctcccagtcatcacagtctggtttctgaatgagaataggttaatgcatctctaccaactaacctagaagtcagcaagcccatcatctctaaccaccacgttttggcaaaagggacattactatttgcctaatttagtttagatggtaagcctaaaaaagcacaaaaggcaaaagcccagtgtatcatcactttataagggcaattgctagtttaagtgatttctgatacccgaacactgccagatgatgaagtatgacacccctaggatcttttgttcaccttgatatcctgaaggaagattcggccacctcgttggttctgcagcttcatcagtttctcagcatgttccctctcctcatgagattggtgaagaaagtatttggcaaagttcttcaaagccacatcatcgcggtcaaagtagtaaga

SEQ ID NO: 3490 - DNA, 1908 bp, Homo sapiens
  source 1..1908: mol_type = unassigned DNA
atgaccgtcacctacacagcccgagtggcgaacgcccgcttcggtggcttctcccagctgctgctactgtggcgtgggagcatctacaaactcctgtggcgagagctgctctgcttccttgggttctacatggcgctgagtgctgcctaccgctttgtgctgaccgaagggcagaagcgctacttcgagaagcttgtgatttattgtgaccagtatgccagcctcatccctgtctccttcgtgcttggcttttatgtgacgctggtggtgaaccgctggtggagccagtacctatgcatgccgctgcccgacgcgctcatgtgcgtggtggcgggcaccgtgcacggacgcgacgaccgcggccgcctctaccggcgcacactcatgcgctacgcagggctctcggccgtgctcatcctgcgctccgtcagcaccgcggtgttcaagcgcttccccaccatagaccacgtggtggaggctgggtttatgacccgcgaggagcgcaagaagtttgaaaacctgaactcatcctacaacaagtactgggtgccctgcgtctggttctccaacctggcggcacaggcccgacgcgagggccgcatccgcgacaacagcgcccttaagctgctgctcgaggagctgaatgtttttcggggcaaatgtggaatgctctttcactatgactggattagcgtacccctcgtgtacacgcaggtggtgaccatcgcactgtacagctacttcctggcttgcctcattggtcgccagttcctggacccggctcagggttacaaagaccacgacctagacctgtgtgtgcccatcttcaccctcttgcagttcttcttctacgccggctggctcaaggtagctgagcagctcatcaaccccttcggagaggacgatgatgactttgagaccaactttctgatcgatagaaacttccaggtgtccatgctggcagtggacgagatgtatgatgacctggctgtgctggagaaggacttgtactgggatgcagccgaggctcgcgccccatacacagcggctactgtcttccagctgcggcagccttccttccagggctccacctttgacatcacgctggccaaagaagacatgcagttccagcggctggacggcttggatggaccgatgggagaggcgcccggcgacttcctgcagcgcctcctgccggcgggcgcgggcatggtcgcgggaggcccgctgggccggcgcctgtcctttctactccgcaagaacagctgcgtgtcggaggcgtctactggggccagctgctcatgcgcggttgtccccgaaggcgcggccccggagtgcagctgcggggacccgctgctcgaccccggcctgccggagcccgaggccccgccccctgcgggtcccgaaccgcttaccctcatccctgggcctgtcgagcccttcagcatcgtgaccatgcccgggccccggggtccggcgccaccctggctgcccagccctattggcgaggaggaggagaatctggcctgagatcttagagcccagccccctaaggacagggaaccaggtccctgcacggcacccacgcaggtgtcccggtctgcataagcctcgtgtgcctttgtaaagtccacctacacttttgaccagctctcgctgcccgcatgtgtttggcgctgtgctaggggcgggagttcttccagactcttggaccagcccgccctgaccaccagctctacttcccaacccccactgcctgagaggtctctatcagtgtcctgcctgaattctttccttcaagtgaagatgtgactgactacctcctcgagttgtcatgaggatgaaagaatggcattaaagcatttggtatacagtaggtgctcaataaattgctagtgatttttactc

SEQ ID NO: 3491 - DNA, 2183 bp, Homo sapiens
  source 1..2183: mol_type = unassigned DNA
ctgaagctacagcctagccgagggaggaggaccaggaaagggaggcacgcccactccccagccccacccaacgccaaagccacccgcccattccatccctgtccctgtgggtccttgcaccggccaccttcaacacaggtgagatgagcccaggcttggggaaatagggggccctgagggaagagggaacctgcgggcaggaatgcatccggagtcctcccggggcggggagtggagggcttggaaggctggaggggaacggagagaggaaagcccccacccgggccacccactctcccttggccacacctgccgggtgccacgatgaccgtcacctacacagcccgagtggcgaacgcccgcttcggtggcttctcccagctgctgctactgtggcgtgggagcatctacaaactcctgtggcgagagctgctctgcttccttgggttctacatggcgctgagtgctgcctaccgctttgtgctgaccgaagggcagaagcgctacttcgagaagcttgtgatttattgtgaccagtatgccagcctcatccctgtctccttcgtgcttggcttttatgtgacgctggtggtgaaccgctggtggagccagtacctatgcatgccgctgcccgacgcgctcatgtgcgtggtggcgggcaccgtgcacggacgcgacgaccgcggccgcctctaccggcgcacactcatgcgctacgcagggctctcggccgtgctcatcctgcgctccgtcagcaccgcggtgttcaagcgcttccccaccatagaccacgtggtggaggctgggtttatgacccgcgaggagcgcaagaagtttgaaaacctgaactcatcctacaacaagtactgggtgccctgcgtctggttctccaacctggcggcacaggcccgacgcgagggccgcatccgcgacaacagcgcccttaagctgctgctcgaggagctgaatgtttttcggggcaaatgtggaatgctctttcactatgactggattagcgtacccctcgtgtacacgcaggtggtgaccatcgcactgtacagctacttcctggcttgcctcattggtcgccagttcctggacccggctcagggttacaaagaccacgacctagacctgtgtgtgcccatcttcaccctcttgcagttcttcttctacgccggctggctcaaggtagctgagcagctcatcaaccccttcggagaggacgatgatgactttgagaccaactttctgatcgatagaaacttccaggtgtccatgctggcagtggacgagatgtatgatgacctggctgtgctggagaaggacttgtactgggatgcagccgaggctcgcgccccatacacagcggctactgtcttccagctgcggcagccttccttccagggctccacctttgacatcacgctggccaaagaagacatgcagttccagcggctggacggcttggatggaccgatgggagaggcgcccggcgacttcctgcagcgcctcctgccggcgggcgcgggcatggtcgcgggaggcccgctgggccggcgcctgtcctttctactccgcaagaacagctgcgtgtcggaggcgtctactggggccagctgctcatgcgcggttgtccccgaaggcgcggccccggagtgcagctgcggggacccgctgctcgaccccggcctgccggagcccgaggccccgccccctgcgggtcccgaaccgcttaccctcatccctgggcctgtcgagcccttcagcatcgtgaccatgcccgggccccggggtccggcgccaccctggctgcccagccctattggcgaggaggaggagaatctggcctgagatcttagagcccagccccctaaggacagggaaccaggtccctgcacggcacccacgcaggtgtcccggtctgcataagcctcgtgtgcctttgtaaagtccacctacacttttgaccagctctcgctgcccgcatgtgtttggcgctgtgctaggggcgggagttcttccagactcttggaccagcccgccctgaccaccagctctacttcccaacccccactgcctgagaggtctctatcagtgtcctgcctgaattctttccttcaagtgaagatgtgactgactacctcctcgagttgtcatgaggatgaaagaatggcattaaa

SEQ ID NO: 3492 - DNA, 2000 bp, Homo sapiens
  source 1..2000: mol_type = unassigned DNA
gtccctgtgggtccttgcaccggccaccttcaacacagcccccacccgggccacccactctcccttggccacacctgccgggtgccacgatgaccgtcacctacacagcccgagtggcgaacgcccgcttcggtggcttctcccagctgctgctactgtggcgtgggagcatctacaaactcctgtggcgagagctgctctgcttccttgggttctacatggcgctgagtgctgcctaccgctttgtgctgaccgaagggcagaagcgctacttcgagaagcttgtgatttattgtgaccagtatgccagcctcatccctgtctccttcgtgcttggcttttatgtgacgctggtggtgaaccgctggtggagccagtacctatgcatgccgctgcccgacgcgctcatgtgcgtggtggcgggcaccgtgcacggacgcgacgaccgcggccgcctctaccggcgcacactcatgcgctacgcagggctctcggccgtgctcatcctgcgctccgtcagcaccgcggtgttcaagcgcttccccaccatagaccacgtggtggaggctgggtttatgacccgcgaggagcgcaagaagtttgaaaacctgaactcatcctacaacaagtactgggtgccctgcgtctggttctccaacctggcggcacaggcccgacgcgagggccgcatccgcgacaacagcgcccttaagctgctgctcgaggagctgaatgtttttcggggcaaatgtggaatgctctttcactatgactggattagcgtacccctcgtgtacacgcaggtggtgaccatcgcactgtacagctacttcctggcttgcctcattggtcgccagttcctggacccggctcagggttacaaagaccacgacctagacctgtgtgtgcccatcttcaccctcttgcagttcttcttctacgccggctggctcaaggtagctgagcagctcatcaaccccttcggagaggacgatgatgactttgagaccaactttctgatcgatagaaacttccaggtgtccatgctggcagtggacgagatgtatgatgacctggctgtgctggagaaggacttgtactgggatgcagccgaggctcgcgccccatacacagcggctactgtcttccagctgcggcagccttccttccagggctccacctttgacatcacgctggccaaagaagacatgcagttccagcggctggacggcttggatggaccgatgggagaggcgcccggcgacttcctgcagcgcctcctgccggcgggcgcgggcatggtcgcgggaggcccgctgggccggcgcctgtcctttctactccgcaagaacagctgcgtgtcggaggcgtctactggggccagctgctcatgcgcggttgtccccgaaggcgcggccccggagtgcagctgcggggacccgctgctcgaccccggcctgccggagcccgaggccccgccccctgcgggtcccgaaccgcttaccctcatccctgggcctgtcgagcccttcagcatcgtgaccatgcccgggccccggggtccggcgccaccctggctgcccagccctattggcgaggaggaggagaatctggcctgagatcttagagcccagccccctaaggacagggaaccaggtccctgcacggcacccacgcaggtgtcccggtctgcataagcctcgtgtgcctttgtaaagtccacctacacttttgaccagctctcgctgcccgcatgtgtttggcgctgtgctaggggcgggagttcttccagactcttggaccagcccgccctgaccaccagctctacttcccaacccccactgcctgagaggtctctatcagtgtcctgcctgaattctttccttcaagtgaagatgtgactgactacctcctcgagttgtcatgaggatgaaagaatggcattaaagcatttggtatacagtaggtgctcaataaattgctagtgatttttactcaaa

SEQ ID NO: 3493 - DNA, 1876 bp, Homo sapiens
  source 1..1876: mol_type = unassigned DNA
atcagcagctgttgcttctgtttgttcccagctataactgtcatcagtggctaaactggcataaacaggcctctacaagtggaaaaacatttaacccctgttcttgtcacactctgggtcctctcagtggccagagaacagaaagaaaatctgactgtgcacgagcgaagggtgacaccgggcgtgcagcaccgacctgaaggcacctcttcgggggagcccgaaatttgaagattctctttcctgtcggagactacaaaccaaataaatagggttttatgttactctggtagtgaaccgatggtggaaccagtttgtgaatttgccctggccagacaggctaatgttcctcatctctagcagtgttcacggaagcgacgagcacgggcgcctgcttagaaggacgctgatgcgctacgtcaatctcacctccctgctcatctttcgctcggtgagcactgctgtgtacaaaagatttcccacaatggaccacgtggttgaagcagaaagaactggcatgaaacccattctgccttcaagttttgagatgcagagcttttagttcctctgctaatagagcctcgtttgaatactctgcttgaaaggcaaaagacatctgcctcaacttcaatcaaggaaaaatagagcaactgtacagcaggcagaatctctatgatgactggaattttgtctatcaatggatgtaattaatcctttggctcgagggcaataaaattttgtcttaaagtagcagatcctgctccatcaaaccacaactcaattgggagtaaatgcaaacatgtatctatattgagagatagattttactctgattagaaagatgaaggagggatttggggataaacaatatgaaaattgctgagcagagctgagccagccagaagaaaaagcgatagcaagagaaactgtaggcagatgcaacggcaggataaaatagctatgccaggggtgtgatggggcctgaggagagcatggcatggagacagacacgtgcagggaaccaagtggtgggaggacaagcccactcagagtgttgccgaactgtagcaaatcagtaactataattagcacagcctcagcaatgacaataatgatcatattctgaaaaaaatattggtctctgcttaaaatggcttgaagtcctgatgagggtgacattccatttcataacaaatacttttggaatggacttgaccaacaacctagagattttctttcagttgaccgactttgatttccaaaggtggagttacttttgtgaacccccaaaatctgagacaggtctcagttaatttagaaagtttattttgccaaggttgaggatgtgcacccgtgacacagcctcaggtggtcctgatgacgtgtgcccaaagcggtcagaacagtttggttttatgcattgtaggaagacatgagacatcgatcaacatatgtaagataaacattggttcagtctggaaaagccagagatgactcaaagtggggagggggcttccgggtcataggtaggtaagagacaaatggttgcattcttctgggtttctgattagtctctccaaaggaggcaatcagatatgcatttatctcagtgaatggagcaatgactttaatagaatgggaggcatgtatgccgtaagcagttcccaacttgacttttccctttagcttagtgattttggggacccaagatattttcctttcacactttggataagtaagatgtgtgaccctgcaaggaataacaaaaattattctgcttatatattcttagaggatacattaatgtctcagtgattgtcattcatctttcacagcacccagcaaaatactcaataaatttgtgctaaaaacaaaa

SEQ ID NO: 3494 - DNA, 3532 bp, Homo sapiens
  source 1..3532: mol_type = unassigned DNA
ataaacaggcctctacaagtggaaaaacatttaacccctgttcttgtcacactctgggtcctctcagtggccagagaacagaaagaaaatctgactgtgcacgagcgaagggtgacaccgggcgtgcagcaccgacctgaaggcacctcttcgggggagcccgaaatttgaagattctctttcctgtcggagactacaaaccaaataaatagaaaaaactatccaagatgactgtcacttactccagtaaagtagcaaatgcaactttttttggatttcataggttactcctcaagtggagaggcagcatctacaaactactgtacagggaatttattgtttttgctgttctttatacagcaataagtttggtatacagattgttacttacaggagtccaaaaacgttactttgaaaaattatcaatttactgtgacagatatgctgaacaaattccagtaacctttgtgcttgggttttatgttactctggtagtgaaccgatggtggaaccagtttgtgaatttgccctggccagacaggctaatgttcctcatctctagcagtgttcacggaagcgacgagcacgggcgcctgcttagaaggacgctgatgcgctacgtcaatctcacctccctgctcatctttcgctcggtgagcactgctgtgtacaaaagatttcccacaatggaccacgtggttgaagcaggttttatgacaacagatgaaaggaaattattcaaccacctcaagtctcctcatctgaaatattgggttccattcatctggtttggaaatcttgcaactaaagcccggaatgaaggtagaatcagagacagtgttgatctgcaatcattgatgactgaaatgaatcgataccgctcttggtgcagcctcttattcggttatgactgggttgggattccgctggtttacacccaggttgtcactcttgctgtctataccttcttctttgcgtgcctgattggacgccagtttttggatcccaccaaaggctacgcagggcatgacttggatctttacattcccatcttcaccctcctacaattcttcttctatgcaggatggcttaaggtagcagagcagcttatcaacccttttggagaagatgatgatgattttgaaactaactggtgcattgacagaaatttgcaggtctctcttttagctgtggacgaaatgcacatgagcttacccaagatgaagaaggacatttactgggacgattctgctgctcgcccaccatacacattggcagctgctgactactgcataccctcatttctggggtcaacagtccagatggggctgtctgggtccgactttcctgacgaggagtggctgtgggattatgagaagcatggccatcggcattccatgataagaagagtcaagcggttcctgagtgcccacgaacacccctccagccccagaagaagaagctacaggaggcagacaagtgacagctccatgttcttaccccgagatgacctcagcccagccagggacctactggatgtgccctcaagaaacccccccagggcctcacccacctggaagaaatcctgcttcccagaaggaagccccacgctgcacttcagcatgggagagctgtccaccatcagggagaccagccagacaagcactttacagagcctgaccccacagtccagtgtgagaacttcccccatcaaaatgccactggtacctgaggtattgatcacagcagccgaagcaccagtgcccacatcagggggctaccaccatgattccgctacctccatcttgagctctgagtttacaggggttcagccaagcaagactgagcagcagcagggccccatgggatccatcctgtctccctcagagaaggagacacctcctggaggccccagtccccagacagtttcagccagcgctgaggaaaatatattcaactgtgaagaagaccctggtgatacctttctaaaaaggtggagtcttccgggattcctggggtccagccacacttccctgggaaacctaagtccagaccccatgagctctcagccagctcttttaattgacacagaaacatcctcagagatcagtgggatcaacattgtggctggctctcgagtctcttctgatatgctgtatttaatggaaaacctggacaccaaggaaacagatatcatagagctgaacaaggaaactgaggaatcacccaaatgagtgccaccaagttctaggacctggttctagcctagattcttacctccccaaaagcagcatattaggcccaggacatacctgaaggctggtcgactttttaaaaaacatgatcacactgtataagctacttagaactttgaagggcattatgatcctgactttttgagagctgcgaaaaatcaaacgcattcacgtcatccaacacaacatggctttcatcagaagttacacagaccacagtgatttagccaaataagtcttaaccaaaaaaaggaatctgaaaaacatacatgacttataaattcatagattattagttgtggaaagagtctcatagatcatagtccaatcccctagacccaaaggcccagacacgcagggttctctatttctcttcttttttctctttctttttttctttagccataaagaaaggagatggatcacctaatgcctgaaagatcccctccttcctaacgtttttgtttgaggctttctaaccatctcattcctacttttataactattattgttattatcacttcctgattcttaagcttcatcagcaccagaacacttaattctcttcaatttccttttttacttttctctcttttccttttattctgtcatcctttttttcccttcccttctccctggttgtgctgcttttctagtaatctgtcccatttttcaggttataatatttcctcttgccaaatctgttgcttatgtcttgccatgaatttcaaaatataagacattggcaaagcctcctacagaatcatcaaaggtgtcaacaaatccagcctgatacccttccagtctcacttccagtggaaggcatataggagtgatggttccccccgtgcccttgcagccattgacatttctttctgcttccactatttggtgttgggcactggagaaaaacgaagccaagagaatatgaaatttgcatagccaaatgctatggaaccaaagaataagatgactcacatctgtttaacttgaactcttatgcaaaaatcctaatcgtgtcgcaacacgggaccagttactgtgtctatcgggtcatttgggaatgggcaggatactggagctgggaggctaatggggtccagagctgcataatggggatcggatgttggtactcctcccagggagctctcaggacagctgtttgtcgtgggctcccaagtgcctaggccatgccttacgactgctgcacttaccatttgtcatatgatggcacttgactacatatggctttagaaataaaataaccctcaaaacta

SEQ ID NO: 3495 - DNA, 1506 bp, Homo sapiens
  source 1..1506: mol_type = unassigned DNA
gggtcctctcagtggccagagaacagaaagaaaatctgactgtgcacgagcgaagggtgacaccgggcgtgcagcaccgacctgaaggcacctcttcgggggagcccgaaatttgaagattctctttcctgtcggagactacaaaccaaataaatagaaaaaactatccaagatgactgtcacttactccagtaaagtagcaaatgcaactttttttggatttcataggttactcctcaagtggagaggcagcatctacaaactactgtacagggaatttattgtttttgctgttctttatacagcaataagtttggtatacagattgttacttacaggagtccaaaaacgttactttgaaaaattatcaatttactgtgacagatatgctgaacaaattccagtaacctttgtgcttgggttttatgttactctggtagtgaaccgatggtggaaccagtttgtgaatttgccctggccagacaggctaatgttcctcatctctagcagtgttcacggaagcgacgagcacgggcgcctgcttagaaggacgctgatgcgctacgtcaatctcacctccctgctcatctttcgctcggtgagcactgctgtgtacaaaagatttcccacaatggaccacgtggttgaagcaggttttatgacaacagatgaaaggaaattattcaaccacctcaagtctcctcatctgaaatattgggttccattcatctggtttggaaatcttgcaactaaagcccggaatgaaggtagaatcagagacagtgttgatctgcaatcattgatgactgaaatgaatcgataccgctcttggtgcagcctcttattcggttatgactgggttgggattccgctggtttacacccaggttgtcactcttgctgtctataccttcttctttgcgtgcctgattggacgccagtttttggatcccaccaaaggctacgcagggcatgacttggatctttacattcccatcttcaccctcctacaattcttcttctatgcaggatggcttaaggtagcagagcagcttatcaacccttttggagaagatgatgatgattttgaaactaactggtgcattgacagaaatttgcaggtctctcttttagctgtggacgaaatgcacatgagcttacccaagatgaagaaggacatttactgggacgattctgctgctcgcccaccatacacattggcagctgctgactactgcataccctcatttctggggtcaacagtccagatggggaaacagatgcctaagaatgagtggaagatggaagatataaaaatcccactccctcagcctcaattccagtgtgctaagagtgatcctggtggttaaaggtacaacactcgaatctttcaaaacaacttggctcctaaacacaagccaacaatctcatctgctgctcaactgaaaaacattctccactttttagcatccaggcatgtggagttcctaagaaatgcactttatta

SEQ ID NO: 3496 - DNA, 709 bp, Homo sapiens
  source 1..709: mol_type = unassigned DNA
gggtcctctcagtggccagagaacagaaagaaaatctgactgtgcacgagcgaagggtgacaccgggcgtgcagcaccgacctgaaggcacctcttcgggggagcccgaaatttgaagattctctttcctgtcggagactacaaaccaaataaatagaaaaaactatccaagatgactgtcacttactccagtaaagtagcaaatgcaactttttttggatttcataggttactcctcaagtggagaggcagcatctacaaactactgtacagggaatttattgtttttgctgttctttatacagcaataagtttggtatacagattgttacttacaggagtccaaaaacgttactttgaaaaattatcaatttactgtgacagatatgctgaacaaattccagtaacctttgtgcttgggttttatgttactctggtagtgaaccgatggtggaaccagtttgtgaatttgccctggccagacaggctaatgttcctcatctctagcagtgttcacggaagcgacgagcacgggcgcctgcttagaaggacgctgatgcgctacgtcaatctcacctccctgctcatctttcgctcggtgagcactgctgtgtacaaaagatttcccacaatggaccacgtggttgaagcagaaagaactggcatgaaacccattctgccttcaagttttgagatgcagagcttttag

SEQ ID NO: 3497 - DNA, 2878 bp, Homo sapiens
  source 1..2878: mol_type = unassigned DNA
cagagagggctgactcagagtctgcacatggggtctgcttccaagttcttccaactgggcatatgcctccgccactctctgactgtcctttgcctgtgccaaggtttctgggaagaacaggaagttcagggatggcggaaaatgtttggcagattccctgagtccaaagccggagcacctgctcctgcctgagggcagagaggactggttttatgacaacagatgaaaggaaattattcaaccacctcaagtctcctcatctgaaatattgggttccattcatctggtttggaaatcttgcaactaaagcccggaatgaaggtagaatcagagacagtgttgatctgcaatcattgatgactgaaatgaatcgataccgctcttggtgcagcctcttattcggttatgactgggttgggattccgctggtttacacccaggtagcagagcagcttatcaacccttttggagaagatgatgatgattttgaaactaactggtgcattgacagaaatttgcaggtctctcttttagctgtggacgaaatgcacatgagcttacccaagatgaagaaggacatttactgggacgattctgctgctcgcccaccatacacattggcagctgctgactactgcataccctcatttctggggtcaacagtccagatggggctgtctgggtccgactttcctgacgaggagtggctgtgggattatgagaagcatggccatcggcattccatgataagaagagtcaagcggttcctgagtgcccacgaacacccctccagccccagaagaagaagctacaggaggcagacaagtgacagctccatgttcttaccccgagatgacctcagcccagccagggacctactggatgtgccctcaagaaacccccccagggcctcacccacctggaagaaatcctgcttcccagaaggaagccccacgctgcacttcagcatgggagagctgtccaccatcagggagaccagccagacaagcactttacagagcctgaccccacagtccagtgtgagaacttcccccatcaaaatgccactggtacctgaggtattgatcacagcagccgaagcaccagtgcccacatcagggggctaccaccatgattccgctacctccatcttgagctctgagtttacaggggttcagccaagcaagactgagcagcagcagggccccatgggatccatcctgtctccctcagagaaggagacacctcctggaggccccagtccccagacagtttcagccagcgctgaggaaaatatattcaactgtgaagaagaccctggtgatacctttctaaaaaggtggagtcttccgggattcctggggtccagccacacttccctgggaaacctaagtccagaccccatgagctctcagccagctcttttaattgacacagaaacatcctcagagatcagtgggatcaacattgtggctggctctcgagtctcttctgatatgctgtatttaatggaaaacctggacaccaaggaaacagatatcatagagctgaacaaggaaactgaggaatcacccaaatgagtgccaccaagttctaggacctggttctagcctagattcttacctccccaaaagcagcatattaggcccaggacatacctgaaggctggtcgactttttaaaaaacatgatcacactgtataagctacttagaactttgaagggcattatgatcctgactttttgagagctgcgaaaaatcaaacgcattcacgtcatccaacacaacatggctttcatcagaagttacacagaccacagtgatttagccaaataagtcttaaccaaaaaaaggaatctgaaaaacatacatgacttataaattcatagattattagttgtggaaagagtctcatagatcatagtccaatcccctagacccaaaggcccagacacgcagggttctctatttctcttcttttttctctttctttttttctttagccataaagaaaggagatggatcacctaatgcctgaaagatcccctccttcctaacgtttttgtttgaggctttctaaccatctcattcctacttttataactattattgttattatcacttcctgattcttaagcttcatcagcaccagaacacttaattctcttcaatttccttttttacttttctctcttttccttttattctgtcatcctttttttcccttcccttctccctggttgtgctgcttttctagtaatctgtcccatttttcaggttataatatttcctcttgccaaatctgttgcttatgtcttgccatgaatttcaaaatataagacattggcaaagcctcctacagaatcatcaaaggtgtcaacaaatccagcctgatacccttccagtctcacttccagtggaaggcatataggagtgatggttccccccgtgcccttgcagccattgacatttctttctgcttccactatttggtgttgggcactggagaaaaacgaagccaagagaatatgaaatttgcatagccaaatgctatggaaccaaagaataagatgactcacatctgtttaacttgaactcttatgcaaaaatcctaatcgtgtcgcaacacgggaccagttactgtgtctatcgggtcatttgggaatgggcaggatactggagctgggaggctaatggggtccagagctgcataatggggatcggatgttggtactcctcccagggagctctcaggacagctgtttgtcgtgggctcccaagtgcctaggccatgccttacgactgctgcacttaccatttgtcatatgatggcacttgactacatatggctttagaaataaaataaccctcaaaacta

SEQ ID NO: 3498 - DNA, 721 bp, Homo sapiens
  source 1..721: mol_type = unassigned DNA
gaaaaacatttaacccctgttcttgtcacactctgggtcctctcagtggccagagaacagaaagaaaatctgactgtgcacgagcgaagggtgacaccgggcgtgcagcaccgacctgaaggcacctcttcgggggagcccgaaatttgaagattctctttcctgtcggagactacaaaccaaataaatagattgttacttacaggagtccaaaaacgttactttgaaaaattatcaatttactgtgacagatatgctgaacaaattccagtaacctttgtgcttgggttttatgttactctggtagtgaaccgatggtggaaccagtttgtgaatttgccctggccagacaggctaatgttcctcatctctagcagtgttcacggaagcgacgagcacgggcgcctgcttagaaggacgctgatgcgctacgtcaatctcacctccctgctcatctttcgctcggtgagcactgctgtgtacaaaagatttcccacaatggaccacgtggttgaagcagaaagaactggcatgaaacccattctgccttcaagttttgagatgcagagcttttagttcctctgctaatagagcctcgtttgaatactctgcttgaaaggcaaaagacatctgcctcaacttcaatcaaggaaaaatagagcaactgtacagcaggcagaatctctatgatgactggaattttgtctatcaatggatgtaa

SEQ ID NO: 3499 - DNA, 2047 bp, Homo sapiens
  source 1..2047: mol_type = unassigned DNA
atgacggtttcatacactctcaaagtggcggaggcccgcttcggaggtttctctggcctgcttctccgctggaggggaagcatctacaagctcctctacaaggaattcctcctctttggggccttgtacgctgtgcttagcatcacctaccggctgctgctgacccaggagcagaggtacgtgtatgctcaggtggcccggtactgcaaccgctcagcagacctcattcccttgtcctttgtattgggtttctatgtgactctcgtggtgaaccgctggtggtcccagtacacaagcatcccgctgccagaccagctgatgtgcgtcatctcggctagcgtgcacggcgtggaccagcggggccgcctgctgcgccgcaccctcatccgctacgcgaacctggcgtccgtgctggtgctgcgctcggtcagcacccgcgtgcttaagcgcttccccaccatggagcacgtggtggacgcaggtttcatgtcccaggaagagaggaaaaagtttgagagcctgaaatccgacttcaacaagtactgggtcccctgcgtctggttcaccaacctggcggcccaggcccggagggacgggcgaatacgtgacgatatcgctctctgtctacttttggaagagctgaacaagtaccgagccaagtgcagcatgctattccactatgactggatcagcatccccctcgtctacacccaagtggtgaccatagccgtctactctttctttgccctctccctggttggccgccagtttgtggagccagaggcaggggctgccaaacctcagaagcttctgaagccaggccaggagccagccccagccctgggagacccggacatgtacgtgcctctcaccactctgctgcagttcttcttctatgctggctggctcaaggtggctgaacagatcatcaacccatttggtgaggatgatgacgactttgagacaaatcagctcatagaccgcaacttgcaggtgtccctgctatccgtggacgaaatgtaccagaaccttccccccgctgagaaggaccagtactgggatgaggaccagccgcagccaccctacactgtggccacggcggccgagtctctgcggccctcattcctgggctccaccttcaacctgcgcatgagcgacgaccctgagcagagcctgcaggtggaggcgtcccccggatctggtcggcccgcgcccgccgcgcagaccccgttgctcggccgcttcctgggcgtaggggcgccctccccggccatcagcctccggaacttcggccgcgtgcgaggcaccccccgccccccgcatctgctgcgcttccgggcggaggagggcggcgaccccgaggccgcagcccgcatcgaggaggaatcggcggagtccggggacgaggccctggagccctgaggtctcgcctgcccccgcccggtttcccccacccactgccctccttccctcccgtgcccggtcctgccagccagctctattagagcagcttttcctgtgtgccttgaaggccagagcatttagggacagaacttgaaagagaagatggcgaaaagggcctgagccagggctgggaatgtgtccactttggtgggagagaaggtcggttgcttgggggacgtgaagctagaaaaataaatgagcccaggcatagaggactagagcccaggtgcacggttagcttcacagcaacagggagctaggccattggttctcaaacttaaggaaggatcagcatcacggaaggtcttgtcaaaagagtgctgggcaccactcccagcatttctggcacgttagatttgggatggcgcccaataacttgcatttctaacaagttcccaggtgatgctgtgctgcttgtccaggaaacacaatttgagagtcatgtgaaacgtgcttgaaggggtataccttaccctggtaaccttactcaaaagaagggtcagtgtgtgctgggggacttttgccttgtttgtaatgttaaagtttttgtttacattgagaatatattcaagtttttgtttaa

SEQ ID NO: 3500 - DNA, 2421 bp, Homo sapiens
  source 1..2421: mol_type = unassigned DNA
agtttcaaaatattctgacaggacacagacagccctggctgaaaggagcacagagagaatacttcgagctcatgctgagagaaaaaggcgagtttgtcttttcttacctgagactgggcctgaagggagagtttcagttcttcattgacggttgctttcaagatgtacctgggaattacaccaagtgtgacctgtaacaattcaagcaaaaatgaattttccctgattctagagaagaatcccctggtggagtttgtggaagagctccctgctgggcgatcttctctgtgctactgcaacttgctctgtgggattatcagaggtgccttggaaatggttcatttggcggctgatgttacattcttgcaagacagactaaaaggtgacagtgtgacagaaataggaataacatttctaaaaaagcgagacgagaaaaaatatagagggaaaaaatgaagactagcacggaaaatgccacggggcggctagctgagttaatgttagctaaacatgtatagacatagaaattttgaattgcttcatagcatgagctttgaaaggtttataaatcagccagaaatttgaaatgcagggcatgaaggcttaaaggtttttttttccttttgcttataaatcacgcattttcaatctcatgtccacaaaatttcatatgcaaatagctccttacaagatagcaggcaggaattccacatcttacactatccatcctcagagaagctgttcattccattcacgtatggtaatgggaaaaaaaagcagcacaaatacaaacagttgtgtatttgtctctttgctgaaaaaaaaagaatgaaatgatatagcatagagtttcctatatatagacagtagtttctagatactgtatattgcattccttaaataaataattccatatttctaaaaaaatatgatttgatttttctcatgtattagcttggcttatagctttagccttctgacgctacccttgatttgtaatcaccaagtcaagctatttattcaatgataattttgaaacatttataaataacatttaattttaatttatttagttttaatatagctggcatcaaccaaattccttccttttctcatgaaatattgcttgatggtcaggccaggaaacttctaaaataaaggataaataatattctttgaaattactttcttaccccaaagcttattaattcagaatttctactatcattttcatcctctaaaaaatcttccaaaggatgttttctttgtgaccagaacacatttaaaattcaagtgtaccgaattaaatacacagtaatcttcaccagaccactggcacacaagggcggcctacaaggcagcccagaatctactgggctctgcagagagcccaaattgcaagtacaagttataattagtgtgataccaccctacggaattggagaaaatatttgtaaactatgtatctgacacccttgtgctattaataaccagaatatataaggagttcaaccaactccataggaaaaaattaaaattaataatccaattaaagatgggcaaaagatctgaatagacatttctcaaaagaagacatacacatacaaatggcaaacaggtatatgaaaaggtgctcaacatcattggtcatcagagaaatgcaaatcaaaactataatgagatattatctcaccctagttaaaaatggcttttatccaaaacaggcaatagtgaatgcttgcaaagatgtggagaagagggaactctggtacactgttggtgggaatgtaaattagtataaccactatggagaacggtttggaggttcctcaaaaaacaaaaaatagaatgatcatatgatccagcaatcccactgctggatatatacccaaaataaaggaaatcagtatatcaaagagatatctgcactcccatgtttactgcagaactactgacgatagctaagatttggaagaaatctaagtgtccttcaatagattaatgaaataaagaaaatatggtacatatacacaatggagtactattcagccataaagaagaatgagatcctgtcatttgcaaaacatggatggaactagaggtcattatgttcaatgaaatatgtcaggacagaaagacagactttgcatgttctcatttatttgtaggagctaaaaattaaaacagtggactcatggagatatggagtaaaatgatggatatcagaggctgggaagggtagtttcaagaggagtggagatggttaatgggtacaaaaatatagttagatagaatgaataagatctgggtcgggcatggtggcacaagcctgtaatctctgcactttgggatgccaaagtgggaggattgcttgagctcaggagtttgagaccagcttgggtaacatagacccctgtctct

SEQ ID NO: 3501 - DNA, 1113 bp, Homo sapiens
  source 1..1113: mol_type = unassigned DNA
tacaaaaacaaaacaaaaagacatggactgatacacctctaagaaacaggcaaaagaagagaaattgaagatcatattcttcatctatcaagcactatgtctcgccctgcacaccgaagaccagaataccataaaataaataaagatctctttgtccttacctatggagctctggttgcccagctgtgtaaggattatgagaaggatgaagatgtgaaccaatatttagataaaatgggttacggcattggaacgcggcttgtggaagactttttggctcgatcctgcgtgggaagatgccatagttattcagaaattatagacataattgcccaggttgctttcaagatgtacctgggaattacaccaagtgtgacctgtaacaattcaagcaaaaatgaattttccctgattctagagaagaatcccctggtggagtttgtggaagagctccctgctgggcgatcttctctgtgctactgcaacttgctctgtgggattatcagaggtgccttggaaatggttcatttggcggctgatgttacattcttgcaagacagactaaaaggtgacagtgtgacagaaataggaataacatttctaaaaaagcgagacgagaaaaaatatagagggaaaaaatgaagactagcacggaaaatgccacggggcggctagctgagttaatgttagctaaacatgtatagacatagaaattttgaattgcttcatagcatgagctttgaaaggtttataaatcagccagaaatttgaaatgcagggcatgaaggcttaaaggtttttttttccttttgcttataaatcacgcattttcaatctcatgtccacaaaatttcatatgcaaatagctccttacaagatagcaggcaggaattccacatcttacactatccatcctcagagaagctgttcattccattcacgtatggtaatgggaaaaaaaagcagcacaaatacaaacagttgtgtatttgtctctttgctgaaaaaaaaagaatgaaatgatatagcatagagtttcctatatatagacagtagtttctagatactgtatattgcattccttaaataaataattccatatttctaaaaaaa

SEQ ID NO: 3502 - DNA, 975 bp, Homo sapiens
  source 1..975: mol_type = unassigned DNA
aataaagatctctttgtccttacctatggagctctggttgcccagctgtgtaaggattatgagaaggatgaagatgtgaaccaatatttagataaaatgggttacggcattggaacgcggcttgtggaagactttttggctcgatcctgcgtgggaagatgccatagttattcagaaattatagacataattgcccaggttgctttcaagatgtacctgggaattacaccaagtgtgacctgtaacaattcaagcaaaaatgaattttccctgattctagagaagaatcccctggtggagtttgtggaagagctccctgctgggcgatcttctctgtgctactgcaacttgctctgtgggattatcagaggtgccttggaaatggttcatttggcggctgatgttacattcttgcaagacagactaaaaggtgacagtgtgacagaaataggaataacatttctaaaaaagcgagacgagaaaaaatatagagggaaaaaatgaagactagcacggaaaatgccacggggcggctagctgagttaatgttagctaaacatgtatagacatagaaattttgaattgcttcatagcatgagctttgaaaggtttataaatcagccagaaatttgaaatgcagggcatgaaggcttaaaggtttttttttccttttgcttataaatcacgcattttcaatctcatgtccacaaaatttcatatgcaaatagctccttacaagatagcaggcaggaattccacatcttacactatccatcctcagagaagctgttcattccattcacgtatggtaatgggaaaaaaaagcagcacaaatacaaacagttgtgtatttgtctctttgctgaaaaaaaaagaatgaaatgatatagcatagagtttcctatatatagacagtagtttctagatactgtatattgcattccttaaataaataattccatatttctaaaaaaa

SEQ ID NO: 3503 - DNA, 4254 bp, Homo sapiens
  source 1..4254: mol_type = unassigned DNA
cgatggcgcggcggagacggagggaggaggggagccggcagagaagggtcagccgcggcggcagggcggcggcggcagcggcgcagctccgctccccgcgcgtctcccttccccgcgcccaggtagggcgctcagcctccgccgccaggatgcggccgcccgcctgctggtggctgctcgcgccgccggcgctgctcgcgctcctcacctgctccctggcttttggtttggcttctgaagatacaaagaaagaggtcaagcagtctcaggatttggagaaaagtggtatatcaaggaaaaatgacatagacttaaaaggaattgtattcgtcatccagagtcaaagtaattcttttcatgcaaagagagcagagcagttaaaaaaaagcatcttaaagcaggctgcagatcttacacaggagctccccagtgtcctcctccttcatcagctggctaaacaagaaggtgcatggaccatacttccgttgttaccgcatttttctgtaacatatagcagaaattcatcttggattttcttctgtgaagaagagacaagaatacagattccaaaactcttggaaaccctcagaagatatgacccctctaaggaatggtttttgggaaaagcattacatgatgaagaagctacaataattcaccattatgccttttccgagaatcctacagtttttaagtatccagactttgctgcaggctgggccttaagtattccacttgtaaacaagcttaccaagagactaaagagtgaatccttgaaatccgactttacaatagatttaaaacatgagattgccctctacatctgggacaaaggcggaggacctcccctgaccccagtgcctgagttttgtaccaatgacgtggacttctactgtgctaccacattccattcttttctaccgctttgtagaaagccagtgaagaagaaggatatttttgttgcagtaaaaacatgcaagaaatttcatggtgacagaatacctattgttaagcagacttgggagagccaggcaagtctcattgaatactatagtgactatactgaaaattccattcctactgtggatttgggaattcctaatacagatagaggtcattgtggaaagacatttgccattttggaaagatttctgaatcgtagccaggacaaaacagcatggttagtcattgtggatgatgatacattaataagtatctccaggctccagcacttgcttagctgttatgactccggcgagcctgtgtttctgggagagcgctacggctacggcctgggcactggtggctacagctacatcacgggaggaggaggaatggtcttcagcagagaagccgtcaggagacttctcgccagtaaatgtcgatgctacagcaatgatgctcccgatgatatggtcctgggaatgtgctttagtggcttgggaatccctgtgacacacagccctctcttccatcaggctcggccggtggattaccctaaggactacctttctcatcaagttcccatatcgttccacaaacactggaacatcgatccagtgaaggtgtatttcacatggttggcacccagtgacgaagacaaagccaggcaggagacacagaaaggttttcgagaggagttataaatcagggtgacctgtgcgcctagcctgcgcagggaatgaactggagactgtggcctcatcccactgtgctgtgctcacaacacttgtgtctgccacatggcattgggtgcttcctgactttagggggagattttatgtatggtattttttgacagaggaagaaaaggggtcacaggagaaacatttttttttctgggaaaaatcacttgcttttgacttatgcagttgttttaacacttagtgatgactgtgtattctccaagctgtgatacagcagtttttttttattgtcacagggaaataaatggtaccagaagtccctttcctgttctgtctcttcattgtaatggaagtttcagttgggcatgagcctggagagatgtgactgtctacagttctatttgtatatataaaaagaagactgaaagtcttttgacatggatattgtgaatggtatgaacttttaaaccatattattgatgatgaaaattatttcctgggaactcagtaggaataataccgtattaaggaataatactgtacataaaacatcatgaaaccctagatatgaaatcccctgaagtctgtaatcatggtggttatgttttgtctattcttttgctgtttgtgcctcataaaaagagaatgaggtcttctgctagagcttcgtattgctttggaagttcatctgtgttttatttctccctgaagccctatctttatggcttacttgtaacatgaaagtagtagatgctgccagaaaatagtgtcctcaatattttaaaacaatgttgacatgttttgttcaagtcagcaagctctatgtgagtctcaggaagtgaattaaatttggaccttatgttttactcttgttttttttttttttttaaatgttacttaatgactctctcctgactcaggagagaaaccccttgtggaaggacagcatggtgatcaggcaatttctctgggttcccaaagaatgacatttgaacacagtattttgaaacagctctagttttcaaattatatctttaatatatagtaatgtaacatattcagtattaatgtataaaaagcactctaattatataattcagtttttgtaaaggtatttgcataaaatttaatatgtcttaaactaattttggtaaattacttcttttttttctttttaataaaaactgttactcattaactttgcttataatgctttttatagcccagcacagaatttaaagccataccaccaaaagtacctgtgtgtgttaatatgtttttcttgtagcatagattgactatttgcaatagtattagtatttaccatttttccaaattagcaactaccagacctcacgtgttgcagtgataacacaatgcattggattcagttttgtgaaaatggattctgtggccatccaagggatgtatcagggatgatcagctgatgagaggctccagaaggatttctagatcgcttcaagcctatactgatggccttagctttgttcagtcattgtaactgggattgttgtcattgctaccgtggtagtcaccttcatgtcatctataatagtactcctggagagccctggctgcctacaccagtggaaaagagtctccagttctgctctggcctactaactgttaccactgagagaacaacatgttcatttgacatgattgaagctggcatccgtatatgaagatccttgtcaagctttcttctgtggtctgattagtgccttctactgataccggggcacctcctctggtacttttaagtgttttgttaattatatttactttttggaatggtgtaagcctaaccacaagtaaaagatctttgcctaagtttttgatttctcaaatattgtgttcattagtctagactgggaatggggaggggaaatggggaaaatgaatgaatgaaatcagaaaaaagtcagcggctcagtaaatacagtttaaagagagaataattacttcagagctacccttttaagagaaaaccatcagaaattgataatgtttatataaagtttataaagccattgtgttttgttatataacaaatcagagatgttattttagaatcgattcccatctaaagaactcaattttgagtctgacatttccaggaccagatattgtcttactcacatttcctttgctttgaaatagggctttccttccaaatggctatttttaggctagggatgttaacatcagggatttgtgtgtggaataactggaatgtcatttttgcttttaagccatttctgatgatatagccaaagcaggttgtctgactatgtaggatttttacatcttgaaactaaatcagaaatccagacatgaaaataacctttctagaatgcctaggagcagaaaacaataatagcatgctaaatcacaaatgatgctatgtatgggtatgtaaatatcagtgctgtctgcatttctgggtttattgaagacctcttgttgtatatatcctcaaaaattaatgtaattgacatcttcaagaatgtttctattgtcttccattcataatcagagatgtaatttgtatggactaaataaaaactttattatgtaatgaaaa

SEQ ID NO: 3504 - DNA, 3652 bp, Homo sapiens
  source 1..3652: mol_type = unassigned DNA
ggagggagccgcacgcggcccagggcagcggtctaggggcgccggggccggggcgtaggggccgttgcccgcgatggaccgcaccggagacgctccggactcgtcgccgcaggtgtccaccccccagggttcctgacccctgcccctggacagcgaccccttctcagactccagttgggccggactctccaaacctgcttccgcaatgggtgggttgtgagtgctggtaagacctgctagccaacattcagctgctctgtcctctccatgcctggccggcccggcccatgcctgttcttttctcccctgtgctgccgccgcccgtggccgcccctctcctgaacttaccgccactcaggtaatgaggagccgtgggtgcagccagccttggagatgccgaagagacgggacatcctagcgatcgtcctcatcgtgctgccctggactctgctcatcactgtctggcaccagagcaccctcgcacccctgctcgcggtacataaggatgagggcagtgacccccgacgcgaaacgccgcccggcgccgaccccagggagtactgcacgtctgaccgcgacatcgtggaggtggtgcgcaccgagtacgtgtacacgcggcccccgccatggtccgacacgctgcccaccatccacgtggtgacgcccacctacagccgcccggtgcagaaggccgagctgacgcgcatggccaacacgctgctgcacgtgcccaacctccactggctggtggtggaggatgcgccgcgccggacgccgctgaccgcgcgcctgctgcgcgacaccggcctcaactacacgcacctgcacgtggagacgccccgcaactacaagctgcgcggagacgcccgcgacccacgcatcccgcggggcaccatgcagcgcaacctggccctgcgctggctgcgcgagaccttcccgcgcaactccagccagcctggcgtggtctacttcgccgacgacgacaacacctacagcctggagctcttcgaagagatgcgcagcaccaggagggtgtccgtgtggcccgtcgccttcgtgggtggcctgcggtacgaggccccacgggtgaacggggcagggaaggtggtcggctggaagacggtgtttgacccccaccggccatttgcaatagacatggctggatttgccgtcaacctgcggctcattctgcagcgaagccaggcctacttcaagctgcgaggtgtgaagggaggctaccaggaaagcagcctccttcgagaacttgtcaccctcaacgacctggagcccaaggcagccaactgcaccaagatcctggtgtggcacacacggacagagaagccagtgctggtgaatgagggcaagaagggcttcactgacccctcggtggagatctgagcctcaggatgcaggagcctcctcctcagaccctgttcttggccttccatcctctccccacggctgatggtccctccaaggccgactcctaaggaatcaccatcaccctcctttctattctgggggcttctgagagagcccagcctgatgccagaacaaaggacagagaatttaagcacagaaatcccagacctgttgttctctccatccagcgtgaccagggcccgagagacctgatggccagggtggggtgtccagcaccagccaagctggtgctccagcgcacctccccagagctccccgcactgacggggctgcaggagcaggtgcagtgggcgcccacactggccctgcagtgatgcagggcgggagggagataagaagaccccgcagtcaagtggagcatggccctccctggctccctgtccctgggctcagcacgaccacacaggacacccagccagggaattctgaagaccagagagcagcccacgggcatcacgagcgctctgctcctctcctgggcccctgctcttcccgagagctgcccccaaatcagacatacctctgtggctctcctctggttcacgtttacagagcataaggctgtcttggatcccaacaggcacccagccctgcatggggggagcctgggcctaataggcaccccctgtacctcaggctgtggcgggagcagagtccccccctccggcccctcttcctttaccccttctcctccagcagtggcaaaggggtaggctctagagccagcacaggtcactgcctgacctggactaagaaccccacggccccactgtccacacactgcctccccaccgcccacctcggctgctaggcccctcgcctggactggactggggagggaaagcgccttttcctgcagctcttcagagccacagacctcagggtggagtgagcccatggtgggcagtgggcaaggcggtgggtggtgggcaaggtgggacctcctgcagcctggaaagaggagggaggccaaggccattccctaactccctcctgcccctggtctgaggaggagggactctggagtagcagaggggctgggaaagagggggcaggggctgctgggacactgagcaggagggaggcctgagcacactgctttggaaattattctaaacacaaaaaagggaaagaaaatgttatttctccctaagtcaggagcatgcagagctagcccacctcatgtccagctgtccactttccatcctggagaaagaacagtgtgcctcaaactcctgccctccccaggcctctggggcccactggaaagggctctgaccccctggcccagccgggctctctagtggtgatccggctcattctcctgcaagttggaagcacaattttccccccaagtggaggaaaaggaaagggccccagcctactgaagaggtgtttattttttaactaacagcctcccaccccattaagactcaccaggagaggtctgagggccattcagaacccactcctgagtgggtgggtgggtgggactcagtccagagacctaacattcagaatatagcattggttgcctattttgagatggatttaatctcccacagtattcatgagaccatctgatggaatcagatccctgagccaccttgcaggacgttttccccaacctcttacaccctggatgtcactttggaaaccaagcccttggaagcaagtggggtggcatgggagagaagggaggaggtgggcacaggtggtgagcttatgtgtgggcactctactgcctcacagaagccagccaagtgccaaggtcagcttggctggtctgaggccaccttcttagccaaaaacctagggttcattttcaggactttgataatgaacaacaaaatggggacttctttgggcagatgctaggtcagttgttttcacctaatatcctcttttagctgcatgtatatttatttataattataaccctggtggactgcagccttcatctttattgggaatgagtttgttataaatcagaaatgggtccatgatgaccactgttttccaaacccagtctgttccctgctccctcgctggcaagccccaccacacaggagtgaggccaggggctaggagttctaagaacagaggctggggtgagggtggcacccaggcagctgcatctggtctgttttaatttaactgtatttaatttgctttcaaaattaaaagtcaaatacagtttttaacagtc

SEQ ID NO: 3505 - DNA, 3522 bp, Homo sapiens
  source 1..3522: mol_type = unassigned DNA
ggagggagccgcacgcggcccagggcagcggtctaggggcgccggggccggggcgtaggggccgttgcccgcgatggaccgcaccggagacgctccggactcgtcgccgcaggtgtccaccccccagggttcctgacccctgcccctggacagcgaccccttctcagactccagttgggccggactctccaaacctgcttccgcaatgggtgggttgtgagtgctggtaatgaggagccgtgggtgcagccagccttggagatgccgaagagacgggacatcctagcgatcgtcctcatcgtgctgccctggactctgctcatcactgtctggcaccagagcaccctcgcacccctgctcgcggtacataaggatgagggcagtgacccccgacgcgaaacgccgcccggcgccgaccccagggagtactgcacgtctgaccgcgacatcgtggaggtggtgcgcaccgagtacgtgtacacgcggcccccgccatggtccgacacgctgcccaccatccacgtggtgacgcccacctacagccgcccggtgcagaaggccgagctgacgcgcatggccaacacgctgctgcacgtgcccaacctccactggctggtggtggaggatgcgccgcgccggacgccgctgaccgcgcgcctgctgcgcgacaccggcctcaactacacgcacctgcacgtggagacgccccgcaactacaagctgcgcggagacgcccgcgacccacgcatcccgcggggcaccatgcagcgcaacctggccctgcgctggctgcgcgagaccttcccgcgcaactccagccagcctggcgtggtctacttcgccgacgacgacaacacctacagcctggagctcttcgaagagatgcgcagcaccaggagggtgtccgtgtggcccgtcgccttcgtgggtggcctgcggtacgaggccccacgggtgaacggggcagggaaggtggtcggctggaagacggtgtttgacccccaccggccatttgcaatagacatggctggatttgccgtcaacctgcggctcattctgcagcgaagccaggcctacttcaagctgcgaggtgtgaagggaggctaccaggaaagcagcctccttcgagaacttgtcaccctcaacgacctggagcccaaggcagccaactgcaccaagatcctggtgtggcacacacggacagagaagccagtgctggtgaatgagggcaagaagggcttcactgacccctcggtggagatctgagcctcaggatgcaggagcctcctcctcagaccctgttcttggccttccatcctctccccacggctgatggtccctccaaggccgactcctaaggaatcaccatcaccctcctttctattctgggggcttctgagagagcccagcctgatgccagaacaaaggacagagaatttaagcacagaaatcccagacctgttgttctctccatccagcgtgaccagggcccgagagacctgatggccagggtggggtgtccagcaccagccaagctggtgctccagcgcacctccccagagctccccgcactgacggggctgcaggagcaggtgcagtgggcgcccacactggccctgcagtgatgcagggcgggagggagataagaagaccccgcagtcaagtggagcatggccctccctggctccctgtccctgggctcagcacgaccacacaggacacccagccagggaattctgaagaccagagagcagcccacgggcatcacgagcgctctgctcctctcctgggcccctgctcttcccgagagctgcccccaaatcagacatacctctgtggctctcctctggttcacgtttacagagcataaggctgtcttggatcccaacaggcacccagccctgcatggggggagcctgggcctaataggcaccccctgtacctcaggctgtggcgggagcagagtccccccctccggcccctcttcctttaccccttctcctccagcagtggcaaaggggtaggctctagagccagcacaggtcactgcctgacctggactaagaaccccacggccccactgtccacacactgcctccccaccgcccacctcggctgctaggcccctcgcctggactggactggggagggaaagcgccttttcctgcagctcttcagagccacagacctcagggtggagtgagcccatggtgggcagtgggcaaggcggtgggtggtgggcaaggtgggacctcctgcagcctggaaagaggagggaggccaaggccattccctaactccctcctgcccctggtctgaggaggagggactctggagtagcagaggggctgggaaagagggggcaggggctgctgggacactgagcaggagggaggcctgagcacactgctttggaaattattctaaacacaaaaaagggaaagaaaatgttatttctccctaagtcaggagcatgcagagctagcccacctcatgtccagctgtccactttccatcctggagaaagaacagtgtgcctcaaactcctgccctccccaggcctctggggcccactggaaagggctctgaccccctggcccagccgggctctctagtggtgatccggctcattctcctgcaagttggaagcacaattttccccccaagtggaggaaaaggaaagggccccagcctactgaagaggtgtttattttttaactaacagcctcccaccccattaagactcaccaggagaggtctgagggccattcagaacccactcctgagtgggtgggtgggtgggactcagtccagagacctaacattcagaatatagcattggttgcctattttgagatggatttaatctcccacagtattcatgagaccatctgatggaatcagatccctgagccaccttgcaggacgttttccccaacctcttacaccctggatgtcactttggaaaccaagcccttggaagcaagtggggtggcatgggagagaagggaggaggtgggcacaggtggtgagcttatgtgtgggcactctactgcctcacagaagccagccaagtgccaaggtcagcttggctggtctgaggccaccttcttagccaaaaacctagggttcattttcaggactttgataatgaacaacaaaatggggacttctttgggcagatgctaggtcagttgttttcacctaatatcctcttttagctgcatgtatatttatttataattataaccctggtggactgcagccttcatctttattgggaatgagtttgttataaatcagaaatgggtccatgatgaccactgttttccaaacccagtctgttccctgctccctcgctggcaagccccaccacacaggagtgaggccaggggctaggagttctaagaacagaggctggggtgagggtggcacccaggcagctgcatctggtctgttttaatttaactgtatttaatttgctttcaaaattaaaagtcaaatacagtttttaacagtcct

SEQ ID NO: 3506 - DNA, 5737 bp, Homo sapiens
  source 1..5737: mol_type = unassigned DNA
agaggtgttcccagtatggccgatctccataggcatactggcccttaagtcaggactcagttccacgggcccttaagtcaggactcagttccatgggtgctggcccttaagtcaggactcagttccacgggtgctggcccttaagtcaggactcagttccacggaggctgttttgttggcgctcttgcctcgcctctggccctaggtgcccactgagctacactttcctcacataggacatcccttcatcttcgcagagccctatggtaacctccagttgctaaaatggcaggatcgttgaaacttccagctcaacctccctattgtaaagacgaggtcaaggagggcaatcagcatgacccaggtccccgtggagcacctgccggacacgtccaggccgccaccctcccactcccatgtgctgccccagcttctgctccccatctgggaaccaccctccactctcccacagggaagtgcttgcttccctctgaggctctgagggcacccggggagggcagggcacagccttttgtgtctctacttgccgagacgcctgagatctgaggttggtcacagatatggtgcaagtgtcaggatgggagttgtgaccacggcaggcctgggccctacactcacacacactgcccacgccgcgtcctgcctctccacgaagtcccccttgtgcctccacccatctcctcctccagcaccccattcttccccgtgcttgcctccatctcctgggctctcctgggtgtggccaagccactcctgcacctttgtgctgattcttctgcctgacccaaggtcctagaagccattctggggtccttgttagagacagcctgcgaccacagacaaacaccgccctcctccaagccccaggcagaagcagcaggctgcgagaggggaccagtgctggccaaccttgcagccccgtctcagactggggcccagagctgggggcaggtgcagcccacccgctgcctggccccaagcccctgcccagcccaggcatcacatcccacgacctgccccctgccggccagctggcgttctccaggctgggggctctctgtgttctgcttgataactgcctggtaattagctccacgattttgctactatgcttataatagcctccattaaagttatggggttttcaagccataatggcttccagagtaattaatgcacaactgggtttattgctgagtttatttttagaggttttctccctctctccccctcccttttctctcatagatgttttgaccaaaaagactggatgggagcagaaggcaccccacggcacccttgcccacaggccccatcctcccctctcttcccttcccgcccctccttcctgcttcagcctccaagcaggtgctagggccctgcagtgggggcagccattgcagaggagggtggctgtggtccaggccagaggaagcatttggcctgtgtgtgccccttacccaccctgcgcctggcccaggttcgagaggcttggaggcctgggacctcttatcctatgcccccgatgacagcatagagccagatggcctggactcaattccagctccaccatttcctaatggttgacctcaggcaagttactccccttctctggcctcgatgaacccacagggaccacagccatgcctactgcacagggctgctgtgacgttgcaggagcaggtgcatgtgaagagctgagcctcatcttcggacatctctcatgctatagggaagtttgtataaacaacagtgcaagcgggggctgagaggctgccccaaaggaaaggcagtggcccacagggactgagctggcaggacactcatcttctctccttggctttctccatcctggtattagaacctgcaccaacaccaggagcacttgagaaagctccttcgagagtctctgagaacacagaagaaatcttcctggacatttctgaagccccagccaggcccagcctccccatccttcatcagatgtggcctaagatccaaacgtgtcttggccaaagaaccaaaacgtgtcttgacacgcagccccatgcagccccagcagtggcctgggtgtggagggacaggctaaatctgggggatgtggcatgaagtcacttgcatctcagaccacaagacccagcaggcatcccgtgtggggttctaggctctgtccctcactgggccagcaaagaggagtttacgggcggacacagacacacacggcctagaatgtccactaggggaactacgtgcctgtgacgttgaaccccagtgggtcttccactccccggggaatgggtgggggagactctctggatggagtgggcctctgatggcggggtgtgggcaggggatgccggccgtcctgggaaaccacagtgctccttaatggaggggatgccggccgtcccgggaaaccacagtgctccttaatggaagacaaatcctggtcttccacaggcgtcagaactatttggagagaggacccggtgaggagaggaaaacacgctattttggaaactcaggggctaaaaaccctcctcggccatagcactcgactctgcctgaaatggtgagcacacgtgagctggggcaggagcaggcagcatggcccccaggtgaggtactgtccgtatccaacactgggcactgggacgggtgggcacagtgaggctggctgggctgcccgaggctgcctgccctccccaccacccccacgggtccctgctgcatcatgcatggtgctcagcacagaagtgaaaagggaggagaagaggatgtgacagtttccaaggcggtcaggaggtctcttcgcccagtgtccttgccatgtgagagaacggttcccagagatgctaccagtggaccctctgcaggactgaggaatcccagtggctcattctcctcacttgggccccctgctgttctcattttggaggactgtctcccctcaatgtggcagcccctgcggggacccctcttcttgctgctgcccagcccagcacctggtgctctgtcctgcacagagcggtgctccacaaggatgtcctattgacacggaagaggaaggcactctcgtacttccccccagggaccatcccagaaacatctcttctttgtcctcaaaagactgtcaccaaaatgcaaattgaaaccacagtgagatactatctcacaccagtcagaatggctattactaaaaagccaaaaaatattagatgctgatgaggctgcagagaaaaggcaacacgtatactctgttggtgggaatgtaaattagttcagccactatggaaagcaatttggagatctctcaagaacttaaaacagagctgccattctagccagcagtcccattactgggtatgtatccaaaggaaaataaagtgtttcacaaaaaaaacacctgcacctgtatgttcatcgcagcactattcccaatagcaaaggcatggaatcaatctaggtgcccatcagtggtgaactgggtaaagaaaacatggtgcatatacagcaaggaatactacacagccataaaaaaggacaaaatcatggcctttgcagcagcctggatgcagctggaggccattatcctgagcaaattgacacaggaacagaaaaccaaacacgatgcattctcacttatgagtgagagctaaacactgggtactcatgactgtaaacatgagaagaatacacactgaggactctcaaaggaagaacggctgaaaaacgccctgttgggtactatgctcatacctgggcagcgggattcatcatactccagatctcagcatcacatgcaatatgacccataacaaacctgcacatgtgcccccaaatctaaaatgttgaaattatttttaatataataattcgtggtccatatatggttaaaaaaaagaaaaaagagagagagaaaataaaacctctcacccctttatccaggctttgataagtagctggcattttagggctgcacgggagttaccctgtttaattctgagaatgaccttatgaggtagggatccacagtgccccattttatagatgggaaaactgtggcatggagaacggaaatgacttggcaaaggtcttacagcctgtgggtggcacagttgggatttaaacctggtgtctctgcagtctgtgcttctgacccctgcaccctactgactttcataaatggagcagagccatggccctgtgcctgtgggaaggacagagcccattccactctaacaggcagacaaaagaggtcctcaggtgatggacagttgaggctccattgtggaacccccgatgctgtgtgtcccagagcagggcccagccttgctggcatccattcctatacctgggtctctggctatccgcttctgctctctcttgcaggtgtccaccccccagggttcctgacccctgcccctggacagcgaccccttctcagactccagttgggccggactctccaaacctgcttccgcaatgggtaatgaggagccgtgggtgcagccagccttggagatgccgaagagacgggacatcctagcgatcgtcctcatcgtgctgccctggactctgctcatcactgtctggcaccagagcaccctcgcacccctgctcgcggtacataaggatgagggcagtgacccccgacgcgaaacgccgcccggcgccgaccccagggagtactgcacgtctgaccgcgacatcgtggaggtggtgcgcaccgagtacgtgtacacgcggcccccgccatggtccgacacgctgcccaccatccacgtggtgacgcccacctacagccgcccggtgcagaaggccgagctgacgcgcatggccaacacgctgctgcacgtgcccaacctccactggctggtggtggaggatgcgccgcgccggacgccgctgaccgcgcgcctgctgcgcgacaccggcctcaactacacgcacctgcacgtggagacgccccgcaactacaagctgcgcggagacgcccgcgacccacgcatcccgcggggcaccatgcagcgcaacctggccctgcgctggctgcgcgagaccttcccgcgcaactccagccagcctggcgtggtctacttcgccgacgacgacaacacctacagcctggagctcttcgaagagatgcgcagcaccaggagggtgtccgtgtggcccgtcgccttcgtgggtggcctgcggtacgaggccccacgggtgaacggggcagggaaggtggtcggctggaagacggtgtttgacccccaccggccatttgcaatagacatggctggatttgccgtcaacctgcggctcattctgcagcgaagccaggcctacttcaagctgcgaggtgtgaagggaggctaccaggaaagcagcctccttcgagaacttgtcaccctcaacgacctggagcccaaggcagccaactgcaccaagatcctggtgtggcacacacggacagagaagccagtgctggtgaatgagggcaagaagggcttcactgacccctcggtggagatctgagcctcaggatgcagggcagatgtgggcaggagtggagggcgtcgtcaccacagtccccttcccactgggccacctgaaagtatccaggcattaactttcacccacgcagctgggtccttctgccaccagactcttcagagggtgtcaccttccaaacatcttgctgatttttctgctggcagtgacg

SEQ ID NO: 3507 - DNA, 1271 bp, Homo sapiens
  source 1..1271: mol_type = unassigned DNA
agactccagttgggccggactctccaaacctgcttccgcaatgggtaatgaggagccgtgggtgcagccagccttggagatgccgaagagacgggacatcctagcgatcgtcctcatcgtgctgccctggactctgctcatcactgtctggcaccagagcaccctcgcacccctgctcgcggtacataaggatgagggcagtgacccccgacgcgaaacgccgcccggcgccgaccccagggagtactgcacgtctgaccgcgacatcgtggaggtggtgcgcaccgagtacgtgtacacgcggcccccgccatggtccgacacgctgcccaccatccacgtggtgacgcccacctacagccgcccggtgcagaaggccgagctgacgcgcatggccaacacgctgctgcacgtgcccaacctccactggctggtggtggaggatgcgccgcgccggacgccgctgaccgcgcgcctgctgcgcgacaccggcctcaactacacgcacctgcacgtggagacgccccgcaactacaagctgcgcggagacgcccgcgacccacgcatcccgcggggcaccatgcagcgcaacctggccctgcgctggctgcgcgagaccttcccgcgcaactccagccagcctggcgtggtctacttcgccgacgacgacaacacctacagcctggagctcttcgaagagatgcgcagcaccaggagggtgtccgtgtggcccgtcgccttcgtgggtggcctgcggtacgaggccccacgggtgaacggggcagggaaggtggtcggctggaagacggtgtttgacccccaccggccatttgcaatagacatggctggatttgccgtcaacctgcggctcattctgcagcgaagccaggcctacttcaagctgcgaggtgtgaagggaggctaccaggaaagcagcctccttcgagaacttgtcaccctcaacgacctggagcccaaggcagccaactgcaccaagatcctggtgtggcacacacggacagagaagccagtgctggtgaatgagggcaagaagggcttcactgacccctcggtggagatctgagcctcaggatgcagggcagatgtgggcaggagtggagggcgtcgtcaccacagtccccttcccactgggccacctgaaagtatccaggcattaactttcacccacgcagctgggtccttctgccaccagactcttcagagggtgtcaccttccaaacatcttgctgatttttctgctggcagtgacg

SEQ ID NO: 3508 - DNA, 1641 bp, Homo sapiens
  source 1..1641: mol_type = unassigned DNA
gggaccggaaatcaagtctacaaggcgggggggtgcacagatgaccggaagcgtgccctggcggcgctgccagccccagctgggagctggtaggggagtgcgaggaaggcgggacgcagggcggagccgctgcaggggcggggcctgcggacaggagccggggtttggggcgggaacccctcgtcccctgcagaccccgcctgctcgggcgcgggcggcggcgcggccatgaagctgaagctgaagaacgtgtttctcgcctacttcctggtgtcgatcgccggcctcctctacgcgctggtacagctcggccagccatgtgactgccttcctcccctgcgggcagcagccgagcagctacggcagaaggatctgaggatttcccagctgcaagcggaactccgacggccaccccctgcccctgcccagccccctgaacccgaggccctgcctactatctatgttgttacccccacctatgccaggctggtacagaaggcagagctggtacgactgtcccagacactgagcctggtgccccggctgcattggctgctggtggaggatgctgagggtcccaccccgctggtctcagggctgctggctgcctctggcctcctcttcacacacctggtggtcctcacgcccaaagcccagcggcttcgggagggcgagcctggctgggttcatccccgtggtgtcgagcagcggaacaaggccctggactggctccggggcagagggggtgctgtgggtggggagaaggacccaccaccaccagggacccaaggagtcgtctactttgctgacgatgacaacacctacagccgggagctgtttgaggagatgcgctggacccgtggtgtctcagtgtggcctgtggggctggtgggcggcctgcgattcgagggccctcaggtacaggacggccgggtagtgggcttccacacagcatgggagcccagcaggcccttccctgtggatatggctggatttgccgtggccctgcccttgctgttagataagcccaatgcccaatttgattccaccgctccccggggccacctggagagcagtcttctgagccaccttgtggatcccaaggacctggagccacgggctgccaactgcactcgggtactggtgtggcatactcggacagagaagcccaagatgaagcaggaggagcagctgcagcggcagggccggggctcagacccagcaattgaggtgtgatggcggccccaccccaactaccacctcttttcaggcacagaccttgtgggactgggccccaggcctgcccaggatgtggttttccaagtcctgacccttggagccagaagtggcccctctgcccctccaggcccagggcatggtcctgctgcttcacccctcccctagcctgccgtgtggcactgcccacaggctggggacaagcagcccttgtgttgagtcaggttggccctgtctagggtggaacagaaggacagatggacccaggagggagggcagctgagtaactgggtaacttattggggctgggcatgcactggggggctggaggagctgggctggacccttcccacctgagcatgctgacccccttcctacctccagaataaagaatctcaacctgga

SEQ ID NO: 3509 - DNA, 1120 bp, Homo sapiens
  source 1..1120: mol_type = unassigned DNA
agaccccgcctgctcgggcgcgggcggcggcgcggccatgaagctgaagctgaagaacgtgtttctcgcctacttcctggtgtcgatcgccggcctcctctacgcgctggtacagctcggccagccatgtgactgccttcctcccctgcgggcagcagccgagcagctacggcagaaggatctgaggatttcccagctgcaagcggaactccgacggccaccccctgcccctgcccagccccctgaacccgaggccctgcctactatctatgttgttacccccacctatgccaggctggtacagaaggcagagctggtacgactgtcccagacactgagcctggtgccccggctgcattggctgctggtggaggatgctgagggtcccaccccgctggtctcagggctgctggctgcctctggcctcctcttcacacacctggtggtcctcacgcccaaagcccagcggcttcgggagggcgagcctggctgggttcatccccgtggtgtcgagcagcggaacaaggccctggactggctccggggcagagggggtgctgtgggtggggagaaggacccaccaccaccagggacccaaggagtcgtctactttgctgacgatgacaacacctacagccgggagctgtttgaggagatgcgctggacccgtggtgtctcagtgtggcctgtggggctggtgggcggcctgcgattcgagggccctcaggtacaggacggccgggtagtgggcttccacacagcatgggagcccagcaggcccttccctgtggatatggctggatttgccgtggccctgcccttgctgttagataagcccaatgcccaatttgattccaccgctccccggggccacctggagagcagtcttctgagccaccttgtggatcccaaggacctggagccacgggctgccaactgcactcggacagagtctcgctgtgtcacccaggctggagtgcagtagcgcaatcttggcttagcgcaagctccgcctcccgggttcacaccattctcctgcctcagcctcccaagtagctgggactacaggcacccgctaccacgcccggctaatttttttgtgtttttagtagtgacgggg

SEQ ID NO: 3510 - DNA, 5068 bp, Homo sapiens
  source 1..5068: mol_type = unassigned DNA
tcggcgcagcgccatggggagcccccgggccgcgcggcccccgctgctcctgcgcccggtgaagctgctgcggaggcgcttccggctgctgctggcgctcgccgtggtgtctgtggggctctggactctgtatctggaactggtggcgtcggcccaggtcggcgggaaccccctgaaccggaggtacggcagctggagagaactggccaaggctctggccagcaggaacattccagctgtggatccacacctccagttctaccatccccagaggctgagcctcgaggaccacgacattgaccaaggggtgagcagtaacagcagctacttgaagtggaacaagcctgtcccctggctctcagagttccggggccgtgccaacctgcatgtgtttgaagactggtgtggcagctctatccagcagctcaggaggaacctgcatttcccactgtacccccatattcgcacaaccctgaggaagcttgctgtgtcccccaaatggaccaactatggcctccgcatctttggctacctgcacccctttactgatgggaaaatccagtttgccattgctgcagatgacaacgcggagttctggctgagcctcgatgaccaggtctcaggcctccagctgctggccagtgtgggcaagactggaaaggagtggaccgccccgggagagtttgggaaatttcggagccaaatttccaagccggtgagcctgtcagcctcccacaggtactacttcgaggtgctgcacaagcagaatgaggagggcaccgaccacgtggaagttgcatggcgacggaacgaccctggagccaagttcaccatcattgactccctctccctgtccctcttcacaaatgagacgttcctacagatggatgaggtgggccacatcccacagacagcagccagccacgtggactcctccaacgctcttcccagggatgagcagccgcccgctgacatgcttcggcctgacccccgggacaccctctatcgagtgcctctgatccccaagtcgcatctccgccacgtcctgcctgactgtccctacaaacccagctatctggtggatgggcttcctctgcagcgctaccagggactccggtttgttcatctgtcttttgtttaccccaatgactatacccgcctgagccacatggagacccacaataaatgtttctaccaggaaaacgcctactaccaagaccggttcagctttcaggagtacatcaagattgaccagcctgagaagcaggggctggagcagccaggttttgaggaaaaccttctagaagagtcccagtatggggaagtggcagaggagacccctgcctccaacaaccagaatgccaggatgcttgagggaagacagacacctgcctccaccctggagcaagatgccactgactaccgcctccgaagcctgcggaaactcctggctcagccccgggagggcctgctggcccccttctccaagcggaactccacagcgtccttcccagggaggaccagccacattccagtgcagcagccagagaagaggaagcaaaaacccagccctgagcccagccaagattcacctcattccgacaagtggcctcctgggcaccctgtgaagaacctgcctcagatgagggggcccaggcccaggcccgctggtgacagccccaggaagactcagtggctgaaccaggtggagtcgtacatcgcagagcagagacggggtgacaggatgcggcctcaggcccctggaaggggctggcatggggaggaggaagtggtggcggccgcaggccaggaaggacaagtggagggagaggaagagggggaagaagaggaggaggaagaggatatgagtgaggtgttcgagtacgtacctgtgtttgacccggtagtaaactgggaccagaccttcagtgcccggaatctcgacttccaagccctgaggactgactggatcgatctgagctgtaacacatctggcaacctgctgcttccagagcaggaagctctggaggtcacgcgagtcttcttgaagaagctcaaccagaggagccgggggaggtaccagctacagcgcattgtgaacgtggaaaagcgtcaggaccagctacgtgggggtcgctacctcctggagcttgaactgttggaacaaggccagcgcgtggtgcggctctcggagtatgtgtctgcacgaggctggcagggcatcgatccagctggtggggaggaggtcgaggcccggaacctgcaaggcctggtctgggacccacacaaccgtaggagacaggtcctgaatacccgggcccaagagcccaagctgtgctggcctcagggtttctcctggagtcaccgagccgtggtccacttcgtcgtgcctgtgaagaaccaggcacgctgggtacagcaattcatcaaagacatggaaaacctgttccaggtcaccggtgacccacacttcaacatcgtcatcactgactatagcagtgaggacatggatgttgagatggcactgaagaggtccaagctgcggagctaccagtacgtgaagctaagtggaaactttgaacgctcagctggacttcaggctggcatagacctcgtgaaggacccgcacagcatcatcttcctctgtgacctccacatccacttcccagctggagtcatcgatgccattcggaagcactgtgtggagggaaagatggcctttgcccccatggtgatgaggctgcattgtggggccaccccccagtggcctgagggctactgggaggtgaatgggttcgggctgcttggcatctacaagtctgacctggacaggattgggggcatgaacaccaaggagttccgagaccgctggggcggggaagactgggagctgctggacaggatactccaagcgggcctggacgtggagcgtctctccctcaggaatttcttccatcatttccattccaagcgaggcatgtggagccgtcgccagatgaagacgctgtagccggagggtgtccgcggggcccagcactccccgctctggactagcagtggctccccagggccctgctactgttcagggatggggagtggggtgacggctggaccccaagaggcctcgaagctgacggcccactccacctggagctgtcccctcacagaggcaggttccggggctcctgtctctgcctcctgggccttcagaagggaggactttgagagagaggccaggagggaccacttgctcagtcgagaacgggaagagctcctgagaaggacgggtcaggaaggagagatctgactgagcgacaccatcctcatccatgaaggtgcacgcccacatcccccaagcgctcctcacgccaagcgctgaccaccagaccctcttctagtggacatattttattggggggcggggattttaaaaacagaaaaccgaaactgctgtccagagcgggggtgaggttgtgcactgagggactgtccccacgtgcaggcctcccgcccactcctatgtcccttgggcgttgtccctggccgcgggactggtcccacgtggggcaggtctctgctccaccccaggctcgtgccttccagagacacacatctcccagtagccaccaaacagctggccactgattagggcattaacttcctccggatggctcacgtcagaccagaagcacagaacgggctgtttctggtgcttgggcattgggaggtggggagctggcgggcagggggcttgccactccctggcactggacattgaggcctgcagaacaggcagggtgatgaaggcaggggagagaagccctttcccttaccggcgtgcctgtgggtaaggcctcccgagaggacatggagaagaggtaaagaggatgtggacatatctgtcaatttccttaggcaagaagcgggtgggggctggacagaaagggacgaaaagggaagtggaagctgtgagcctcacagtccagctccactgcagacctgcccttctgcagggagagccctggccacccggccttgagtggaagaagaggaaagggtgtacgggggcaaaaccctggacagggagcaggataagaagggggcgggatgagaggtttggggaggtgaggacattgccctgagatatcccctggaggcagggagaggagtgggggcaggaggaactgaagaggggggcagtttcagggaaaatagcccttagcctttttagtcgatgccaccctttctgtcacctggagaccttgtacttctcttgcactaataaccccggtgcttttgtggctgggggtttttctgttgctgctgctgcctccaccactgctgtgaattcacccatggtgcattggacactggatcttgaactccagagtctgtttagggaggtgagcacagggctgggggaggtgcggcggggcccagaagaccaggccactgagcccgcgctccaggctgtgacggtccaaaccacggcactggagctgcagggtctgcctagtgggctctgcattccccgagagcacgagtttggcacatgggagaatggagcccgtggagaaccttctggggggtcggggagaatccctgcctccctttaaggaatcatgaaggacagagacttttgagattgtggcttaggaaggccatacctgctccctgggctgtggctttttctggtccctgctgaggccgactggcccctggagaaggatggtggggcataggctagggctgcagttggccagtggggctgccagtttctttctgggaccactctcgtcctcgggcattgcactggaaggctggaaccagcccaaactgcccacctgcttcacttccaatgactaggagccagcccagcctcctgccctgcccacacccctgcgccctgggccagtgccttgcgtttgatgttacctccacaccatctgccttaagaggaagggccgggcaaggcccctactccctagagaaatgtcttgggtaggagagggtgtgggatggtgggaggggaagcattaaatacagcaacttcttagaaaaaaaaaaa

SEQ ID NO: 3511 - DNA, 433 bp, Homo sapiens
  source 1..433: mol_type = unassigned DNA
tgaagctgacagcattcgggccgagatgtctcgctccgtggccttagctgtgctcgcgctactctctctttctggcctggaggctatccagcgtactccaaagattcaggtttactcacgtcatccagcagagaatggaaagtcaaatttcctgaattgctatgtgtctgggtttcatccatccgacattgaagttgacttactgaagaatggagagagaattgaaaaagtggagcattcagacttgtctttcagcaaggactggtctttctatctcttgtactacactgaattcacccccactgaaaaaatgagtatgcctgccgtgtgaaccatgtgactttgtcacagcccaagatagttaagtgggatcgagacatgtaagcagcatcatggaggtttgaagatgccgcatttggattggatgaattcc

SEQ ID NO: 3512 - DNA, 1027 bp, Homo sapiens
  source 1..1027: mol_type = unassigned DNA
attcctgaagctgacagcattcgggccgagatgtctcgctccgtggccttagctgtgctcgcgctactctctctttctggcctggaggctatccagcgtactccaaagattcaggtttactcacgtcatccagcagagaatggaaagtcaaatttcctgaattgctatgtgtctgggtttcatccatccgacattgaagttgacttactgaagaatggagagagaattgaaaaagtggagcattcagacttgtctttcagcaaggactggtctttctatctcttgtactacactgaattcacccccactgaaaaagatgagtatgcctgccgtgtgaaccatgtgactttgtcacagcccaagatagttaagtggggtaagtcttacattcttttgtaagctgctgaaagttgtgtatgagtagtcatatcataaagctgctttgatataaaaaaggtctatggccatactaccctgaatgagtcccatcccatctgatataaacaatctgcatattgggattgtcagggaatgttcttaaagatcagattagtggcacctgctgagatactgatgcacagcatggtttctgaaccagtagtttccctgcagttgagcagggagcagcagcagcacttgcacaaatacatatacactcttaacacttcttacctactggcttcctctagcttttgtggcagcttcaggtatatttagcactgaacgaacatctcaagaaggtataggcctttgtttgtaagtcctgctgtcctagcatcctataatcctggacttctccagtactttctggctggattggtatctgaggctagtaggaagggcttgttcctgctgggtagctctaaacaatgtattcatgggtaggaacagcagcctattctgccagccttatttctaaccattttagacatttgttagtacatggtattttaaaagtaaaacttaatgtcttccttttttttctccactgtctttttcatagatcgagacatgtaagcagcatcat

SEQ ID NO: 3513 - DNA, 1715 bp, Homo sapiens
  source 1..1715: mol_type = unassigned DNA
gcacgcgtttaatataagtggaggcgtcgcgctggcgggcattcctgaagctgacagcattcgggccgagatgtctcgctccgtggccttagctgtgctcgcgctactctctctttctggcctggaggctatccagcgtactccaaagattcaggtttactcacgtcatccagcagagaatggaaagtcaaatttcctgaattgctatgtgtctgggtttcatccatccgacattgaagttgacttactgaagaatggagagagaattgaaaaagtggagcattcagacttgtctttcagcaaggactggtctttctatctcttgtactacactgaattcacccccactgaaaaagatgagtatgcctgccgtgtgaaccatgtgactttgtcacagcccaagatagttaagtgggatcgagacatgtaagcagcatcatggaggtttgaagatgccgcatttggattggatgaattccaaattctgcttgcttgctttttaatattgatatgcttatacacttacactttatgcacaaaatgtagggttataataatgttaacatggacatgatcttctttataattctactttgagtgctgtctccatgtttgatgtatctgagcaggttgctccacaggtagctctaggagggctggcaacttagaggtggggagcagagaattctcttatccaacatcaacatcttggtcagatttgaactcttcaatctcttgcactcaaagcttgttaagatagttaagcgtgcataagttaacttccaatttacatactctgcttagaatttgggggaaaatttagaaatataattgacaggattattggaaatttgttataatgaatgaaacattttgtcatataagattcatatttacttcttatacatttgataaagtaaggcatggttgtggttaatctggtttatttttgttccacaagttaaataaatcataaaacttgatgtgttatctcttatatctcactcccactattacccctttattttcaaacagggaaacagtcttcaagttccacttggtaaaaaatgtgaaccccttgtatatagagtttggctcacagtgtaaagggcctcagtgattcacattttccagattaggaatctgatgctcaaagaagttaaatggcatagttggggtgacacagctgtctagtgggaggccagccttctatattttagccagcgttctttcctgcgggccaggtcatgaggagtatgcagactctaagagggagcaaaagtatctgaaggatttaatattttagcaaggaatagatatacaatcatcccttggtctccctgggggattggtttcaggaccccttcttggacaccaaatctatggatatttaagtcccttctataaaatggtatagtatttgcatataacctatccacatcctcctgtatactttaaatcatttctagattacttgtaatacctaatacaatgtaaatgctatgcaaatagttgttattgtttaaggaataatgacaagaaaaaaaagtctgtacatgctcagtaaagacacaaccatccctttttttccccagtgtttttgatccatggtttgctgaatccacagatgtggagcccctggatacggaaggcccgctgtactttgaatgacaaataacagatttaaaattttcaaggcatagttttatacctga

SEQ ID NO: 3514 - DNA, 1220 bp, Homo sapiens
  source 1..1220: mol_type = unassigned DNA
aatataagtggaggcgtcgcgctggcgggcattcctgaagctgacagcattcgggccgagatgtctcgctccgtggccttagctgtgctcgcgctactctctctttctggcctggaggctatccagcgtactccaaagattcaggtttactcacgtcatccagcagagaatggaaagtcaaatttcctgaattgctatgtgtctgggtttcatccatccgacattgaagttgacttactgaagaatggagagagaattgaaaaagtggagcattcagacttgtctttcagcaaggactggtctttctatctcttgtactacactgaattcacccccactgaaaaagatgagtatgcctgccgtgtgaaccatgtgactttgtcacagcccaagatagttaagtggggtaagtcttacattcttttgtaagctgctgaaagttgtgtatgagtagtcatatcataaagctgctttgatataaaaaaggtctatggccatactaccctgaatgagtcccatcccatctgatataaacaatctgcatattgggattgtcagggaatgttcttaaagatcagattagtggcacctgctgagatactgatgcacagcatggtttctgaaccagtagtttccctgcagttgagcagggagcagcagcagcacttgcacaaatacatatacactcttaacacttcttacctactggcttcctctagcttttgtggcagcttcaggtatatttagcactgaacgaacatctcaagaaggtataggcctttgtttgtaagtcctgctgtcctagcatcctataatcctggacttctccagtactttctggctggattggtatctgaggctagtaggaagggcttgttcctgctgggtagctctaaacaatgtattcatgggtaggaacagcagcctattctgccagccttatttctaaccattttagacatttgttagtacatggtattttaaaagtaaaacttaatgtcttccttttttttctccactgtctttttcatagatcgagacatgtaagcagcatcatggaggtttgaagatgccgcatttggattggatgaattccaaattctgcttgcttgctttttaatattgatatgcttatacacttacactttatgcacaaaatgtagggttataataatgttaacatggacatgatcttctttataattctactttgagtgctg

SEQ ID NO: 3515 - DNA, 1081 bp, Homo sapiens
  source 1..1081: mol_type = unassigned DNA
gggcattcctgaagctgacagcattcgggccgagatgtctcgctccgtggccttagctgtgctcgcgctactctctctttctggcctggaggctatccagcgtactccaaagattcaggtttactcacgtcatccagcagagaatggaaagtcaaatttcctgaattgctatgtgtctgggtttcatccatccgacattgaagttgacttactgaagaatggagagagaattgaaaaagtggagcattcagacttgtctttcagcaaggactggtctttctatctcttgtactacactgaattcacccccactgaaaaagatgagtatgcctgccgtgtgaaccatgtgactttgtcacagcccaagatagttaagtgggatcgagacatgtaagcagcatcatggaggtaagtttttgaccttgagaaaatgtttttgtttcactgtcctgaggactatttatagacagctctaacatgataaccctcactatgtggagaacattgacagagtaacattttagcagggaaagaagaatcctacagggtcatgttcccttctcctgtggagtggcatgaagaaggtgtatggccccaggtatggccatattactgaccctctacagagagggcaaaggaactgccagtatggtattgcaggataaaggcaggtggttacccacattacctgcaaggctttgatctttcttctgccatttccacattggacatctctgctgaggagagaaaatgaaccactcttttcctttgtataatgttgttttattcttcagacagaagagaggagttatacagctctgcagacatcccattcctgtatggggactgtgtttgcctcttagaggttcccaggccactagaggagataaagggaaacagattgttataacttgatataatgatactataatagatgtaactacaaggagctccagaagcaagagagagggaggaacttggacttctctgcatctttagttggagtccaaaggcttttcaatgaaattctactgcccagggtacattgatgctgaaaccccattcaaatctcctgttatat

SEQ ID NO: 3516 - DNA, 604 bp, Homo sapiens
  source 1..604: mol_type = unassigned DNA
tggcgggcattcctgaagctgacagcattcgggccgagatgtctcgctccgtggccttagctgtgctcgcgctactctctctttctggcctggaggctatccagcgtactccaaagattcaggtttactcacgtcatccagcagagaatggaaagtcaaatttcctgaattgctatgtgtctgggtttcatccatccgacattgaagttgacttactgaagaatggagagagaattgaaaaagtggagcattcagacttgtctttcagcaaggactggtctttctatctcttgtactacactgaattcacccccactgaaaaagatgagtatgcctgccgtgtgaaccatgtgactttgtcacagcccaagatagttaagtgggatcgagacatgtaagcagcatcatggaggtttgaagatgccgcatttggattggatgaattccaaattctgcttgcttgctttttaatattgatatgcttatacacttacactttatgcacaaaattgtttttgatccatggtttgctgaatccacagatgtggagcccctggatacggaaggcccgctgtactttgaatgacaaataacagatttaaaa

SEQ ID NO: 3517 - DNA, 2670 bp, Homo sapiens
  source 1..2670: mol_type = unassigned DNA
tcataaacaactccagctcttggattacgtcgggcaacataacagcaggcacggaattctctctgcttatttagaacctagtctgaagcaagcttttttttttttttggttaagtcaaaagtgaaactggagagggaaagctgagggaacaataagaggattaaagattagctatgacacatggcttggaaattaacctttaaccaaacatcttataagtaacgccagcgcagcttcccttgtgaatgtaaagagatccagggctcttggagagggacaagtgagagccagccaaaaaggaaaaagcaaaggcagaaacggcatcaggagagacagagatgtgaaggagggaaggagcaggagagcaggaaggaaacgcaggaggagggagcagcatctcctgtgaacacagaggagcacctgtttgctgttaaaatcgatctccctcggcaccctgagcaatggatataatatttggcaggaataggaaagaacagctggagcctgtgagggccaaagtgacaggcaagattccagcatggctgcagggaaccctgctccgcaatgggcctgggatgcacacagttggggagtccagatacaaccattggttcgacggccttgccctgctccacagcttcaccatcagagacggtgaagtctattacaggagcaaatacctgagaagcgatacctacaacaccaatattgaggcaaacaggattgtggtgtctgagtttggaacaatggcctatccggacccctgcaaaaacatattttccaaagctttctcctacttgtctcacaccatccccgatttcaccgacaactgcctgatcaacatcatgaagtgcggagaagacttctacgcgacctcagagaccaattacatcaggaaaatcaacccacagactctggaaaccctggagaaggttgattatcgtaaatacgtggcggtaaatctggcaacgtcacatccccattatgatgaggctggaaatgttctaaacatgggcacatccattgtggaaaaggggaagacaaagtatgtgatttttaagatccctgccacagtaccagagggcaagaagcaggggaagagcccctggaagcacacagaggtgttctgctccatcccatcccgctccctgctctccccaagctactaccacagctttggagtcaccgagaactatgtcatcttccttgagcagcctttcaggttggatattctcaagatggcaaccgcatacatccggagaatgagctgggcctcctgcctggctttccacagggaggagaagacttatatccacatcatcgaccaaaggaccaggcagcctgtgcagaccaagttttacacagacgccatggtggtcttccatcacgtcaacgcctacgaagaggacggctgcatcgtgtttgacgtcattgcctacgaggacaacagcctctaccagctcttctacctggccaacctgaaccaggacttcaaggagaactccaggctcacctcggtccccaccctcaggaggtttgccgtgcccctccacgtggacaagaatgcagaagtgggcacaaatttaatcaaagtggcatctacaacagccacggccctgaaggaagaagatggccaagtctactgccagccggaatttctttatgaaggcttagagcttccacgggtcaattatgctcacaatggaaagcaataccgatatgtctttgctacaggagttcagtggagtccaatcccaaccaagataataaaatatgacattctcacaaagtcatccttaaaatggagagaggacgactgctggccagcggaacccctgtttgtgcccgcgccaggtgccaaggatgaggatgacggagtaatcttatcagccattgtctctactgatccccaaaagctgccttttctgctcattctggatgccaaaagctttacggaattggcccgtgcctctgttgatgtcgatatgcacatggatctccatggattattcattacagacatggactgggacacaaaaaagcaggccgcttctgaggaacagcgggacagggcttccgactgccacggggctcctctgacctgatggtgttggggtttgggtaggggaggggagctcggctgtcagaactccatggatatgtttctttggatggaggggagggcctttgttaccttttgcacttattctttctgtgggtgctttgacaagggcatggcaagagagcttgtcagtatcatttctttcattttattttggctgtaaaaattttgtttgaaagtcaaacatttgaacatcaaatatgtattgattagatccagtccttctaagaaacctcctttcctttaacaaaaagaccttgaccatgaatcagagattgtattcaatgacattatcatcatttttagaacgagccactaacctattagagaagaggcagataattatttatcattgtgccttcctctgtctctttctctttcctttgctccctcccatgtttctggtggactaaattgtgtatctgggagttctcactttctagccaggcctgatgagttaagttacatgaccaggaaggttatgccactttgtggtcattccatgcaagtcatggcgtaatataaaataataaaaactttaaagtctg

SEQ ID NO: 3518 - DNA, 1857 bp, Homo sapiens
  source 1..1857: mol_type = unassigned DNA
gtgaatgtaaagagatccagggctcttggagagggacaagtgagagccagccaaaaaggaaaaagcaaaggcagaaacggcatcaggagagacagagatgtgaaggagggaaggagcaggagagcaggaaggaaacgcaggaggagggagcagcatctcctgtgaacacagaggagcacctgtttgctgttaaaatcgatctccctcggcaccctgagcaatggatataatatttggcaggaataggaaagaacagctggagcctgtgagggccaaagtgacaggcaagattccagcatggctgcagggaaccctgctccgcaatgggcctgggatgcacacagttggggagtccagatacaaccattggttcgacggccttgccctgctccacagcttcaccatcagagacgagctttctcctacttgtctcacaccatccccgatttcaccgacaactgcctgatcaacatcatgaagtgcggagaagacttctacgcgacctcagagaccaattacatcaggaaaatcaacccacagactctggaaaccctggagaaggttgattatcgtaaatacgtggcggtaaatctggcaacgtcacatccccattatgatgaggctggaaatgttctaaacatgggcacatccattgtggaaaaggggaagacaaagtatgtgatttttaagatccctgccacagtaccagagggcaagaagcaggggaagagcccctggaagcacacagaggtgttctgctccatcccatcccgctccctgctctccccaagctactaccacagctttggagtcaccgagaactatgtcatcttccttgagcagcctttcaggttggatattctcaagatggcaaccgcatacatccggagaatgagctgggcctcctgcctggctttccacagggaggagaagacttatatccacatcatcgaccaaaggaccaggcagcctgtgcagaccaagttttacacagacgccatggtggtcttccatcacgtcaacgcctacgaagaggacggctgcatcgtgtttgacgtcattgcctacgaggacaacagcctctaccagctcttctacctggccaacctgaaccaggacttcaaggagaactccaggctcacctcggtccccaccctcaggaggtttgccgtgcccctccacgtggacaagaatgcagaagtgggcacaaatttaatcaaagtggcatctacaacagccacggccctgaaggaagaagatggccaagtctactgccagccggaatttctttatgaaggcttagagcttccacgggtcaattatgctcacaatggaaagcaataccgatatgtctttgctacaggagttcagtggagtccaatcccaaccaagataataaaatatgacattctcacaaagtcatccttaaaatggagagaggacgactgctggccagcggaacccctgtttgtgcccgcgccaggtgccaaggatgaggatgacggagtaatcttatcagccattgtctctactgatccccaaaagctgccttttctgctcattctggatgccaaaagctttacggaattggcccgtgcctctgttgatgtcgatatgcacatggatctccatggattattcattacagacatggactgggacacaaaaaagcaggccgcttctgaggaacagcgggacagggcttccgactgccacggggctcctctgacctgatggtgttggggtttgggtaggggaggggagctcggctgtcagaactccatggatatgtttctttggatggaggggagggcctttgttaccttttgcacttattctttctgtgggtgctttgac

SEQ ID NO: 3519 - DNA, 2930 bp, Homo sapiens
  source 1..2930: mol_type = unassigned DNA
aagctgcgtcctctctttgacctgtcagtgagggagggacagtccaggcagttctgtgcgtgttcactgtttagtagtactcaaaactgccagtgtgagaggatttggaaatcactggatctgctcaatacaaaaatgttttttcgagtctttctccattttatcaggagtcattctgccactgcagtggatttccttcctgtgatggtgcaccggctcccagttttcaaaaggtacatgggaaatactcctcagaaaaaagccgtctttgggcagtgtcggggtctgccatgtgttgcaccgctgctgaccacagtggaagaggctccacggggcatctctgctcgagtctggggacattttcctaagtggctcaatggctctctacttcgaattggacctgggaaattcgagtttgggaaggataagtacaatcattggtttgatgggatggcgctgcttcaccagttcagaatggcaaagggcacagtgacatacaggagcaagtttctacagagtgatacatataaggccaacagtgctaaaaaccgaattgtgatctcagaatttggcacactggctctcccggatccatgcaagaatgtttttgaacgtttcatgtccaggtttgagctgcctggtaaagctgcagccatgactgacaatactaatgtcaactatgtgcggtacaagggtgattactacctctgcactgagaccaactttatgaataaagtggacattgaaactctggaaaaaacagaaaaggtagattggagcaaatttattgctgtgaatggagcaactgcacatcctcattatgacctggatggaacagcatacaatatggggaactcctttgggccatatggtttctcctataaggttattcgggttcctccagagaaggtggaccttggggagacaatccatggagtccaggtgatatgttctattgcttctacagagaaagggaaaccttcttactaccatagctttggaatgacaaggaactatataattttcattgaacaacctctaaagatgaacctgtggaaaattgccacttctaaaattcggggaaaggccttttcagatgggataagctgggaaccccagtgtaatacgcggtttcatgtggtggaaaaacgcactggacagctccttccagggagatactacagcaaaccttttgttacatttcatcaaatcaatgcctttgaggaccagggctgtgttataattgatttgtgctgtcaagataatggaagaaccctagaagtttaccagttacagaatctcaggaaggctggggaagggcttgatcaggtccataattcagcagccaaatctttccctcgaaggtttgttttgcctttaaatgtcagtttgaatgcccctgagggagacaacctgagtccattgtcctatacttcagccagtgctgtgaaacaggctgatggaacgatctggtgctctcatgaaaatctacatcaggaggacctagaaaaggaaggaggcattgaatttcctcagatctactatgatcgattcagtggcaaaaagtatcatttcttttatggctgtggctttcggcatttagtgggggattctctgatcaaggttgatgtggtgaataagacactgaaggtttggagagaagatggcttttatccctcagaacctgtttttgttccagcaccaggaaccaatgaagaagatggtggggttattctttctgtggtgatcactcccaaccagaatgaaagcaattttatcctagttttggatgccaagaactttgaagagctgggccgagcagaggtacctgtgcagatgccttatgggttccatggtaccttcatacccatctgatgggacaaccacaaggtctggaaactaggtttaaaataagtgtgcacttggacataaagactggagaaataaacactgaggactccaaaaggggggcaaggaggaagaggggcaggggttaaaaagctacctattgaatactatgttccctatttgggtgatgggttcgttagaagtccaaacctcagcagcacacaatatactcatgtaacaagcctgcacatgtaccccagaatctaaaataaaaataaaaagaaaaacaaagaatgtactctatacaaaagacagagcataaagggcaccgtacctcccaaaccaatgtcccaaatagacatttagtttaaaaatttctgttaaaaacagaattcactatttccttgccactgccaagtcacgccatggcagaggctcgagtgcatacaagcttcggttttacccttaatacaccatcatgaccaatggaggcattgctgctggaggtgtcatggccattaacactactttataagaggtgcggaagactgccctcactcatcatggcctagcatgtgcaatttgtgaagctgccaaagcgttagacaagcaccaagcccacttttgtctgcctgcacccaactgcaatgagcctatgtatgtcaagttggtggagtcccatggtgctgaacaccaactcaccctaattaaggttgatgacaacaagaaaccagaggaatgggtaggcctctgtaaaactgagagggaaacccccgaaaagtggttggctgcagttgtgcagtagttaaggactaggtcaaagaatcttaagtcaaggatgtcatcgaagagtatttcaaatgtaagaaatgaacaaataaaactttggcactcatgtttcttaagaaaaaacaccacaaagcagaattcataatataactatggttatagatatttattttttagggctcttacttgaaataattaagaaagtattgatacaaccttttgaagagggttttaaatttcatttattggatatatcttcctctaggtaataataagaatacacgaaataaaaa

SEQ ID NO: 3520 - DNA, 2903 bp, Homo sapiens
  source 1..2903: mol_type = unassigned DNA
gacctgtcagtgagggagggacagtccaggcagttctgtgcgtgttcactgtttagtagtactcaaaactgccagtgtgagaggatttggaaatcactggatctgctcaatacaaaaatgttttttcgagtctttctccattttatcaggagtcattctgccactgcagtggatttccttcctgtgatggtgcaccggctcccagttttcaaaaggtacatgggaaatactcctcagaaaaaagccgtctttgggcagtgtcggggtctgccatgtgttgcaccgctgctgaccacagtggaagaggctccacggggcatctctgctcgagtctggggacattttcctaagtggctcaatggctctctacttcgaattggacctgggaaattcgagtttgggaaggataagtacaatcattggtttgatgggatggcgctgcttcaccagttcagaatggcaaagggcacagtgacatacaggagcaagtttctacagagtgatacatataaggccaacagtgctaaaaaccgaattgtgatctcagaatttggcacactggctctcccggatccatgcaagaatgtttttgaacgtttcatgtccaggtttgagctgcctggtaaagctgcagccatgactgacaatactaatgtcaactatgtgcggtacaagggtgattactacctctgcactgagaccaactttatgaataaagtggacattgaaactctggaaaaaacagaaaaggtagattggagcaaatttattgctgtgaatggagcaactgcacatcctcattatgacctggatggaacagcatacaatatggggaactcctttgggccatatggtttctcctataaggttattcgggttcctccagagaaggtggaccttggggagacaatccatggagtccaggtgatatgttctattgcttctacagagaaagggaaaccttcttactaccatagctttggaatgacaaggaactatataattttcattgaacaacctctaaagatgaacctgtggaaaattgccacttctaaaattcggggaaaggccttttcagatgggataagctgggaaccccagtgtaatacgcggtttcatgtggtggaaaaacgcactggacagctccttccagggagatactacagcaaaccttttgttacatttcatcaaatcaatgcctttgaggaccagggctgtgttataattgatttgtgctgtcaagataatggaagaaccctagaagtttaccagttacagaatctcaggaaggctggggaagggcttgatcaggtccataattcagcagccaaatctttccctcgaaggtttgttttgcctttaaatgtcagtttgaatgcccctgagggagacaacctgagtccattgtcctatacttcagccagtgctgtgaaacaggctgatggaacgatctggtgctctcatgaaaatctacatcaggaggacctagaaaaggaaggaggcattgaatttcctcagatctactatgatcgattcagtggcaaaaagtatcatttcttttatggctgtggctttcggcatttagtgggggattctctgatcaaggttgatgtggtgaataagacactgaaggtttggagagaagatggcttttatccctcagaacctgtttttgttccagcaccaggaaccaatgaagaagatggtggggttattctttctgtggtgatcactcccaaccagaatgaaagcaattttatcctagttttggatgccaagaactttgaagagctgggccgagcagaggtacctgtgcagatgccttatgggttccatggtaccttcatacccatctgatgggacaaccacaaggtctggaaactaggtttaaaataagtgtgcacttggacataaagactggagaaataaacactgaggactccaaaaggggggcaaggaggaagaggggcaggggttaaaaagctacctattgaatactatgttccctatttgggtgatgggttcgttagaagtccaaacctcagcagcacacaatatactcatgtaacaagcctgcacatgtaccccagaatctaaaataaaaataaaaagaaaaacaaagaatgtactctatacaaaagacagagcataaagggcaccgtacctcccaaaccaatgtcccaaatagacatttagtttaaaaatttctgttaaaaacagaattcactatttccttgccactgccaagtcacgccatggcagaggctcgagtgcatacaagcttcggttttacccttaatacaccatcatgaccaatggaggcattgctgctggaggtgtcatggccattaacactactttataagaggtgcggaagactgccctcactcatcatggcctagcatgtgcaatttgtgaagctgccaaagcgttagacaagcaccaagcccacttttgtctgcctgcacccaactgcaatgagcctatgtatgtcaagttggtggagtcccatggtgctgaacaccaactcaccctaattaaggttgatgacaacaagaaaccagaggaatgggtaggcctctgtaaaactgagagggaaacccccgaaaagtggttggctgcagttgtgcagtagttaaggactaggtcaaagaatcttaagtcaaggatgtcatcgaagagtatttcaaatgtaagaaatgaacaaataaaactttggcactcatgtttcttaagaaaaaacaccacaaagcagaattcataatataactatggttatagatatttattttttagggctcttacttgaaataattaagaaagtattgatacaaccttttgaagagggttttaaatttcatttattggatatatcttcctctaggtaataataagaatacacg

SEQ ID NO: 3521 - DNA, 2598 bp, Homo sapiens
  source 1..2598: mol_type = unassigned DNA
gcctctttcctgaaggttgctgggagcttctgaagctttgtgtcctgtgtggctcagatgagatagcaattccgcagagtcctggaagttaaagaaggctgagttaggattgtttcctcatggtcagggaaacagccttcacatttgtatattttatgcaatatttaaggcaggattcagggacttggtattctttgggatttgcaataagaagaatattcaatatttaggcttttctaaattgaaaaatcactgccacacgttctaatgtaattgtttggtttctctatttgcattttgcggggactgccttaaaactcatttatgttttatagccttctattatagttaccattgttacatgattttatgtatagaaattggctgatctagagctttcagaaatcatactaatatgcactataaattttaaaattacttaatgtagtaatttaatgtttgcagtatgcaagggaatgtattacgtactggaaggagagaggagacaaacaccagaccctgtactcaaggagtactggtagtatcatttatcatacaagacagataagataaggtccatatgagagctataaacagatgctgtgagttcagactaaggagaatcagttcttgctgtaggtaaggggaatgctgtgtttataaagcaaatgacatggcaactggatcttgaaggatgagttagttttcaaaaggtacatgggaaatactcctcagaaaaaagccgtctttgggcagtgtcggggtctgccatgtgttgcaccgctgctgaccacagtggaagaggctccacggggcatctctgctcgagtctggggacattttcctaagtggctcaatggctctctacttcgaattggacctgggaaattcgagtttgggaaggataagtacaatcattggtttgatgggatggcgctgcttcaccagttcagaatggcaaagggcacagtgacatacaggagcaagtttctacagagtgatacatataaggccaacagtgctaaaaaccgaattgtgatctcagaatttggcacactggctctcccggatccatgcaagaatgtttttgaacgtttcatgtccaggtttgagctgcctggtaaagctgcagccatgactgacaatactaatgtcaactatgtgcggtacaagggtgattactacctctgcactgagaccaactttatgaataaagtggacattgaaactctggaaaaaacagaaaaggtagattggagcaaatttattgctgtgaatggagcaactgcacatcctcattatgacctggatggaacagcatacaatatggggaactcctttgggccatatggtttctcctataaggttattcgggttcctccagagaaggtggaccttggggagacaatccatggagtccaggtgatatgttctattgcttctacagagaaagggaaaccttcttactaccatagctttggaatgacaaggaactatataattttcattgaacaacctctaaagatgaacctgtggaaaattgccacttctaaaattcggggaaaggccttttcagatgggataagctgggaaccccagtgtaatacgcggtttcatgtggtggaaaaacgcactggacagctccttccagggagatactacagcaaaccttttgttacatttcatcaaatcaatgcctttgaggaccagggctgtgttataattgatttgtgctgtcaagataatggaagaaccctagaagtttaccagttacagaatctcaggaaggctggggaagggcttgatcaggtccataattcagcagccaaatctttccctcgaaggtttgttttgcctttaaatgtcagtttgaatgcccctgagggagacaacctgagtccattgtcctatacttcagccagtgctgtgaaacaggctgatggaacgatctggtgctctcatgaaaatctacatcaggaggacctagaaaaggaaggaggcattgaatttcctcagatctactatgatcgattcagtggcaaaaagtatcatttcttttatggctgtggctttcggcatttagtgggggattctctgatcaaggttgatgtggtgaataagacactgaaggtttggagagaagatggcttttatccctcagaacctgtttttgttccagcaccaggaaccaatgaagaagatggtggggttattctttctgtggtgatcactcccaaccagaatgaaagcaattttatcctagttttggatgccaagaactttgaagagctgggccgagcagaggtacctgtgcagatgccttatgggttccatggtaccttcatacccatctgatgggacaaccacaaggtctggaaactaggtttaaaataagtgtgcacttggacataaagactggagaaataaacactgaggactccaaaaggggggcaaggaggaagaggggcaggggttaaaaagctacctattgaatactatgttccctatttgggtgatgggttcgttagaagtccaaacctcagcagcacacaatatactcatgtaacaagcctgcacatgtaccccagaatctaaaat

SEQ ID NO: 3522 - DNA, 1983 bp, Homo sapiens
  source 1..1983: mol_type = unassigned DNA
aaggagaatcagttcttgctgtaggtaaggggaatgctgtgtttataaagcaaatgacatggcaactggatcttgaaggatgagttagttttcaaaaggtacatgggaaatactcctcagaaaaaagccgtctttgggcagtgtcggggtctgccatgtgttgcaccgctgctgaccacagtggaagaggctccacggggcatctctgctcgagtctggggacattttcctaagtggctcaatggctctctacttcgaattggacctgggaaattcgagtttgggaaggataagtacaatcattggtttgatgggatggcgctgcttcaccagttcagaatggcaaagggcacagtgacatacaggagcaagtttctacagagtgatacatataaggccaacagtgctaaaaaccgaattgtgatctcagaatttggcacactggctctcccggatccatgcaagaatgtttttgaacgtttcatgtccaggtttgagctgcctggtaaagctgcagccatgactgacaatactaatgtcaactatgtgcggtacaagggtgattactacctctgcactgagaccaactttatgaataaagtggacattgaaactctggaaaaaacagaaaaggtagattggagcaaatttattgctgtgaatggagcaactgcacatcctcattatgacctggatggaacagcatacaatatggggaactcctttgggccatatggtttctcctataaggttattcgggttcctccagagaaggtggaccttggggagacaatccatggagtccaggtgatatgttctattgcttctacagagaaagggaaaccttcttactaccatagctttggaatgacaaggaactatataattttcattgaacaacctctaaagatgaacctgtggaaaattgccacttctaaaattcggggaaaggccttttcagatgggataagctgggaaccccagtgtaatacgcggtttcatgtggtggaaaaacgcactggacagctccttccagggagatactacagcaaaccttttgttacatttcatcaaatcaatgcctttgaggaccagggctgtgttataattgatttgtgctgtcaagataatggaagaaccctagaagtttaccagttacagaatctcaggaaggctggggaagggcttgatcaggtccataattcagcagccaaatctttccctcgaaggtttgttttgcctttaaatgtcagtttgaatgcccctgagggagacaacctgagtccattgtcctatacttcagccagtgctgtgaaacaggctgatggaacgatctggtgctctcatgaaaatctacatcaggaggacctagaaaaggaaggaggcattgaatttcctcagatctactatgatcgattcagtggcaaaaagtatcatttcttttatggctgtggctttcggcatttagtgggggattctctgatcaaggttgatgtggtttggagagaagatggcttttatccctcagaacctgtttttgttccagcaccaggaaccaatgaagaagatggtggggttattctttctgtggtgatcactcccaaccagaatgaaagcaattttatcctagttttggatgccaagaactttgaagagctgggccgagcagaggtacctgtgcagatgccttatgggttccatggtaccttcatacccatctgatgggacaaccacaaggtctggaaactaggtttaaaataagtgtgcacttggacataaagactggagaaataaacactgaggactccaaaaggggggcaaggaggaagaggggcaggggttaaaaagctacctattgaatactatgttccctatttgggtgatgggttcgttagaagtccaaacctcagcagcacacaatatactcatgtaacaagcctgcacatgtaccccagaatctaaaataaaaataaaaagaaaaac

SEQ ID NO: 3523 - DNA, 2493 bp, Homo sapiens
  source 1..2493: mol_type = unassigned DNA
gggaatgctgtgtttataaagcaaatgacatggcaactggatcttgaaggatgagttagttttcaaaaggtacatgggaaatactcctcagaaaaaagccgtctttgggcagtgtcggggtctgccatgtgttgcaccgctgctgaccacagtggaagaggctccacggggcatctctgctcgagtctggggacattttcctaagtggctcaatggctctctacttcgaattggacctgggaaattcgagtttgggaaggataagtacaatcattggtttgatgggatggcgctgcttcaccagttcagaatggcaaagggcacagtgacatacaggagcaagtttctacagagtgatacatataaggccaacagtgctaaaaaccgaattgtgatctcagaatttggcacactggctctcccggatccatgcaagaatgtttttgaacgtttcatgtccaggtttgagctgcctggtaaagctgcagccatgactgacaatactaatgtcaactatgtgcggtacaagggtgattactacctctgcactgagaccaactttatgaataaagtggacattgaaactctggaaaaaacagaaaaggtagattggagcaaatttattgctgtgaatggagcaactgcacatcctcattatgacctggatggaacagcatacaatatggggaactcctttgggccatatggtttctcctataaggttattcgggttcctccagagaaggtggaccttggggagacaatccatggagtccaggtgatatgttctattgcttctacagagaaagggaaaccttcttactaccatagctttggaatgacaaggaactatataattttcattgaacaacctctaaagatgaacctgtggaaaattgccacttctaaaattcggggaaaggccttttcagatgggataagctgggaaccccagtgtaatacgcggtttcatgtggtggaaaaacgcactggacagctccttccagggagatactacagcaaaccttttgttacatttcatcaaatcaatgcctttgaggaccagggctgtgttataattgatttgtgctgtcaagataatggaagaaccctagaagtttaccagttacagaatctcaggaaggctggggaagggcttgatcaggtccataattcagcagccaaatctttccctcgaaggtttgttttgcctttaaatgtcagtttgaatgcccctgagggagacaacctgagtccattgtcctatacttcagccagtgctgtgaaacaggctgatggaacgatctggtgctctcatgaaaatctacatcaggaggacctagaaaaggaaggaggcattgaatttcctcagatctactatgatcgattcagtggcaaaaagtatcatttcttttatggctgtggctttcggcatttagtgggggattctctgatcaaggttgatgtggtgaataagacactgaaggtttggagagaagatggcttttatccctcagaacctgtttttgttccagcaccaggaaccaatgaagaagatggtggggttattctttctgtggtgatcactcccaaccagaatgaaagcaattttatcctagttttggatgccaagaactttgaagagctgggccgagcagaggtacctgtgcagatgccttatgggttccatggtaccttcatacccatctgatgggacaaccacaaggaaacttttccaagcctgttattaatcagtgacttgtcctgcttttcatcatatacagtgatgatttttctcatatagagtggagctgtcctctccagtacctggaacaatgccagccacatagtagatgcccaataaatatttagtgaaagagtgaatggaagcaagaggtgacatgattctgggaactgtgtgtagtttggttactcttgtgagtagatgtgaggaaacaagatcctttcactctcaatgtgtctacactggcagaagaattgctaatatgtgtttaggggtgtctgtattcacactatgccaacccagagtaataaatgggtccatacatgcttgtggataagaatggctttagaatttcccttagtaaggatcattacacaacagtccaaaggactgttgtcacgtggtcctatttgtgctctcaaattcttgctctttaaaaatttttttttaaagaaacggtattaatcctaagcaaaaagaacaaagctggaggcatcacgctacctgacttcgaactatactacaagcctacagtaacaaaaacagcatggtatgggtaccaaaacagatatatacaccaatggaacacaacagaggcctcagaaataacaccacacatctacaaccatctgatcttagacaaacctgataaaaacaagaaatggggaaaggattccctattaaataaatggtgctgggaaaactggctagccatatgtagaaagctgaaactggatcccttccttaca

SEQ ID NO: 3524 - DNA, 2497 bp, Homo sapiens
  source 1..2497: mol_type = unassigned DNA
gtataaagaggcaggctgcggactcggagcagctcggggctgcgcagcgggaaggctcgcctagtcggtccgcatccgtgtcgaccacctgtctggacaccacgaagatgccacccgttgggggcaaaaaggccaagaagggcatcctagaacgtttaaatgctggagagattgtgattggagatggagggtttgtctttgcactggagaagaggggctacgtaaaggcaggaccctggactcctgaagctgctgtggagcacccagaagcagttcgccagcttcatcgagagttcctcagagctggctcaaacgtcatgcagaccttcaccttctatgcgagtgaagacaagctggagaacaggggcaactatgtcttagagaagatatctgggcaggaagtcaatgaagctgcttgcgacatcgcccgacaagtggctgatgaaggagatgctttggtagcaggaggagtgagtcagacaccttcataccttagctgcaagagtgaaactgaagtcaaaaaagtatttctgcaacagttagaggtctttatgaagaagaacgtggacttcttgattgcagagtattttgaacacgttgaagaagctgtgtgggcagttgaaaccttgatagcatccggtaaacctgtggcagcaaccatgtgcattggcccagaaggagatttgcatggcgtgccccccggcgagtgtgcagtgcgcctggtgaaagcaggagcatccatcattggtgtgaactgccactttgaccccaccattagtttaaaaacagtgaagctcatgaaggagggcttggaggctgcccgactgaaagctcacctgatgagccagcccttggcttaccacactcctgactgcaacaagcagggattcatcgatctcccagaattcccatttggactggaacccagagttgccaccagatgggatattcaaaaatacgccagagaggcctacaacctgggggtcaggtacattggcgggtgctgtggatttgagccctaccacatcagggcaattgcagaggagctggccccagaaaggggctttttgccaccagcttcagaaaaacatggcagctggggaagtggtttggacatgcacaccaaaccctgggttagagcaagggccaggaaggaatactgggagaatcttcggatagcctcaggccggccatacaacccttcaatgtcaaagccagatggctggggagtgaccaaaggaacagccgagctgatgcagcagaaagaagccacaactgagcagcagctgaaagagctctttgaaaaacaaaaattcaaatcacagtagcctcgatagaagctatttttgatgaatttctaggtgtttgggtcacagttcctacaaatacggaaaagggggttaaaaagcagtgctttcatgaatgccatcctacacatattattgctattacctgaacaaaatagaattacaaatagcacttgataattttaaagtatgttttagaaattttcttaggagcaaaataagtacaaagtaaatcttgaacaggttcactaagcacccaccctgtgaaaagtattatggaaatcactgctgcacaggaaaagtaattcagatgttaatgccacttgaagaagttggtaggctagcaaagaggatgagacatgaactgtcataaaggactcagcaaccagccagggacagataaagcgctatggaaaggggcttccaagttcttttgaacatgacccttagtaacaaacacaatttatataatgacccagcaaaacacatcacatcttactgtcgaaattaaatgtgtgatccatcctagtattttctgttccattccttttcattctatttcatttataaaacatgctagttgagacttttcaaatggatttttatgacccactactgggtttggatccacagtttgaaaaatattgctacaagacacttaaggagaccatcctgtttaagtttattcttataagtaggtcagtcatatgagacctgatcaataaatatccaatacccagagtcctgctctcagagttcttctgtttcgtgacccacttttctaccagtaaaagacatagaccaatggggaggaggggaggagagatggatatttcagccctctccatcctagtcaacactggatccacctagtgcctctgggccataaggctgagcagagtgagcttgtattagttggtagcttttaaaaaatataataagaaaaaagtagagattctccaaactctagcctggtttcctagattgagaactatgatatttttctctgataatttaatatctactctcctacaaaagctcaagcctgaagatacaagactattagaagaaacatgactaccctcagtgtattagaaaagaggtcatgcagctttctaaacattattgaattgtttgagctgttttgaaattgtaattcttttcagctattaaaaagaagagcaatgaga

SEQ ID NO: 3525 - DNA, 1206 bp, Homo sapiens
  source 1..1206: mol_type = unassigned DNA
agctcggggctgcgcagcgggaaggctcgcctagtcggtccgcatccgtgtcgaccacctgtctggacaccacgaagatgccacccgttgggggcaaaaaggccaagaagggcatcctagaacgtttaaatgctggagagattgtgattggagatggagggtttgtctttgcactggagaagaggggctacgtaaaggcaggaccctggactcctgaagctgctgtggagcacccagaagcaggagcatccatcattggtgtgaactgccactttgaccccaccattagtttaaaaacagtgaagctcatgaaggagggcttggaggctgcccgactgaaagctcacctgatgagccagcccttggcttaccacactcctgactgcaacaagcagggattcatcgatctcccagaattcccatttggactggaaccagagttgccaccagatgggatattcaaaaatacgccagagaggcctacaacctgggggtcaggtacattggcgggtgctgtggatttgagccctaccacatcagggcaattgcagaggagctggccccagaaaggggctttttgccaccagcttcagaaaaacatggcagctggggaagtggtttggacatgcacaccaaaccctgggttagagcaagggccaggaaggaatactgggagaatcttcggatagcctcaggccggccatacaacccttcaatgtcaaagccagatggctggggagtgaccaaaggaacagccgagctgatgcagcagaaagaagccacaactgagcagcagctgaaagagctctttgaaaaacaaaaattcaaatcacagtagcctcgatagaagctatttttgatgaatttctaggtgtttgggtcacagttcctacaaatacggaaaagggggttaaaaagcagtgctttcatgaatgccatcctacacatattattgctattacctgaacaaaatagaattacaaatagcacttgataattttaaagtatgttttagaaattttcttaggagcaaaataagtacaaagtaaatcttgaacaggttcactaagcacccaccctgtgaaaagtattatggaaatcactgctgcacaggaaaagtaattcagatgttaatgccacttgaagaagttggtaggctagcaaagaggatgagacatgaactgtcataaaggactcagcaaccag

SEQ ID NO: 3526 - DNA, 2050 bp, Homo sapiens
  source 1..2050: mol_type = unassigned DNA
gggctgggggcgggctcctagacggccgcgcgcccgggaacccggcgcccacagagccgcggcaccatggcacctgctggacgcccgggggccaagaaggggattttggagcgcctggagagtggggaggttgtgattggagatggcagctttctcattactctggagaagagaggctatgtgaaggctgggctctggactccagaggcagtgatagaacacccagacgcagttcgtcaacttcacatggaattcttgagagcaggatcaaatgtcatgcagacttttaccttttctgccagtgaggacaatatggaaagcaagtgggaagatgtaaatgctgctgcctgtgacctcgccagggaagtggctggcaaaggtgatgctttggtagcaggggggatctgccagacatcaatatacaaataccagaaggatgaagctagaattaaaaaactttttcgacaacagctagaagtttttgcctggaaaaatgtggacttcttgattgcagagtattttgagcacgttgaagaagctgtgtgggctgtggaagtcttaaaagaatcagatagacccgtggcagttaccatgtgcataggcccagagggagacatgcatgatataacccccggagaatgtgctgtgaggctggtgaaggcaggggcttccatcgttggcgtgaactgccgctttgggcccgacaccagcttgaagacgatggagctcatgaaggagggtcttgagtgggcagggctgaaagcgcacctcatggtgcagcctctggggttccacgcgcctgactgtggcaaagaggggtttgtggatctcccagaatatccctttggactggagtccagagttgccaccagatgggatattcaaaaatacgccagagaggcctacaacctgggggtcaggtacattggcgggtgctgtggatttgagccctaccacatcagggcaattgcagaggagctggccccagaaaggggctttttgccaccagcttcagaaaaacacggcagctggggaagtggtttggacatgcacaccaaaccctggattagagcaagggctcgaagggagtattgggagaatctgctgccagcttcaggcagacctttctgtccttcgctgtcaaagccagacttctaaggagtagtgaaagaaaaccctgaaataatcgaacaggaaaaagttgccctcaagcctgacctggaaccgttcctcaccttcatcctcaccatgccctgctatctccagctgctgagcagctgaggtgctgcagccccttcccttccagcccacaagtgtgtgcatattgagctcctgctgtggttaagcactgcaacagactctaccagagatgcaaagagaagcgagagaggcaccttgttctccaagaacttactgtccaatcatgctgtggtgcattcctttgaagatcatgaagaatagccaaacttgtctttgagggtgaatttgacactttaaaataatcagaagtcactgagacccaaagctagtgaataattcaagtgactaagctagatacttgaggatgatagagcaacactaaactaaagcaatgagtctgctttttttaatgatttatacaatgactccaaaggcaatcccaaagaaaagatgtaaagaatgttttgagcaatggtagcattattgaaataaatgtttaactatccaaagtgattactttcaaagatgatttttacttaaagatattaggtctggccaggcgaagtgactcacacctgcaatcccagcactttgggaggccgaggcgggcggatcacctgaggtcagcagttcaagaccagcctgaccaacatggtgaaaccctgtctctaccaaaatacaaaaattagccgggcatgatggcgggtgcctgtaatcccagctactcgggaggctgaggcaggagaatcgcttgaacccaggaggcggagcttgcagtgagccgagatcaggccattgcacttcagcctgggtgacagagtgagactccatctcaaaaaaaaaaaaaaaa

SEQ ID NO: 3527 - DNA, 1537 bp, Homo sapiens
  source 1..1537: mol_type = unassigned DNA
acagagccgcggcaccatggcacctgctggacgcccgggggccaagaaggggattttggagcgcctggagagtggggaggttgtgattggagatggcagctttctcattactctggagaagagaggctatgtgaaggctgggctctggactccagaggcagtgatagaacacccagacgcagttcgtcaacttcacatggaattcttgagagcaggatcaaatgtcatgcagacttttaccttttctgccagtgaggacaatatggaaagcaagtattttgagcacgttgaagaagctgtgtgggctgtggaagtcttaaaagaatcagatagacccgtggcagttaccatgtgcataggcccagagggagacatgcatgatataacccccggagaatgtgctgtgaggctggtgaaggcaggggcttccatcgttggcgtgaactgccgctttgggcccgacaccagcttgaagacgatggagctcatgaaggagggtcttgagtgggcagggctgaaagcgcacctcatggtgcagcctctggggttccacgcgcctgactgtggcaaagaggggtttgtggatctcccagaatatccctttggactggagtccagagttgccaccagatgggatattcaaaaatacgccagagaggcctacaacctgggggtcaggtacattggcgggtgctgtggatttgagccctaccacatcagggcaattgcagaggagctggccccagaaaggggctttttgccaccagcttcagaaaaacacggcagctggggaagtggtttggacatgcacaccaaaccctggattagagcaagggctcgaagggagtattgggagaatctgctgccagcttcaggcagacctttctgtccttcgctgtcaaagccagacttctaaggagtagtgaaagaaaaccctgaaataatcgaacaggaaaaagttgccctcaagcctgacctggaaccgttcctcaccttcatcctcaccatgccctgctatctccagctgctgagcagctgaggtgctgcagccccttcccttccagcccacaagtgtgtgcatattgagctcctgctgtggttaagcactgcaacagactctaccagagatgcaaagagaagcgagagaggcaccttgttctccaagaacttactgtccaatcatgctgtggtgcattcctttgaagatcatgaagaatagccaaacttgtctttgagggtgaatttgacactttaaaataatcagaagtcactgagacccaaagctagtgaataattcaagtgactaagctagatacttgaggatgatagagcaacactaaactaaagcaatgagtctgctttttttaatgatttatacaatgactccaaaggcaatcccaaagaaaagatgtaaagaatgttttgagcaatggtagcattattgaaataaatgtttaactatccaaagtgattactttcaaagatgatttttacttaaagatattaggtctggccaggcgaagtgactcacacctgc

SEQ ID NO: 3528 - DNA, 1802 bp, Homo sapiens
  source 1..1802: mol_type = unassigned DNA
acaagtctttccgcctccccagcccgcccgggagctgcgagccgcgagctggattatggtggcctgagcagccaacgcagccgcaggagcccggagcccttgcccctgcccgcgccgccgcccgccggggggaccagggaagccgccaccggcccgccatgcccgcccctcccagccccgccgggagcccgcgcccgctgcccaggctggccgccgccgtgccgatgtagcgggctccggatcccagcctctcccctgctcccgtgctctgcggatctcccctgaccgctctccacagcccggacccgggggctggcccagggccctgcaggccctggcgtcctgatgcccccaagctccctctcctgagaagccaccagcaccacccagacttgggggcaggcgccagggacggacgtgggccagtgcgagcccagagggcccgaaggccggggcccaccatggcccaagccctgccctggctcctgctgtggatgggcgcgggagtgctgcctgcccacggcacccagcacggcatccggctgcccctgcgcagcggcctggggggcgcccccctggggctgcggctgccccgggagaccgacgaagagcccgaggagcccggccggaggggcagctttgtggagatggtggacaacctgaggggcaagtcggggcagggctactacgtggagatgaccgtgggcagccccccgcagacgctcaacatcctggtggatacaggcagcagtaactttgcagtgggtgctgccccccaccccttcctgcatcgctactaccagaggcagctgtccagcacataccgggacctccggaagggtgtgtatgtgccctacacccagggcaagtgggaaggggagctgggcaccgacctggtaagcatcccccatggccccaacgtcactgtgcgtgccaacattgctgccatcactgaatcagacaagttcttcatcaacggctccaactgggaaggcatcctggggctggcctatgctgagattgccaggcctgacgactccctggagcctttctttgactctctggtaaagcagacccacgttcccaacctcttctccctgcagctttgtggtgctggcttccccctcaaccagtctgaagtgctggcctctgtcggagggagcatgatcattggaggtatcgaccactcgctgtacacaggcagtctctggtatacacccatccggcgggagtggtattatgaggtgatcattgtgcgggtggagatcaatggacaggatctgaaaatggactgcaaggagtacaactatgacaagagcattgtggacagtggcaccaccaaccttcgtttgcccaagaaagtgtttgaagctgcagtcaaatccatcaaggcagcctcctccacggagaagttccctgatggtttctggctaggagagcagctggtgtgctggcaagcaggcaccaccccttggaacattttcccagtcatctcactctacctaatgggtgaggttaccaaccagtccttccgcatcaccatccttccgcagcaatacctgcggtggaagatgtggccacgtcccaagacgactgttacatgccatctcacagtcatccacgggcactgttatgggagctgttatcatggagggcttctattgtctttgatcgggcccgaaaacgaattggctttgctgtcagcgcttgccatgtgcacgatgagttcaggacggcagcggtggaaggcctgtcaccttggacatggaagactgtggctacaacattccacagacagatga

SEQ ID NO: 3529 - DNA, 5847 bp, Homo sapiens
  source 1..5847: mol_type = unassigned DNA
acaagtctttccgcctccccagcccgcccgggagctgcgagccgcgagctggattatggtggcctgagcagccaacgcagccgcaggagcccggagcccttgcccctgcccgcgccgccgcccgccggggggaccagggaagccgccaccggcccgccatgcccgcccctcccagccccgccgggagcccgcgcccgctgcccaggctggccgccgccgtgccgatgtagcgggctccggatcccagcctctcccctgctcccgtgctctgcggatctcccctgaccgctctccacagcccggacccgggggctggcccagggccctgcaggccctggcgtcctgatgcccccaagctccctctcctgagaagccaccagcaccacccagacttgggggcaggcgccagggacggacgtgggccagtgcgagcccagagggcccgaaggccggggcccaccatggcccaagccctgccctggctcctgctgtggatgggcgcgggagtgctgcctgcccacggcacccagcacggcatccggctgcccctgcgcagcggcctggggggcgcccccctggggctgcggctgccccgggagaccgacgaagagcccgaggagcccggccggaggggcagctttgtggagatggtggacaacctgaggggcaagtcggggcagggctactacgtggagatgaccgtgggcagccccccgcagacgctcaacatcctggtggatacaggcagcagtaactttgcagtgggtgctgccccccaccccttcctgcatcgctactaccagaggcagctgtccagcacataccgggacctccggaagggtgtgtatgtgccctacacccagggcaagtgggaaggggagctgggcaccgacctggtaagcatcccccatggccccaacgtcactgtgcgtgccaacattgctgccatcactgaatcagacaagttcttcatcaacggctccaactgggaaggcatcctggggctggcctatgctgagattgccaggcctgacgactccctggagcctttctttgactctctggtaaagcagacccacgttcccaacctcttctccctgcagctttgtggtgctggcttccccctcaaccagtctgaagtgctggcctctgtcggagggagcatgatcattggaggtatcgaccactcgctgtacacaggcagtctctggtatacacccatccggcgggagtggtattatgaggtgatcattgtgcgggtggagatcaatggacaggatctgaaaatggactgcaaggagtacaactatgacaagagcattgtggacagtggcaccaccaaccttcgtttgcccaagaaagtgtttgaagctgcagtcaaatccatcaaggcagcctcctccacggagaagttccctgatggtttctggctaggagagcagctggtgtgctggcaagcaggcaccaccccttggaacattttcccagtcatctcactctacctaatgggtgaggttaccaaccagtccttccgcatcaccatccttccgcagcaatacctgcggccagtggaagatgtggccacgtcccaagacgactgttacaagtttgccatctcacagtcatccacgggcactgttatgggagctgttatcatggagggcttctacgttgtctttgatcgggcccgaaaacgaattggctttgctgtcagcgcttgccatgtgcacgatgagttcaggacggcagcggtggaaggcccttttgtcaccttggacatggaagactgtggctacaacattccacagacagatgagtcaaccctcatgaccatagcctatgtcatggctgccatctgcgccctcttcatgctgccactctgcctcatggtgtgtcagtggtgctgcctccgctgcctgcgccagcagcatgatgactttgctgatgacatctccctgctgaagtgaggaggcccatgggcagaagatagagattcccctggaccacacctccgtggttcactttggtcacaagtaggagacacagatggcacctgtggccagagcacctcaggaccctccccacccaccaaatgcctctgccttgatggagaaggaaaaggctggcaaggtgggttccagggactgtacctgtaggaaacagaaaagagaagaaagaagcactctgctggcgggaatactcttggtcacctcaaatttaagtcgggaaattctgctgcttgaaacttcagccctgaacctttgtccaccattcctttaaattctccaacccaaagtattcttcttttcttagtttcagaagtactggcatcacacgcaggttaccttggcgtgtgtccctgtggtaccctggcagagaagagaccaagcttgtttccctgctggccaaagtcagtaggagaggatgcacagtttgctatttgctttagagacagggactgtataaacaagcctaacattggtgcaaagattgcctcttgaattaaaaaaaaaaactagattgactatttatacaaatgggggcggctggaaagaggagaaggagagggagtacaaagacagggaatagtgggatcaaagctaggaaaggcagaaacacaaccactcaccagtcctagttttagacctcatctccaagatagcatcccatctcagaagatgggtgttgttttcaatgttttcttttctgtggttgcagcctgaccaaaagtgagatgggaagggcttatctagccaaagagctcttttttagctctcttaaatgaagtgcccactaagaagttccacttaacacatgaatttctgccatattaatttcattgtctctatctgaaccaccctttattctacatatgataggcagcactgaaatatcctaaccccctaagctccaggtgccctgtgggagagcaactggactatagcagggctgggctctgtcttcctggtcataggctcactctttcccccaaatcttcctctggagctttgcagccaaggtgctaaaaggaataggtaggagacctcttctatctaatccttaaaagcataatgttgaacattcattcaacagctgatgccctataacccctgcctggatttcttcctattaggctataagaagtagcaagatctttacataattcagagtggtttcattgccttcctaccctctctaatggcccctccatttatttgactaaagcatcacacagtggcactagcattataccaagagtatgagaaatacagtgctttatggctctaacattactgccttcagtatcaaggctgcctggagaaaggatggcagcctcagggcttccttatgtcctccaccacaagagctccttgatgaaggtcatctttttcccctatcctgttcttcccctccccgctcctaatggtacgtgggtacccaggctggttcttgggctaggtagtggggaccaagttcattacctccctatcagttctagcatagtaaactacggtaccagtgttagtgggaagagctgggttttcctagtatacccactgcatcctactcctacctggtcaacccgctgcttccaggtatgggacctgctaagtgtggaattacctgataagggagagggaaatacaaggagggcctctggtgttcctggcctcagccagctgcccacaagccataaaccaataaaacaagaatactgagtcagttttttatctgggttctcttcattcccactgcacttggtgctgctttggctgactgggaacaccccataactacagagtctgacaggaagactggagactgtccacttctagctcggaacttactgtgtaaataaactttcagaactgctaccatgaagtgaaaatgccacattttgctttataatttctacccatgttgggaaaaactggctttttcccagccctttccagggcataaaactcaaccccttcgatagcaagtcccatcagcctattatttttttaaagaaaacttgcacttgtttttctttttacagttacttccttcctgccccaaaattataaactctaagtgtaaaaaaaagtcttaacaacagcttcttgcttgtaaaaatatgtattatacatctgtatttttaaattctgctcctgaaaaatgactgtcccattctccactcactgcatttggggcctttcccattggtctgcatgtcttttatcattgcaggccagtggacagagggagaagggagaacaggggtcgccaacacttgtgttgctttctgactgatcctgaacaagaaagagtaacactgaggcgctcgctcccatgcacaactctccaaaacacttatcctcctgcaagagtgggctttccagggtctttactgggaagcagttaagccccctcctcaccccttccttttttctttctttactcctttggcttcaaaggattttggaaaagaaacaatatgctttacactcattttcaatttctaaatttgcaggggatactgaaaaatacggcaggtggcctaaggctgctgtaaagttgaggggagaggaaatcttaagattacaagataaaaaacgaatcccctaaacaaaaagaacaatagaactggtcttccattttgccacctttcctgttcatgacagctactaacctggagacagtaacatttcattaaccaaagaaagtgggtcacctgacctctgaagagctgagtactcaggccactccaatcaccctacaagatgccaaggaggtcccaggaagtccagctccttaaactgacgctagtcaataaacctgggcaagtgaggcaagagaaatgaggaagaatccatctgtgaggtgataggcaaggatgaaagacaaagaaggaaaagagtatcaaaggcagaaaggagatcatttagttgggtctgaaaggaaaagtctttgctatccgacatgtactgctagtacctgtaagcattttaggtcccagaatggaaaaaaaaatcagctattggtaatataataatgtcctttccctggagtcagtttttttaaaaagttaactcttagtttttacttgtttaattctaaaagagaagggagctgaggccattccctgtaggagtaaagataaaaggataggaaaagattcaaagctctaatagagtcacagctttcccaggtataaaacctaaaattaagaagtacaataagcagaggtggaaaatgatctagttcctgatagctacccacagagcaagtgatttataaatttgaaatccaaactactttcttaatatcactttggtctccatttttcccaggacaggaaatatgtccccccctaactttcttgcttcaaaaattaaaatccagcatcccaagatcattctacaagtaattttgcacagacatctcctcaccccagtgcctgtctggagctcacccaaggtcaccaaacaacttggttgtgaaccaactgccttaaccttctgggggagggggattagctagactaggagaccagaagtgaatgggaaagggtgaggacttcacaatgttggcctgtcagagcttgattagaagccaagacagtggcagcaaaggaagacttggcccaggaaaaacctgtgggttgtgctaatttctgtccagaaaatagggtggacagaagcttgtggggtacatggaggaattgggacctggttatgttgttattctcggactgtgaattttggtgatgtaaaacagaatattctgtaaacctaatgtctgtataaataatgagcgttaacacagtaaaatattcaataagaagtcaaactactagggtta

SEQ ID NO: 3530 - DNA, 1333 bp, Homo sapiens
  source 1..1333: mol_type = unassigned DNA
accatggcccaagccctgccctggctcctgctgtggatgggcgcgggagtgctgcctgcccacggcacccagcacggcatccggctgcccctgcgcagcggcctggggggcgcccccctggggctgcggctgccccgggagaccgacgaagagcccgaggagcccggccggaggggcagctttgtggagatggtggacaacctgaggggcaagtcggggcagggctactacgtggagatgaccgtgggcagccccccgcagacgctcaacatcctggtggatacaggcagcagtaactttgcagtgggtgctgccccccaccccttcctgcatcgctactaccagaggcagctgtccagcacataccgggacctccggaagggtgtgtatgtgccctacacccagggcaagtgggaaggggagctgggcaccgacctgctttgtggtgctggcttccccctcaaccagtctgaagtgctggcctctgtcggagggagcatgatcattggaggtatcgaccactcgctgtacacaggcagtctctggtatacacccatccggcgggagtggtattatgaggtgatcattgtgcgggtggagatcaatggacaggatctgaaaatggactgcaaggagtacaactatgacaagagcattgtggacagtggcaccaccaaccttcgtttgcccaagaaagtgtttgaagctgcagtcaaatccatcaaggcagcctcctccacggagaagttccctgatggtttctggctaggagagcagctggtgtgctggcaagcaggcaccaccccttggaacattttcccagtcatctcactctacctaatgggtgaggttaccaaccagtccttccgcatcaccatccttccgcagcaatacctgcggccagtggaagatgtggccacgtcccaagacgactgttacaagtttgccatctcacagtcatccacgggcactgttatgggagctgttatcatggagggcttctacgttgtctttgatcgggcccgaaaacgaattggctttgctgtcagcgcttgccatgtgcacgatgagttcaggacggcagcggtggaaggcccttttgtcaccttggacatggaagactgtggctacaacattccacagacagatgagtcaaccctcatgaccatagcctatgtcatggctgccatctgcgccctcttcatgctgccactctgcctcatggtgtgtcagtggtgctgcctccgctgcctgcgccagcagcatgatgactttgctgatgacatctccctgctgaagtgaggaggcccatgggcagaagatagagattccc

SEQ ID NO: 3531 - DNA, 1408 bp, Homo sapiens
  source 1..1408: mol_type = unassigned DNA
accatggcccaagccctgccctggctcctgctgtggatgggcgcgggagtgctgcctgcccacggcacccagcacggcatccggctgcccctgcgcagcggcctggggggcgcccccctggggctgcggctgccccgggagaccgacgaagagcccgaggagcccggccggaggggcagctttgtggagatggtggacaacctgaggggcaagtcggggcagggctactacgtggagatgaccgtgggcagccccccgcagacgctcaacatcctggtggatacaggcagcagtaactttgcagtgggtgctgccccccaccccttcctgcatcgctactaccagaggcagctgtccagcacataccgggacctccggaagggtgtgtatgtgccctacacccagggcaagtgggaaggggagctgggcaccgacctgcctgacgactccctggagcctttctttgactctctggtaaagcagacccacgttcccaacctcttctccctgcagctttgtggtgctggcttccccctcaaccagtctgaagtgctggcctctgtcggagggagcatgatcattggaggtatcgaccactcgctgtacacaggcagtctctggtatacacccatccggcgggagtggtattatgaggtgatcattgtgcgggtggagatcaatggacaggatctgaaaatggactgcaaggagtacaactatgacaagagcattgtggacagtggcaccaccaaccttcgtttgcccaagaaagtgtttgaagctgcagtcaaatccatcaaggcagcctcctccacggagaagttccctgatggtttctggctaggagagcagctggtgtgctggcaagcaggcaccaccccttggaacattttcccagtcatctcactctacctaatgggtgaggttaccaaccagtccttccgcatcaccatccttccgcagcaatacctgcggccagtggaagatgtggccacgtcccaagacgactgttacaagtttgccatctcacagtcatccacgggcactgttatgggagctgttatcatggagggcttctacgttgtctttgatcgggcccgaaaacgaattggctttgctgtcagcgcttgccatgtgcacgatgagttcaggacggcagcggtggaaggcccttttgtcaccttggacatggaagactgtggctacaacattccacagacagatgagtcaaccctcatgaccatagcctatgtcatggctgccatctgcgccctcttcatgctgccactctgcctcatggtgtgtcagtggtgctgcctccgctgcctgcgccagcagcatgatgactttgctgatgacatctccctgctgaagtgaggaggcccatgggcagaagatagagattccc

SEQ ID NO: 3532 - DNA, 1465 bp, Homo sapiens
  source 1..1465: mol_type = unassigned DNA
accatggcccaagccctgccctggctcctgctgtggatgggcgcgggagtgctgcctgcccacggcacccagcacggcatccggctgcccctgcgcagcggcctggggggcgcccccctggggctgcggctgccccgggagaccgacgaagagcccgaggagcccggccggaggggcagctttgtggagatggtggacaacctgaggggcaagtcggggcagggctactacgtggagatgaccgtgggcagccccccgcagacgctcaacatcctggtggatacaggcagcagtaactttgcagtgggtgctgccccccaccccttcctgcatcgctactaccagaggcagctgtccagcacataccgggacctccggaagggtgtgtatgtgccctacacccagggcaagtgggaaggggagctgggcaccgacctggtaagcatcccccatggccccaacgtcactgtgcgtgccaacattgctgccatcactgaatcagacaagttcttcatcaacggctccaactgggaaggcatcctggggctggcctatgctgagattgccaggctttgtggtgctggcttccccctcaaccagtctgaagtgctggcctctgtcggagggagcatgatcattggaggtatcgaccactcgctgtacacaggcagtctctggtatacacccatccggcgggagtggtattatgaggtgatcattgtgcgggtggagatcaatggacaggatctgaaaatggactgcaaggagtacaactatgacaagagcattgtggacagtggcaccaccaaccttcgtttgcccaagaaagtgtttgaagctgcagtcaaatccatcaaggcagcctcctccacggagaagttccctgatggtttctggctaggagagcagctggtgtgctggcaagcaggcaccaccccttggaacattttcccagtcatctcactctacctaatgggtgaggttaccaaccagtccttccgcatcaccatccttccgcagcaatacctgcggccagtggaagatgtggccacgtcccaagacgactgttacaagtttgccatctcacagtcatccacgggcactgttatgggagctgttatcatggagggcttctacgttgtctttgatcgggcccgaaaacgaattggctttgctgtcagcgcttgccatgtgcacgatgagttcaggacggcagcggtggaaggcccttttgtcaccttggacatggaagactgtggctacaacattccacagacagatgagtcaaccctcatgaccatagcctatgtcatggctgccatctgcgccctcttcatgctgccactctgcctcatggtgtgtcagtggtgctgcctccgctgcctgcgccagcagcatgatgactttgctgatgacatctccctgctgaagtgaggaggcccatgggcagaagatagagattccc

SEQ ID NO: 3533 - DNA, 1236 bp, Homo sapiens
  source 1..1236: mol_type = unassigned DNA
aatagataggagagcaagcctcaccaatggttcccttcatctatctgcaagcccactttacactctgttctgggtggtccagcacataccgggacctccggaagggtgtgtatgtgccctacacccagggcaagtgggaaggggagctgggcaccgacctggtaagcatcccccatggccccaacgtcactgtgcgtgccaacattgctgccatcactgaatcagacaagttcttcatcaacggctccaactgggaaggcatcctggggctggcctatgctgagattgccaggctttgtggtgctggcttccccctcaaccagtctgaagtgctggcctctgtcggagggagcatgatcattggaggtatcgaccactcgctgtacacaggcagtctctggtatacacccatccggcgggagtggtattatgaggtgatcattgtgcgggtggagatcaatggacaggatctgaaaatggactgcaaggagtacaactatgacaagagcattgtggacagtggcaccaccaaccttcgtttgcccaagaaagtgtttgaagctgcagtcaaatccatcaaggcagcctcctccacggagaagttccctgatggtttctggctaggagagcagctggtgtgctggcaagcaggcaccaccccttggaacattttcccagtcatctcactctacctaatgggtgaggttaccaaccagtccttccgcatcaccatccttccgcagcaatacctgcggccagtggaagatgtggccacgtcccaagacgactgttacaagtttgccatctcacagtcatccacgggcactgttatgggagctgttatcatggagggcttctacgttgtctttgatcgggcccgaaaacgaattggctttgctgtcagcgcttgccatgtgcacgatgagttcaggacggcagcggtggaaggcccttttgtcaccttggacatggaagactgtggctacaacattccacagacagatgagtcaaccctcatgaccatagcctatgtcatggctgccatctgcgccctcttcatgctgccactctgcctcatggtgtgtcagtggtgctgcctccgctgcctgcgccagcagcatgatgactttgctgatgacatctccctgctgaagtgaggaggcccatgggcagaagatagagattcccctggaccacacctccgtggttcactttggtcacaagtaggagacacag

SEQ ID NO: 3534 - DNA, 2824 bp, Homo sapiens
  source 1..2824: mol_type = unassigned DNA
cgctggggcgctttccgaggaaattcgggactcgagtttcccggggaagaggcgcggcctgagcccggcgagggtggggagggcaggcgcaggtggaccccggcgccccccgagccccgctgtgaccttggccgcgggggaggggctgggccgctgcggggcagtcgcggccgccagagggggcagcggagaagaacttgcccaacttggcggcgcgggctggggcggctctgcgcctccgcgcccgcctccccggcctccgccttctcccctcccgcgagcctcctcccctcccgcgagcctcctcccctgggccctcctcccgtcctccccgccgccgccggtcccggtgcgcgcccatccctgcccgcagccccgcgcgccggccgagtcgctgagccgcggctgccggacgggacgggaccggctaggctgggcgcgccccccgggccccgccgtgggcatgggcgcactggcccgggcgctgctgctgcctctgctggcccagtggctcctgcgcgccgccccggagctggcccccgcgcccttcacgctgcccctccgggtggccgcggccacgaaccgcgtagttgcgcccaccccgggacccgggacccctgccgagcgccacgccgacggcttggcgctcgccctggagcctgccctggcgtcccccgcgggcgccgccaacttcttggccatggtagacaacctgcagggggactctggccgcggctactacctggagatgctgatcgggacccccccgcagaagctacagattctcgttgacactggaagcagtaactttgccgtggcaggaaccccgcactcctacatagacacgtactttgacacagagaggtctagcacataccgctccaagggctttgacgtcacagtgaagtacacacaaggaagctggacgggcttcgttggggaagacctcgtcaccatccccaaaggcttcaatacttcttttcttgtcaacattgccactatttttgaatcagagaatttctttttgcctgggattaaatggaatggaatacttggcctagcttatgccacacttgccaagccatcaagttctctggagaccttcttcgactccctggtgacacaagcaaacatccccaacgttttctccatgcagatgtgtggagccggcttgcccgttgctggatctgggaccaacggaggtagtcttgtcttgggtggaattgaaccaagtttgtataaaggagacatctggtatacccctattaaggaagagtggtactaccagatagaaattctgaaattggaaattggaggccaaagccttaatctggactgcagagagtataacgcagacaaggccatcgtggacagtggcaccacgctgctgcgcctgccccagaaggtgtttgatgcggtggtggaagctgtggcccgcgcatctctgattccagaattctctgatggtttctggactgggtcccagctggcgtgctggacgaattcggaaacaccttggtcttacttccctaaaatctccatctacctgagagacgagaactccagcaggtcattccgtatcacaatcctgcctcagaaattgcaggtgctgcagtgtctgaaatttccgggcctttctcaacagaggatgtagccagcaactgtgtccccgctcagtctttgagcgagcccattttgtggattgtgtcctatgcgctcatgagcgtctgtggagccatcctccttgtcttaatcgtcctgctgctgctgccgttccggtgtcagcgtcgcccccgtgaccctgaggtcgtcaatgatgagtcctctctggtcagacatcgctggaaatgaatagccaggcctgacctcaagcaaccatgaactcagctattaagaaaatcacatttccagggcagcagccgggatcgatggtggcgctttctcctgtgcccacccgtcttcaatctctgttctgctcccagatgccttctagattcactgtcttttgattcttgattttcaagctttcaaatcctccctacttccaagaaaaataattaaaaaaaaaacttcattctaaaccaaaacagagtggattgggctgcaggctctatggggttcgttatgccaaagtgtctacatgtgccaccaacataaaacaaaaccaagccttggctcgttctcttctctcttcaatctctggaaaaataagtacatatagttgataacccctcttagcttacaggaagctttttgtattaattgcctttgaggttattttccgccagacctcaacctgggtcaaagtggtacaggaaggcttgcagtatgatggcaggagaatcagcctggggcctggggatgtaaccaagctgtacccttgagacctggaaccagagccacaggccccttttgtgggtttctctgtgctctgaatgggagccagaattcactaggaggtcatcaaccgatggtcctcacaagcctcttctgaagatggaaggccttttgcccgttgaggtagaggggaaggaaatctcctcttttgtacccaatacttatgttgtattgttggtgcgaaagtaaaaacactacctcttttgagactttgcccagggtcctgtgcctggatgggggtgcaggcagccttgaccacggctgttcccctcacccaaaagaattatcatcccaacagccaagacccaacaggtgctgaactgtgcatcaaccaggaagagttctatccccaagctggccactatcacatatgcttactcttgcttaaaattaataaatcatgttttgatgagaaaaaactattcta

SEQ ID NO: 3535 - DNA, 2993 bp, Homo sapiens
  source 1..2993: mol_type = unassigned DNA
cgctggggcgctttccgaggaaattcgggactcgagtttcccggggaagaggcgcggcctgagcccggcgagggtggggagggcaggcgcaggtggaccccggcgccccccgagccccgctgtgaccttggccgcgggggaggggctgggccgctgcggggcagtcgcggccgccagagggggcagcggagaagaacttgcccaacttggcggcgcgggctggggcggctctgcgcctccgcgcccgcctccccggcctccgccttctcccctcccgcgagcctcctcccctcccgcgagcctcctcccctgggccctcctcccgtcctccccgccgccgccggtcccggtgcgcgcccatccctgcccgcagccccgcgcgccggccgagtcgctgagccgcggctgccggacgggacgggaccggctaggctgggcgcgccccccgggccccgccgtgggcatgggcgcactggcccgggcgctgctgctgcctctgctggcccagtggctcctgcgcgccgccccggagctggcccccgcgcccttcacgctgcccctccgggtggccgcggccacgaaccgcgtagttgcgcccaccccgggacccgggacccctgccgagcgccacgccgacggcttggcgctcgccctggagcctgccctggcgtcccccgcgggcgccgccaacttcttggccatggtagacaacctgcagggggactctggccgcggctactacctggagatgctgatcgggacccccccgcagaagctacagattctcgttgacactggaagcagtaactttgccgtggcaggaaccccgcactcctacatagacacgtactttgacacagagaggtctagcacataccgctccaagggctttgacgtcacagtgaagtacacacaaggaagctggacgggcttcgttggggaagacctcgtcaccatccccaaaggcttcaatacttcttttcttgtcaacattgccactatttttgaatcagagaatttctttttgcctgggattaaatggaatggaatacttggcctagcttatgccacacttgccaagccatcaagttctctggagaccttcttcgactccctggtgacacaagcaaacatccccaacgttttctccatgcagatgtgtggagccggcttgcccgttgctggatctgggaccaacggaggtagtcttgtcttgggtggaattgaaccaagtttgtataaaggagacatctggtatacccctattaaggaagagtggtactaccagatagaaattctgaaattggaaattggaggccaaagccttaatctggactgcagagagtataacgcagacaaggccatcgtggacagtggcaccacgctgctgcgcctgccccagaaggtgtttgatgcggtggtggaagctgtggcccgcgcatctctgattccagaattctctgatggtttctggactgggtcccagctggcgtgctggacgaattcggaaacaccttggtcttacttccctaaaatctccatctacctgagagacgagaactccagcaggtcattccgtatcacaatcctgcctcagctttacattcagcccatgatgggggccggcctgaattatgaatgttaccgattcggcatttccccatccacaaatgcgctggtgatcggtgccacggtgatggagggcttctacgtcatcttcgacagagcccagaagagggtgggcttcgcagcgagcccctgtgcagaaattgcaggtgctgcagtgtctgaaatttccgggcctttctcaacagaggatgtagccagcaactgtgtccccgctcagtctttgagcgagcccattttgtggattgtgtcctatgcgctcatgagcgtctgtggagccatcctccttgtcttaatcgtcctgctgctgctgccgttccggtgtcagcgtcgcccccgtgaccctgaggtcgtcaatgatgagtcctctctggtcagacatcgctggaaatgaatagccaggcctgacctcaagcaaccatgaactcagctattaagaaaatcacatttccagggcagcagccgggatcgatggtggcgctttctcctgtgcccacccgtcttcaatctctgttctgctcccagatgccttctagattcactgtcttttgattcttgattttcaagctttcaaatcctccctacttccaagaaaaataattaaaaaaaaaacttcattctaaaccaaaacagagtggattgggctgcaggctctatggggttcgttatgccaaagtgtctacatgtgccaccaacataaaacaaaaccaagccttggctcgttctcttctctcttcaatctctggaaaaataagtacatatagttgataacccctcttagcttacaggaagctttttgtattaattgcctttgaggttattttccgccagacctcaacctgggtcaaagtggtacaggaaggcttgcagtatgatggcaggagaatcagcctggggcctggggatgtaaccaagctgtacccttgagacctggaaccagagccacaggccccttttgtgggtttctctgtgctctgaatgggagccagaattcactaggaggtcatcaaccgatggtcctcacaagcctcttctgaagatggaaggccttttgcccgttgaggtagaggggaaggaaatctcctcttttgtacccaatacttatgttgtattgttggtgcgaaagtaaaaacactacctcttttgagactttgcccagggtcctgtgcctggatgggggtgcaggcagccttgaccacggctgttcccctcacccaaaagaattatcatcccaacagccaagacccaacaggtgctgaactgtgcatcaaccaggaagagttctatccccaagctggccactatcacatatgcttactcttgcttaaaattaataaatcatgttttgatgagaaaaaactattcta

SEQ ID NO: 3536 - DNA, 2843 bp, Homo sapiens
  source 1..2843: mol_type = unassigned DNA
cgctggggcgctttccgaggaaattcgggactcgagtttcccggggaagaggcgcggcctgagcccggcgagggtggggagggcaggcgcaggtggaccccggcgccccccgagccccgctgtgaccttggccgcgggggaggggctgggccgctgcggggcagtcgcggccgccagagggggcagcggagaagaacttgcccaacttggcggcgcgggctggggcggctctgcgcctccgcgcccgcctccccggcctccgccttctcccctcccgcgagcctcctcccctcccgcgagcctcctcccctgggccctcctcccgtcctccccgccgccgccggtcccggtgcgcgcccatccctgcccgcagccccgcgcgccggccgagtcgctgagccgcggctgccggacgggacgggaccggctaggctgggcgcgccccccgggccccgccgtgggcatgggcgcactggcccgggcgctgctgctgcctctgctggcccagtggctcctgcgcgccgccccggagctggcccccgcgcccttcacgctgcccctccgggtggccgcggccacgaaccgcgtagttgcgcccaccccgggacccgggacccctgccgagcgccacgccgacggcttggcgctcgccctggagcctgccctggcgtcccccgcgggcgccgccaacttcttggccatggtagacaacctgcagggggactctggccgcggctactacctggagatgctgatcgggacccccccgcagaagctacagattctcgttgacactggaagcagtaactttgccgtggcaggaaccccgcactcctacatagacacgtactttgacacagagaggtctagcacataccgctccaagggctttgacgtcacagtgaagtacacacaaggaagctggacgggcttcgttggggaagacctcgtcaccatccccaaaggcttcaatacttcttttcttgtcaacattgccactatttttgaatcagagaatttctttttgcctgggattaaatggaatggaatacttggcctagcttatgccacacttgccaagccatcaagttctctggagaccttcttcgactccctggtgacacaagcaaacatccccaacgttttctccatgcagatgtgtggagccggcttgcccgttgctggatctgggaccaacggaggtagtcttgtcttgggtggaattgaaccaagtttgtataaaggagacatctggtatacccctattaaggaagagtggtactaccagatagaaattctgaaattggaaattggaggccaaagccttaatctggactgcagagagtataacgcagacaaggccatcgtggacagtggcaccacgctgctgcgcctgccccagaaggtgtttgatgcggtggtggaagctgtggcccgcgcatctctgctttacattcagcccatgatgggggccggcctgaattatgaatgttaccgattcggcatttccccatccacaaatgcgctggtgatcggtgccacggtgatggagggcttctacgtcatcttcgacagagcccagaagagggtgggcttcgcagcgagcccctgtgcagaaattgcaggtgctgcagtgtctgaaatttccgggcctttctcaacagaggatgtagccagcaactgtgtccccgctcagtctttgagcgagcccattttgtggattgtgtcctatgcgctcatgagcgtctgtggagccatcctccttgtcttaatcgtcctgctgctgctgccgttccggtgtcagcgtcgcccccgtgaccctgaggtcgtcaatgatgagtcctctctggtcagacatcgctggaaatgaatagccaggcctgacctcaagcaaccatgaactcagctattaagaaaatcacatttccagggcagcagccgggatcgatggtggcgctttctcctgtgcccacccgtcttcaatctctgttctgctcccagatgccttctagattcactgtcttttgattcttgattttcaagctttcaaatcctccctacttccaagaaaaataattaaaaaaaaaacttcattctaaaccaaaacagagtggattgggctgcaggctctatggggttcgttatgccaaagtgtctacatgtgccaccaacataaaacaaaaccaagccttggctcgttctcttctctcttcaatctctggaaaaataagtacatatagttgataacccctcttagcttacaggaagctttttgtattaattgcctttgaggttattttccgccagacctcaacctgggtcaaagtggtacaggaaggcttgcagtatgatggcaggagaatcagcctggggcctggggatgtaaccaagctgtacccttgagacctggaaccagagccacaggccccttttgtgggtttctctgtgctctgaatgggagccagaattcactaggaggtcatcaaccgatggtcctcacaagcctcttctgaagatggaaggccttttgcccgttgaggtagaggggaaggaaatctcctcttttgtacccaatacttatgttgtattgttggtgcgaaagtaaaaacactacctcttttgagactttgcccagggtcctgtgcctggatgggggtgcaggcagccttgaccacggctgttcccctcacccaaaagaattatcatcccaacagccaagacccaacaggtgctgaactgtgcatcaaccaggaagagttctatccccaagctggccactatcacatatgcttactcttgcttaaaattaataaatcatgttttgatgagaaaaaactattcta

SEQ ID NO: 3537 - DNA, 1712 bp, Homo sapiens
  source 1..1712: mol_type = unassigned DNA
ctccccgccgccgccggtcccggtgcgcgcccatccctgcccgcagccccgcgcgccggccgagtcgctgagccgcggctgccggacgggacgggaccggctaggctgggcgcgccccccgggccccgccgtgggcatgggcgcactggcccgggcgctgctgctgcctctgctggcccagtggctcctgcgcgccgccccggagctggcccccgcgcccttcacgcggctactacctggagatgctgatcgggacccccccgcagaagctacagattctcgttgacactggaagcagtaactttgccgtggcaggaaccccgcactcctacatagacacgtactttgacacagagaggtctagcacataccgctccaagggctttgacgtcacagtgaagtacacacaaggaagctggacgggcttcgttggggaagacctcgtcaccatccccaaaggcttcaatacttcttttcttgtcaacattgccactatttttgaatcagagaatttctttttgcctgggattaaatggaatggaatacttggcctagcttatgccacacttgccaagccatcaagttctctggagaccttcttcgactccctggtgacacaagcaaacatccccaacgttttctccatgcagatgtgtggagccggcttgcccgttgctggatctgggaccaacggaggtagtcttgtcttgggtggaattgaaccaagtttgtataaaggagacatctggtatacccctattaaggaagagtggtactaccagatagaaattctgaaattggaaattggaggccaaagccttaatctggactgcagagagtataacgcagacaaggccatcgtggacagtggcaccacgctgctgcgcctgccccagaaggtgtttgatgcggtggtggaagctgtggcccgcgcatctctgattccagaattctctgatggtttctggactgggtcccagctggcgtgctggacgaattcggaaacaccttggtcttacttccctaaaatctccatctacctgagagacgagaactccagcaggtcattccgtatcacaatcctgcctcagctttacattcagcccatgatgggggccggcctgaattatgaatgttaccgattcggcatttccccatccacaaatgcgctggtgatcggtgccacggtgatggagggcttctacgtcatcttcgacagagcccagaagagggtgggcttcgcagcgagcccctgtgcagaaattgcaggtgctgcagtgtctgaaatttccgggcctttctcaacagaggatgtagccagcaactgtgtccccgctcagtctttgagcgagcccattttgtggattgtgtcctatgcgctcatgagcgtctgtggagccatcctccttgtcttaatcgtcctgctgctgctgccgttccggtgtcagcgtcgcccccgtgaccctgaggtcgtcaatgatgagtcctctctggtcagacatcgctggaaatgaatagccaggcctgacctcaagcaaccatgaactcagctattaagaaaatcacatttccagggcagcagccgggatcgatggtggcgctttctcctgtgcccacccgtcttcaatctctgttctgctcccagatgccttctagattcactgtcttttgattcttgattttcaagctttcaaatcctccctacttccaag

SEQ ID NO: 3538 - DNA, 655 bp, Homo sapiens
  source 1..655: mol_type = unassigned DNA
actgaaaagcggaggaagctctctggagaaacgccgtgaggccgctggcggggccttcctggtgtcagggttaccgtgctctatgcccaggtctctgtggctgggctgctccagcctggcggacagcatgccttcgctgcgatgcctgtataacccagggactggcgcactcacagctttccagaattcctcagagagagaagactgtaataatggcgaaccccctaggaagataataccagagaagaattcacttagacagacatacaacagctgtgccagactctgcttaaaccaagaaacagtatgtttagcaagcactgctatgaagactgagaattgtgtggccaaaacaaaacttgccaatggcacttccagtatgattgtgcccaagcaacggaaactctcagcaagctatgaaaaggaaaaggaactgtgtgtcaaatactttgagcagtggtcagagtcagatcaagtggaatttgtggaacatcttatatcccaaatgtgtcattaccaacatgggcacataaactcgtatcttaaacctatgttgcagagagatttcataactgctctgccagctcggggattggatcatattgctgagaacattctgtcatacctggatgccaaatcactatgtgctgctgaa

SEQ ID NO: 3539 - DNA, 6134 bp, Homo sapiens
  source 1..6134: mol_type = unassigned DNA
agaggtaagagagggcggggggaaggaagaggaggcgggatccgggcgctgcgttggctgcggcctggcaccaaaggggcggccccggcggagagcggacccagtggcctcggcgattatggacccggccgaggcggtgctgcaagagaaggcactcaagtttatgtgctctatgcccaggtctctgtggctgggctgctccagcctggcggacagcatgccttcgctgcgatgcctgtataacccagggactggcgcactcacagctttccagaattcctcagagagagaagactgtaataatggcgaaccccctaggaagataataccagagaagaattcacttagacagacatacaacagctgtgccagactctgcttaaaccaagaaacagtatgtttagcaagcactgctatgaagactgagaattgtgtggccaaaacaaaacttgccaatggcacttccagtatgattgtgcccaagcaacggaaactctcagcaagctatgaaaaggaaaaggaactgtgtgtcaaatactttgagcagtggtcagagtcagatcaagtggaatttgtggaacatcttatatcccaaatgtgtcattaccaacatgggcacataaactcgtatcttaaacctatgttgcagagagatttcataactgctctgccagctcggggattggatcatattgctgagaacattctgtcatacctggatgccaaatcactatgtgctgctgaacttgtgtgcaaggaatggtaccgagtgacctctgatggcatgctgtggaagaagcttatcgagagaatggtcaggacagattctctgtggagaggcctggcagaacgaagaggatggggacagtatttattcaaaaacaaacctcctgacgggaatgctcctcccaactctttttatagagcactttatcctaaaattatacaagacattgagacaatagaatctaattggagatgtggaagacatagtttacagagaattcactgccgaagtgaaacaagcaaaggagtttactgtttacagtatgatgatcagaaaatagtaagcggccttcgagacaacacaatcaagatctgggataaaaacacattggaatgcaagcgaattctcacaggccatacaggttcagtcctctgtctccagtatgatgagagagtgatcataacaggatcatcggattccacggtcagagtgtgggatgtaaatacaggtgaaatgctaaacacgttgattcaccattgtgaagcagttctgcacttgcgtttcaataatggcatgatggtgacctgctccaaagatcgttccattgctgtatgggatatggcctccccaactgacattaccctccggagggtgctggtcggacaccgagctgctgtcaatgttgtagactttgatgacaagtacattgtttctgcatctggggatagaactataaaggtatggaacacaagtacttgtgaatttgtaaggaccttaaatggacacaaacgaggcattgcctgtttgcagtacagggacaggctggtagtgagtggctcatctgacaacactatcagattatgggacatagaatgtggtgcatgtttacgagtgttagaaggccatgaggaattggtgcgttgtattcgatttgataacaagaggatagtcagtggggcctatgatggaaaaattaaagtgtgggatcttgtggctgctttggacccccgtgctcctgcagggacactctgtctacggacccttgtggagcattccggaagagtttttcgactacagtttgatgaattccagattgtcagtagttcacatgatgacacaatcctcatctgggacttcctaaatgatccagctgcccaagctgaacccccccgttccccttctcgaacatacacctacatctccagataaataaccatacactgacctcatacttgcccaggacccattaaagttgcggtatttaacgtatctgccaataccaggatgagcaacaacagtaacaatcaaactactgcccagtttccctggactagccgaggagcagggctttgagactcctgttgggacacagttggtctgcagtcggcccaggacggtctactcagcacaactgactgcttcagtgctgctatcagaagatgtcttctatcttttgtgaatgattggaacttttaaacctcccctcctctcctcctttcacctctgcacctagttttttcccattggttccagacaaaggtgacttataaatatatttagtgttttgccagaatctctcttgctttgccattaagcagaagaactagtttccctgtatagcctgctgggagagacccacttctagggtatgggggatgcagcttcaagcccagtgcccagtgtctccctgttaactgcaggaatgccaagcacctggccagagcagcccagccccaatatgcttaggaggagacagagttccctctgtatagcctctgggacaagaaaaagaaaacacaagaatgtatacactggaagatttgggcctcctgcctgccttctctttgtttctgttcctcttcccatctactcccctacgccccttcaaccttttttctctgtctgcttcacctgagaagaaagtgtacgaagagagtgtcctcctctcacatgagccagatcagccagaaaatgcaacacttggaagagttaaatgctgttcagtgaagatttcagccccaggcctttgctgcaagtgaccctgtggcaacagtggattctcagacatgatactctcatcatatttgcaactcttctctctctttcttccccacacccaagaggaggattggtggtagggggcaggcagagggggtggggagaagtttcctgggctccatcaatggctgcatcttttctggactcagcagtctccttgattccatgtagagtgtggaaaggagttgctgattgcatttcctctcattaacaattgggtgtgtaataaaaagcattgtacttcatcttaaatcactggtaaggctcagcctacagaaagatttgaaatggccagagccaatcgcttggtgcattctgcgtaatggtttccatctccgatttcctcatcagggcctgtgaatacccaggtgcctgtatctttgccaagaccgtgatcaaggtagcttaagagagatggtcaggagaaaacactgtttttgttttttttgttgttttgttttgttttggccagttaaatatcatctctcaaatattgatctcaccgtgtcaaccttgcactgcacaaccttccttctgcttctcccacacccagtatttgcagaagggcaaagctgcttaagagagaggatcagggtgaagtttggcacacagggtttattaatggggcaaaaactgccttttcttcctcctcctgaccttattttgctcttcactctccccagccaataaagcgtctgtggcgattggtgaacagcataaacagctggacctcagcaagggtcaggcaaacccagtcactcggaaggcagctgtgtgagctgccaagctagtgggcttcaggtgcaagggtacctgtgccacaccaacctgggagcacacagaatactattaatgtgcacccagctggtctccccaggcaagaaggtatcctcttcccaaggtgtacccactgaatgttgttactacatattgagagtcattttatgcatatgcattctacctttcctgctttatgagtatttttaagcttttagttcaaggttatattcagaaaatatttcccagtataatgatacatcgtagcctaagaaatattttctcaatgtaattcccttcccagctacccaaatgctacagagaaatgttttctacttggccactatcagggttcgtcatctattgtgttgactattaatggctttttgattgggtaaggattttgctatagatgaaggtagagggctgtcagccctgaaaaacacacaggtcagacatttaaaaggcatgggtttcgagctgtctcaaaatattgcccaatagccataattttaccagcctttctgtcatatgctgctattacaaagtggaagctgttgaatgtttattggtgcccagggttttgctctccaatctaggttcagttgaaggaatattgtttctaagactgttttgagacatgtccagtacatcacaaaggagatcggggcgacccctgcagatgtggagccattagcccagttgaggatattctccaagttgtcctctctcctgctgatggaaatgggaatgaagttaagtggtctgaaaaacttgaatcgttcacatttctcagctctgggggtcatttaccagtttgttgtagaagaaataatcaggtaagttaaaagttcatttccagagaaggtaaaccccacttaccatctctgcatgatttcagtgggaattgattatcactaatccccaactgggctagaataaatgtaaagtttgacctttttaaaacgaaaagagagacaaagtctcagcacattccaaggagtggtagaaacagagctgaaggtgtccccattgtagattagtctcttctcactaaaatttactttccaacgtagggcctaaaggaaacctttcttaaagacaggctgaaaccccttcaaaggcagatgaggaggtacagacacgtgaccttttggtgcacactggagctacttggacaagaccagcatgccttgctgcacgtgtgtgtatttcactgctgagaacatcctttaacttggtgtgcaatttgaaaggatgtgaatcatggatggaaggccatttgtacatgtcccttggcaaaattctttctggtgtctcctaacttcagagacagggactctttttggatctctattgacaagtaataaaagtctggccctcataacttgtttccgaactagaaaagtctgtgagacccctacatcattctggtttttttgcttgagtaagaacaatccttttttatttttcttctgtacagtctaaagctacagagaaaaaaaaatgcactcttcccttgccggctcctggtaccattggtctgaacagctgtagttggtctactccttacttagcacttgattgtgtggggaaacaaaggtgggaggggtggggaatactggaaataatcagggcaatttttttctttcccataattggactagataccttggtactgttgaccttctcagcatctcccttttgccttagatggcaacaccctccagtctgtagcagagcagtccaacccagattagtgcagcccggaggcttagggtgcagcctccctggtcttcctccacacagttgttcaccaacagaccagacctcctttaaccacagtgtcaacatagtatcggaaagagagccatttcttaggggaataaaacagtttcgcttctttagctcatctgtggtgtcagaatccttggagctgaagagagaaatcaaaagagcatgatgatggctgcctggtttcaggtggaacttaatgcattgatctttagaagctccttctgttggaagttgagtacctgtgatctaaaatgtcctggaggcagatgacatctaaaatatgtgctttccaaccagcacagctggcgctcttagctcctgattggttgtgtgttttattaaggatcagtgcagttaagtcgtattttaaagtgttacctcccctcctaacccttccccttcttggacactgaaggaaaaggccaactagggtgttagccctctgggcaccaaggaaactaacagctttctcaaagcggtgaccactcaggccagcccagacaaatctgagggatggccagtgcactccaatgatgggacaggcctaacaacacatgtaagcttccccgagagctttcagctggttcacctctttgttctctagactcttaagtactgactgctttgacttttgtgattatgttatggtgatgtgtagtcagtgtaccaatatgttcacaacctaggatcatgataatggagtgtgttttgggttttttttaactgttcagaaaaaaagtaaattacaaatataagattaaagtgaattttctaa

SEQ ID NO: 3540 - DNA, 5993 bp, Homo sapiens
  source 1..5993: mol_type = unassigned DNA
atccgggcgctgcgttggctgcggcctggcaccaaaggggcggccccggcggagagcggacccagtggcctcggcgattatggacccggccgaggcggtgctgcaagagaaggcactcaagtttatgtgctctatgcccaggtctctgtggctgggctgctccagcctggcggacagcatgccttcgctgcgatgcctgtataacccagggactggcgcactcacagctttccagacatacaacagctgtgccagactctgcttaaaccaagaaacagtatgtttagcaagcactgctatgaagactgagaattgtgtggccaaaacaaaacttgccaatggcacttccagtatgattgtgcccaagcaacggaaactctcagcaagctatgaaaaggaaaaggaactgtgtgtcaaatactttgagcagtggtcagagtcagatcaagtggaatttgtggaacatcttatatcccaaatgtgtcattaccaacatgggcacataaactcgtatcttaaacctatgttgcagagagatttcataactgctctgccagctcggggattggatcatattgctgagaacattctgtcatacctggatgccaaatcactatgtgctgctgaacttgtgtgcaaggaatggtaccgagtgacctctgatggcatgctgtggaagaagcttatcgagagaatggtcaggacagattctctgtggagaggcctggcagaacgaagaggatggggacagtatttattcaaaaacaaacctcctgacgggaatgctcctcccaactctttttatagagcactttatcctaaaattatacaagacattgagacaatagaatctaattggagatgtggaagacatagtttacagagaattcactgccgaagtgaaacaagcaaaggagtttactgtttacagtatgatgatcagaaaatagtaagcggccttcgagacaacacaatcaagatctgggataaaaacacattggaatgcaagcgaattctcacaggccatacaggttcagtcctctgtctccagtatgatgagagagtgatcataacaggatcatcggattccacggtcagagtgtgggatgtaaatacaggtgaaatgctaaacacgttgattcaccattgtgaagcagttctgcacttgcgtttcaataatggcatgatggtgacctgctccaaagatcgttccattgctgtatgggatatggcctccccaactgacattaccctccggagggtgctggtcggacaccgagctgctgtcaatgttgtagactttgatgacaagtacattgtttctgcatctggggatagaactataaaggtatggaacacaagtacttgtgaatttgtaaggaccttaaatggacacaaacgaggcattgcctgtttgcagtacagggacaggctggtagtgagtggctcatctgacaacactatcagattatgggacatagaatgtggtgcatgtttacgagtgttagaaggccatgaggaattggtgcgttgtattcgatttgataacaagaggatagtcagtggggcctatgatggaaaaattaaagtgtgggatcttgtggctgctttggacccccgtgctcctgcagggacactctgtctacggacccttgtggagcattccggaagagtttttcgactacagtttgatgaattccagattgtcagtagttcacatgatgacacaatcctcatctgggacttcctaaatgatccagctgcccaagctgaacccccccgttccccttctcgaacatacacctacatctccagataaataaccatacactgacctcatacttgcccaggacccattaaagttgcggtatttaacgtatctgccaataccaggatgagcaacaacagtaacaatcaaactactgcccagtttccctggactagccgaggagcagggctttgagactcctgttgggacacagttggtctgcagtcggcccaggacggtctactcagcacaactgactgcttcagtgctgctatcagaagatgtcttctatcttttgtgaatgattggaacttttaaacctcccctcctctcctcctttcacctctgcacctagttttttcccattggttccagacaaaggtgacttataaatatatttagtgttttgccagaatctctcttgctttgccattaagcagaagaactagtttccctgtatagcctgctgggagagacccacttctagggtatgggggatgcagcttcaagcccagtgcccagtgtctccctgttaactgcaggaatgccaagcacctggccagagcagcccagccccaatatgcttaggaggagacagagttccctctgtatagcctctgggacaagaaaaagaaaacacaagaatgtatacactggaagatttgggcctcctgcctgccttctctttgtttctgttcctcttcccatctactcccctacgccccttcaaccttttttctctgtctgcttcacctgagaagaaagtgtacgaagagagtgtcctcctctcacatgagccagatcagccagaaaatgcaacacttggaagagttaaatgctgttcagtgaagatttcagccccaggcctttgctgcaagtgaccctgtggcaacagtggattctcagacatgatactctcatcatatttgcaactcttctctctctttcttccccacacccaagaggaggattggtggtagggggcaggcagagggggtggggagaagtttcctgggctccatcaatggctgcatcttttctggactcagcagtctccttgattccatgtagagtgtggaaaggagttgctgattgcatttcctctcattaacaattgggtgtgtaataaaaagcattgtacttcatcttaaatcactggtaaggctcagcctacagaaagatttgaaatggccagagccaatcgcttggtgcattctgcgtaatggtttccatctccgatttcctcatcagggcctgtgaatacccaggtgcctgtatctttgccaagaccgtgatcaaggtagcttaagagagatggtcaggagaaaacactgtttttgttttttttgttgttttgttttgttttggccagttaaatatcatctctcaaatattgatctcaccgtgtcaaccttgcactgcacaaccttccttctgcttctcccacacccagtatttgcagaagggcaaagctgcttaagagagaggatcagggtgaagtttggcacacagggtttattaatggggcaaaaactgccttttcttcctcctcctgaccttattttgctcttcactctccccagccaataaagcgtctgtggcgattggtgaacagcataaacagctggacctcagcaagggtcaggcaaacccagtcactcggaaggcagctgtgtgagctgccaagctagtgggcttcaggtgcaagggtacctgtgccacaccaacctgggagcacacagaatactattaatgtgcacccagctggtctccccaggcaagaaggtatcctcttcccaaggtgtacccactgaatgttgttactacatattgagagtcattttatgcatatgcattctacctttcctgctttatgagtatttttaagcttttagttcaaggttatattcagaaaatatttcccagtataatgatacatcgtagcctaagaaatattttctcaatgtaattcccttcccagctacccaaatgctacagagaaatgttttctacttggccactatcagggttcgtcatctattgtgttgactattaatggctttttgattgggtaaggattttgctatagatgaaggtagagggctgtcagccctgaaaaacacacaggtcagacatttaaaaggcatgggtttcgagctgtctcaaaatattgcccaatagccataattttaccagcctttctgtcatatgctgctattacaaagtggaagctgttgaatgtttattggtgcccagggttttgctctccaatctaggttcagttgaaggaatattgtttctaagactgttttgagacatgtccagtacatcacaaaggagatcggggcgacccctgcagatgtggagccattagcccagttgaggatattctccaagttgtcctctctcctgctgatggaaatgggaatgaagttaagtggtctgaaaaacttgaatcgttcacatttctcagctctgggggtcatttaccagtttgttgtagaagaaataatcaggtaagttaaaagttcatttccagagaaggtaaaccccacttaccatctctgcatgatttcagtgggaattgattatcactaatccccaactgggctagaataaatgtaaagtttgacctttttaaaacgaaaagagagacaaagtctcagcacattccaaggagtggtagaaacagagctgaaggtgtccccattgtagattagtctcttctcactaaaatttactttccaacgtagggcctaaaggaaacctttcttaaagacaggctgaaaccccttcaaaggcagatgaggaggtacagacacgtgaccttttggtgcacactggagctacttggacaagaccagcatgccttgctgcacgtgtgtgtatttcactgctgagaacatcctttaacttggtgtgcaatttgaaaggatgtgaatcatggatggaaggccatttgtacatgtcccttggcaaaattctttctggtgtctcctaacttcagagacagggactctttttggatctctattgacaagtaataaaagtctggccctcataacttgtttccgaactagaaaagtctgtgagacccctacatcattctggtttttttgcttgagtaagaacaatccttttttatttttcttctgtacagtctaaagctacagagaaaaaaaaatgcactcttcccttgccggctcctggtaccattggtctgaacagctgtagttggtctactccttacttagcacttgattgtgtggggaaacaaaggtgggaggggtggggaatactggaaataatcagggcaatttttttctttcccataattggactagataccttggtactgttgaccttctcagcatctcccttttgccttagatggcaacaccctccagtctgtagcagagcagtccaacccagattagtgcagcccggaggcttagggtgcagcctccctggtcttcctccacacagttgttcaccaacagaccagacctcctttaaccacagtgtcaacatagtatcggaaagagagccatttcttaggggaataaaacagtttcgcttctttagctcatctgtggtgtcagaatccttggagctgaagagagaaatcaaaagagcatgatgatggctgcctggtttcaggtggaacttaatgcattgatctttagaagctccttctgttggaagttgagtacctgtgatctaaaatgtcctggaggcagatgacatctaaaatatgtgctttccaaccagcacagctggcgctcttagctcctgattggttgtgtgttttattaaggatcagtgcagttaagtcgtattttaaagtgttacctcccctcctaacccttccccttcttggacactgaaggaaaaggccaactagggtgttagccctctgggcaccaaggaaactaacagctttctcaaagcggtgaccactcaggccagcccagacaaatctgagggatggccagtgcactccaatgatgggacaggcctaacaacacatgtaagcttccccgagagctttcagctggttcacctctttgttctctagactcttaagtactgactgctttgacttttgtgattatgttatggtgatgtgtagtcagtgtaccaatatgttcacaacctaggatcatgataatggagtgtgttttgggttttttttaactgttcagaaaaaaagtaaattacaaat

SEQ ID NO: 3541 - DNA, 5982 bp, Homo sapiens
  source 1..5982: mol_type = unassigned DNA
ggcgctgcgttggctgcggcctggcaccaaaggggcggccccggcggagagcggacccagtggcctcggcgattatggacccggccgaggcggtgctgcaagagaaggcactcaagtttatgaattcctcagagagagaagactgtaataatggcgaaccccctaggaagataataccagagaagaattcacttagacagacatacaacagctgtgccagactctgcttaaaccaagaaacagtatgtttagcaagcactgctatgaagactgagaattgtgtggccaaaacaaaacttgccaatggcacttccagtatgattgtgcccaagcaacggaaactctcagcaagctatgaaaaggaaaaggaactgtgtgtcaaatactttgagcagtggtcagagtcagatcaagtggaatttgtggaacatcttatatcccaaatgtgtcattaccaacatgggcacataaactcgtatcttaaacctatgttgcagagagatttcataactgctctgccagctcggggattggatcatattgctgagaacattctgtcatacctggatgccaaatcactatgtgctgctgaacttgtgtgcaaggaatggtaccgagtgacctctgatggcatgctgtggaagaagcttatcgagagaatggtcaggacagattctctgtggagaggcctggcagaacgaagaggatggggacagtatttattcaaaaacaaacctcctgacgggaatgctcctcccaactctttttatagagcactttatcctaaaattatacaagacattgagacaatagaatctaattggagatgtggaagacatagtttacagagaattcactgccgaagtgaaacaagcaaaggagtttactgtttacagtatgatgatcagaaaatagtaagcggccttcgagacaacacaatcaagatctgggataaaaacacattggaatgcaagcgaattctcacaggccatacaggttcagtcctctgtctccagtatgatgagagagtgatcataacaggatcatcggattccacggtcagagtgtgggatgtaaatacaggtgaaatgctaaacacgttgattcaccattgtgaagcagttctgcacttgcgtttcaataatggcatgatggtgacctgctccaaagatcgttccattgctgtatgggatatggcctccccaactgacattaccctccggagggtgctggtcggacaccgagctgctgtcaatgttgtagactttgatgacaagtacattgtttctgcatctggggatagaactataaaggtatggaacacaagtacttgtgaatttgtaaggaccttaaatggacacaaacgaggcattgcctgtttgcagtacagggacaggctggtagtgagtggctcatctgacaacactatcagattatgggacatagaatgtggtgcatgtttacgagtgttagaaggccatgaggaattggtgcgttgtattcgatttgataacaagaggatagtcagtggggcctatgatggaaaaattaaagtgtgggatcttgtggctgctttggacccccgtgctcctgcagggacactctgtctacggacccttgtggagcattccggaagagtttttcgactacagtttgatgaattccagattgtcagtagttcacatgatgacacaatcctcatctgggacttcctaaatgatccagctgcccaagctgaacccccccgttccccttctcgaacatacacctacatctccagataaataaccatacactgacctcatacttgcccaggacccattaaagttgcggtatttaacgtatctgccaataccaggatgagcaacaacagtaacaatcaaactactgcccagtttccctggactagccgaggagcagggctttgagactcctgttgggacacagttggtctgcagtcggcccaggacggtctactcagcacaactgactgcttcagtgctgctatcagaagatgtcttctatcttttgtgaatgattggaacttttaaacctcccctcctctcctcctttcacctctgcacctagttttttcccattggttccagacaaaggtgacttataaatatatttagtgttttgccagaatctctcttgctttgccattaagcagaagaactagtttccctgtatagcctgctgggagagacccacttctagggtatgggggatgcagcttcaagcccagtgcccagtgtctccctgttaactgcaggaatgccaagcacctggccagagcagcccagccccaatatgcttaggaggagacagagttccctctgtatagcctctgggacaagaaaaagaaaacacaagaatgtatacactggaagatttgggcctcctgcctgccttctctttgtttctgttcctcttcccatctactcccctacgccccttcaaccttttttctctgtctgcttcacctgagaagaaagtgtacgaagagagtgtcctcctctcacatgagccagatcagccagaaaatgcaacacttggaagagttaaatgctgttcagtgaagatttcagccccaggcctttgctgcaagtgaccctgtggcaacagtggattctcagacatgatactctcatcatatttgcaactcttctctctctttcttccccacacccaagaggaggattggtggtagggggcaggcagagggggtggggagaagtttcctgggctccatcaatggctgcatcttttctggactcagcagtctccttgattccatgtagagtgtggaaaggagttgctgattgcatttcctctcattaacaattgggtgtgtaataaaaagcattgtacttcatcttaaatcactggtaaggctcagcctacagaaagatttgaaatggccagagccaatcgcttggtgcattctgcgtaatggtttccatctccgatttcctcatcagggcctgtgaatacccaggtgcctgtatctttgccaagaccgtgatcaaggtagcttaagagagatggtcaggagaaaacactgtttttgttttttttgttgttttgttttgttttggccagttaaatatcatctctcaaatattgatctcaccgtgtcaaccttgcactgcacaaccttccttctgcttctcccacacccagtatttgcagaagggcaaagctgcttaagagagaggatcagggtgaagtttggcacacagggtttattaatggggcaaaaactgccttttcttcctcctcctgaccttattttgctcttcactctccccagccaataaagcgtctgtggcgattggtgaacagcataaacagctggacctcagcaagggtcaggcaaacccagtcactcggaaggcagctgtgtgagctgccaagctagtgggcttcaggtgcaagggtacctgtgccacaccaacctgggagcacacagaatactattaatgtgcacccagctggtctccccaggcaagaaggtatcctcttcccaaggtgtacccactgaatgttgttactacatattgagagtcattttatgcatatgcattctacctttcctgctttatgagtatttttaagcttttagttcaaggttatattcagaaaatatttcccagtataatgatacatcgtagcctaagaaatattttctcaatgtaattcccttcccagctacccaaatgctacagagaaatgttttctacttggccactatcagggttcgtcatctattgtgttgactattaatggctttttgattgggtaaggattttgctatagatgaaggtagagggctgtcagccctgaaaaacacacaggtcagacatttaaaaggcatgggtttcgagctgtctcaaaatattgcccaatagccataattttaccagcctttctgtcatatgctgctattacaaagtggaagctgttgaatgtttattggtgcccagggttttgctctccaatctaggttcagttgaaggaatattgtttctaagactgttttgagacatgtccagtacatcacaaaggagatcggggcgacccctgcagatgtggagccattagcccagttgaggatattctccaagttgtcctctctcctgctgatggaaatgggaatgaagttaagtggtctgaaaaacttgaatcgttcacatttctcagctctgggggtcatttaccagtttgttgtagaagaaataatcaggtaagttaaaagttcatttccagagaaggtaaaccccacttaccatctctgcatgatttcagtgggaattgattatcactaatccccaactgggctagaataaatgtaaagtttgacctttttaaaacgaaaagagagacaaagtctcagcacattccaaggagtggtagaaacagagctgaaggtgtccccattgtagattagtctcttctcactaaaatttactttccaacgtagggcctaaaggaaacctttcttaaagacaggctgaaaccccttcaaaggcagatgaggaggtacagacacgtgaccttttggtgcacactggagctacttggacaagaccagcatgccttgctgcacgtgtgtgtatttcactgctgagaacatcctttaacttggtgtgcaatttgaaaggatgtgaatcatggatggaaggccatttgtacatgtcccttggcaaaattctttctggtgtctcctaacttcagagacagggactctttttggatctctattgacaagtaataaaagtctggccctcataacttgtttccgaactagaaaagtctgtgagacccctacatcattctggtttttttgcttgagtaagaacaatccttttttatttttcttctgtacagtctaaagctacagagaaaaaaaaatgcactcttcccttgccggctcctggtaccattggtctgaacagctgtagttggtctactccttacttagcacttgattgtgtggggaaacaaaggtgggaggggtggggaatactggaaataatcagggcaatttttttctttcccataattggactagataccttggtactgttgaccttctcagcatctcccttttgccttagatggcaacaccctccagtctgtagcagagcagtccaacccagattagtgcagcccggaggcttagggtgcagcctccctggtcttcctccacacagttgttcaccaacagaccagacctcctttaaccacagtgtcaacatagtatcggaaagagagccatttcttaggggaataaaacagtttcgcttctttagctcatctgtggtgtcagaatccttggagctgaagagagaaatcaaaagagcatgatgatggctgcctggtttcaggtggaacttaatgcattgatctttagaagctccttctgttggaagttgagtacctgtgatctaaaatgtcctggaggcagatgacatctaaaatatgtgctttccaaccagcacagctggcgctcttagctcctgattggttgtgtgttttattaaggatcagtgcagttaagtcgtattttaaagtgttacctcccctcctaacccttccccttcttggacactgaaggaaaaggccaactagggtgttagccctctgggcaccaaggaaactaacagctttctcaaagcggtgaccactcaggccagcccagacaaatctgagggatggccagtgcactccaatgatgggacaggcctaacaacacatgtaagcttccccgagagctttcagctggttcacctctttgttctctagactcttaagtactgactgctttgacttttgtgattatgttatggtgatgtgtagtcagtgtaccaatatgttcacaacctaggatcatgataatggagtgtgttttgggttttttttaactgttcagaaaaaaagtaaattacaaatataagattaaagtgaattttctaa

SEQ ID NO: 3542 - DNA, 140 bp, Homo sapiens
  source 1..140: mol_type = unassigned DNA
cagtggcctcggcgattatggacccggccgaggcggtgctgcaagagaaggcactcaagtttatgacatacaacagctgtgccagactctgcttaaaccaagaaacagtatgtttagcaagcactgctatgaagactgag

SEQ ID NO: 3543 - DNA, 862 bp, Homo sapiens
  source 1..862: mol_type = unassigned DNA
atgatgttgtgtttggagaaaagagagaagagaattgaataagtacatgaccccttggaagctgttttcagttgaggattttggtgagtagccacttgaaatcaagggaaattccatgaatagcaggagctgggaagaaaggaagaggaggaaggatcccaccacttttttcttcccatctaacaccgtgcttatgcaaagcatagtccatatgagatctgccttataaaaacttgctgaataaagcgaatggaagttaaattttggactttcttccataatagcttcaaattatggtgactttgttgcctatagagggccaggaaatacatttctttgagatcctagaatctgagtgtgtgctctacacaggatggatagagcgagcctctggcagttccatttatccagaggcaaaagcacgcctgccactggaggcgctcttgggttccaacaaagaacctatgttgcctaaggaaacagtgctttctcttaaaaggtacaatcttggctcctctgccatgaagcggaatgttcctggacatgtgcttcagagaccttcctatttaaccaggatacaagttacattgttatgcaattcctctgctgaggccctgtaaaaggagtgagttaggacagatgcagcaagatattaggacagatttcgcccattattcaggctgcacaacacagaaggaaacttgatttcaataagacccaattcttaacagtcttttctacccacttttacccataacttttccaaatttggttcaaattgtgcagagaaacaataaaatttttaaaaaggataaactggctagttaaaagtaaatggcatttaattaaaacaaatcttgca

SEQ ID NO: 3544 - DNA, 1763 bp, Homo sapiens
  source 1..1763: mol_type = unassigned DNA
gatccacaattcattgcgcagttgatggaacagcttgatgtcttcatcagtattaaaccaaagcccaaacagccaagcaagtctgtgattgtgaaaagtgttgagcgaaatgccttaaatatgtatgaagcaaggaaatgtctcctcggacttgaaagcagtggggttaccatagcaaccagtccatccccagcatcctgccctgccggcctggcatgtcccagcctggatatcttagcttcagcaggccttggactcactggactaggtcttttgggacccaccaccttatctctgaacacttcaacaaccccaaactcactcttgaatgctcttaatagctcagtcagtcctttgcaaagtccaagttctggtacacccagccccacattatgggcacccccacttgctaatacttcaagtgccacaggtttttctgctataccacaccttatgattccatctactgcccaagccacattaactaatattttgttgtctggagtgcccacctatgggcacacagctccatctccccctcctggcttgactcctgttgatgtccatatcaacagtatgcagaccgaaggcaaaaaaatctctgctgctttaaatggacatgcacagtctccagatataaaatatggtgcaatatccacttcatcacttggagaaaaagtgctgagtgcaaatcacggggatccgtccatccagacaagtgggtctgagcagacatctcccaaatcaagccccactgaaggttgtaatgatgcttttgttgaagtaggcatgcctcgaagtccttcccattctgggaatgctggtgacttgaaacagatgatgtgtccctccaaggtttcctgtgccaaaaggcagacagtggaactattgcaaggcacgaaaaactcacacttacacagcactgacaggttgctctcagaccctgaactgagtgctaccgaaagccctttggctgacaagaaggctccagggagtgagcgcgctgcagagagggcagcagctgcccagcaaaactccgaaagggcccaccttgctccacggtcatcatatgtcaacatgcaggcatttgactatgaacagaagaagctattagccaccaaagctatgttaaagaaaccagtggtgacggaggtcagaacgcccacaaatacctggagtggcctgggtttttctaaatccatgccagctgaaactatcaaggagttgagaagggccaatcatgtgtcctataagcccacaatgacaaccacttatgagggctcatccatgtccctttcacggtccaacagtcgtgagcacttgggaggtggaagcgaatctgataactggagagaccgaaatggaattggacctggaagtcatagtgaatttgcagcttctattggcagccctaagcgtaaacaaaacaaatcaagtgagcgttgtgttttatgcacacttttaggtatccccagattagaatgtgtttatttgggttggagtatcactgactgtggcctctctgacttcaagtgcttggtgtaattcacatgccatctcctctgtgaagcctccttgtttctcccagtgaagcaggccacctggttctctttcctctcactccattttgtgcgtgctttcactctagcacttgccataccaaagggcaattatttatctacctatctgtatctccttgtgaaatttgtgctccacaaaccaaagactgtatttgttcattttataaacatttatgaagtgtc

SEQ ID NO: 3545 - DNA, 5473 bp, Homo sapiens
  source 1..5473: mol_type = unassigned DNA
caccatggccgcccagggagagcccggctacctggcggcgcagtcggaccccggctccaacagcgagcgcagcaccgactccccagtgcccggctccgaggacgacttggtcgccggggcgaccctgcacagcccggagtggagcgaggagcgcttccgcgtggacaggaagaaacttgaggccatgttacaagctgctgctgaagggaaaggcagaagtggggaagacttttttcaaaagatcatggaggaaacaaatacgcagattgcttggccatcaaaactgaagatcggagccaaatccaagaaagatccccatattaaggtttctggaaagaaagaagatgttaaagaagccaaggaaatgatcatgtctgtcttagacacaaaaagcaatcgagtcacactgaagatggatgtttcacatacagaacattcacatgtaatcggcaaaggtggcaacaatattaaaaaagtgatggaagaaaccggatgccatatccactttccagattccaacaggaataaccaagcagaaaaaagcaaccaggtatctatagcgggacaaccagcaggagtagaatctgcccgagttagaattcgggagctgcttcctttggtgctgatgtttgagctaccaattgctggaattcttcaaccggttcctgatcctaattccccctctattcagcatatatcacaaacgtacaatatttcagtatcatttaaacagcgttcccgaatgtatggtgctactgtcatagtacgagggtctcagaataacactagtgctgtgaaggaaggaactgccatgctgttagaacatcttgctgggagcttagcatcagctattcctgtgagcacacaactagatattgcagctcaacatcatctctttatgatgggtcgaaatgggagcaacatcaaacatatcatgcagagaacaggtgctcagatccactttcctgatcccagtaatccacaaaagaaatctaccgtctacctccagggcaccattgagtctgtctgtcttgcaaggcaatatctcatgggttgtcttcctcttgtgttgatgtttgatatgaaggaagaaattgaagtagatccacaattcattgcgcagttgatggaacagcttgatgtcttcatcagtattaaaccaaagcccaaacagccaagcaagtctgtgattgtgaaaagtgttgagcgaaatgccttaaatatgtatgaagcaaggaaatgtctcctcggacttgaaagcagtggggttaccatagcaaccagtccatccccagcatcctgccctgccggcctggcatgtcccagcctggatatcttagcttcagcaggccttggactcactggactaggtcttttgggacccaccaccttatctctgaacacttcaacaaccccaaactcactcttgaatgctcttaatagctcagtcagtcctttgcaaagtccaagttctggtacacccagccccacattatgggcacccccacttgctaatacttcaagtgccacaggtttttctgctataccacaccttatgattccatctactgcccaagccacattaactaatattttgttgtctggagtgcccacctatgggcacacagctccatctccccctcctggcttgactcctgttgatgtccatatcaacagtatgcagaccgaaggcaaaaaaatctctgctgctttaaatggacatgcacagtctccagatataaaatatggtgcaatatccacttcatcacttggagaaaaagtgctgagtgcaaatcacggggatccgtccatccagacaagtgggtctgagcagacatctcccaaatcaagccccactgaaggttgtaatgatgcttttgttgaagtaggcatgcctcgaagtccttcccattctgggaatgctggtgacttgaaacagatgatgtgtccctccaaggtttcctgtgccaaaaggcagacagtggaactattgcaaggcacgaaaaactcacacttacacagcactgacaggttgctctcagaccctgaactgagtgctaccgaaagccctttggctgacaagaaggctccagggagtgagcgcgctgcagagagggcagcagctgcccagcaaaactccgaaagggcccaccttgctccacggtcatcatatgtcaacatgcaggcatttgactatgaacagaagaagctattagccaccaaagctatgttaaagaaaccagtggtgacggaggtcagaacgcccacaaatacctggagtggcctgggtttttctaaatccatgccagctgaaactatcaaggagttgagaagggccaatcatgtgtcctataagcccacaatgacaaccacttatgagggctcatccatgtccctttcacggtccaacagtcgtgagcacttgggaggtggaagcgaatctgataactggagagaccgaaatggaattggacctggaagtcatagtgaatttgcagcttctattggcagccctaagcgtaaacaaaacaaatcaacggaacactatctcagcagtagcaattacatggactgcatttcctcgctgacaggaagcaatggctgtaacttaaatagctctttcaaaggttctgacctccctgagctcttcagcaaactgggcctgggcaaatacacagatgttttccagcaacaagagatcgatcttcagacattcctcactctcacagatcaggatctgaaggagctgggaataactacttttggtgccaggaggaaaatgctgcttgcaatttcagaactaaataaaaaccgaagaaagctttttgaatcgccaaatgcacgcacctctttcctggaaggtggagcgagtggaaggctaccccgtcagtatcactcagacattgctagtgtcagtggccgctggtagcagcaccctcttggcacatgcccgctgactaactgtaaagtggacacaggagatgtatgaacagccttcacagcacaccatccttagcactctgggtgtctggtatcaggaccaaagcattttattcgcacctgtactttatggcaaaaaggaagaagagagagaagatgttcttatgatgtcatacagaacaccaaatatggattacttttttaaaatggcagttggacagaatttgcaatataaggatagggctttatttcctgtttttatttacctatataacatatgcactgatgatttttttttttttttttttttttttttttttacttaaaatgaaggatgaattgacatctgggatgccagaagacttagaagttattttgtttgcttgttttgtttgggtatttggggatttttaaaaaataatcaaagtggaattttctggtactgctttaaaataattattgtggtctttcagcactttacacgttctaatttcttgtcctatggaagttctcgctgtctccatctctctcatttttgtgtcacctaatatgttggtacagataagagttagtcacatttttctgactgcatcaaacttttatttgaaatggtactggatcttagtttctgtgcagaatattctgtgattttgggaaatgtaagtgagtccacttgcttctggaccaattctgtttcatgtatgttagcatcctagaaacacctagcaatggacctagttcacagtaataggtgcaaagaaagaccaaatggactttgcagtattaaccctttgcagtcgtcatacttagctgctgcctgtaatgctaaaatgattttaatggttgtctggaggcaaagggctgttttttagtatattgccactaaaggacatttatttatatcaaacttttatttttagatattataagcatacagtacataattgatgaaattgatatttactagagatttatggtagagaatggacgacattcaataactggagcccgagattgtcactttatttaaaaagacaaataatcatctgacaagacagcactgttgccattataaggagaaatagattacaatccttatcatgtacacgttagctatgttccgtatggccacaggactttcctgaaaccgtatctgtctgcttgaagtagacttatgtttgttgagaatgaacaggcttatttgagcctccagggtggcagttcataaagacagctaagttctgaaggaaaaaaaaaatatatctttttaagtggctagagtcattattacaatcttatactgtgaaagtccaagaaatcaggcaacattgtttcctgggtcttttcagagatcttatagatttatgaagtgtttttaatccatgaagaaacactaaagtgcctttctttcttcaaagcaatattatttccaagtatattaatttgttagaaaactttcccataggaaatgttgtcaagttacctgtactgtaaagagttatttatgttcagtagtcaagattttctacatggacataaaccactctcacgtgctctcagcagaaggcattagataagcatatacaagaattgggtacttttatacaaatatgggataagaaatacttgcctgacacttttccatggctgagtctgaccattacagtaagaacaagaattgaagaggcattttgcacacagaaacattctcactttaaaaaatggtattggttaccttgaaggcatagataatgggcctgtcataaaattatcaattataactggcaccgagggactgccctttttaagctaaactaagccttatctgcttaaggatgttgaactgaatcactccctttactcatcctgtgcatatgtgtacaaatggtcatgtggatcatgtgatgatcatccatcttatttgattgtattaatgcatcatgctaaacatgtagtacaggttaacaataccagatttatgtcctgttcaacaactcagtactctaaatgttgttatgcttttaataagaccttcccagataataatcttggagctcttttcccagctgtctaccatgcatttgcaacaggaggaagatgtaatgaatatgcagtattaagttgatttatgaacagtgctttgatatgccaaagggaaaactgtcccacttaaattagattaagtagggtggctaaaaataaataaaaacactggaaattctttctctcactttctcttgatgcaatgaagggaatatgacactacagtatacagagttgttgttatatgatgcacaaaatattttgatgatttgaataaatgttaacttttaatctgcgccttaataatgactggttatctgtaaatatagaacagatacagattgtatttttctgtgggtttttgtccttttagtgatttttttccaaaaacgagagatggaattaacattgaaaatgggaaatttttctaactgaatcaattgttacatgaaaaataaatttatataacccctttgtattgctcttgcta

SEQ ID NO: 3546 - DNA, 3281 bp, Homo sapiens
  source 1..3281: mol_type = unassigned DNA
ccgtttccacccatcccttcccatttccttctccctttccccgccagcttcgcatccatctcccccaccccgtaaccccctcctgcctccatccaccggggctatggccgcagaagaggtattgcagacggtggaccattataagactgagatagagaggctaaccaaggagctcacggagaccacccacgagaagatccaggctgccgagtacgggctggtggtgctggaggagaagctgaccctcaaacagcagtatgatgaactggaggctgagtacgacagcctcaaacaggagctggagcagctcaaagaggcatttgggcagtccttctccatccaccggaaggttgctgaagatggagagactcgggaggaaacgcttctgcaggagtcagcatcgaaggaggcttactatctggggaagatcttggagatgcagaacgagctgaaacagagccgggctgtggtcactaatgtacaggcagaaaacgagaggctcaccgcagtcgtgcaggatctgaaggagaacaatgagatggtggagctacagagaatacggatgaaggatgaaatccgagaatataagttccgggaggcacggctccttcaggactatactgaattggaagaagaaaatatcacattgcagaaactagtgtccacgttgaagcagaaccaggttgaatacgaaggcttaaagcatgagattaagcgatttgaggaggagacggtactgctgaacagccagctggaagatgccatccgattgaaagagattgctgagcaccaactggaagaagccctcgagactttaaaaaatgaaagagagcaaaagaacaacctgcggaaggagctctcccagtatatcagcctcaatgataaccatatcagcatctcagtagatggactcaaatttgccgaggatgggagtgaaccaaacaatgatgacaaaatgaacggtcatatccatgggcctcttgtgaaactgaatggagactatcggactcccaccttaaggaaaggagagtctctgaaccctgtctctgacttattcagtgagctgaacatttcagaaatacagaagttgaagcagcagcttatgcaggtagagcgggaaaaggccattcttttggccaacctacaggagtcacagacacagctggaacacaccaagggggcactgacggagcagcatgagcgggtgcaccggctcacagagcacgtcaatgccatgaggggcctgcaaagcagcaaggagctcaaggctgagctggacggggagaagggccgggactcaggggaggaggcccatgactatgaggtggacatcaatggtttagagatccttgaatgcaaatacagggtggcagtaactgaggtgattgatctgaaagctgaaattaaggccttaaaggagaaatataataaatctgtagaaaactacactgatgagaaggccaagtatgagagtaaaatccagatgtatgatgagcaggtgacaagccttgagaagaccaccaaggagagtggtgagaagatggcccacatggagaaggagttgcaaaagatgaccagcatagccaacgaaaatcacagtacccttaatacggcccaggatgagttagtgacattcagtgaggagttagctcagctttaccaccatgtgtgtctatgtaataatgaaactcccaacagggtcatgctggattactataggcagagcagagtcacccgcagtggcagcctgaaagggcccgatgatcccagaggacttttgtccccacgattagccaggcggggtgtgtcatccccggtagaaacaaggacctcatctgaaccagttgcaaaagaaagcacagaggccagcaaagaaccaagtccaactaagacccccacaatctctcctgttattactgccccaccgtcatctccagtattggatacaagtgacatccgcaaagagccaatgaatatctacaaccttaatgccataatccgggaccaaatcaagcatctgcagaaagctgtggaccggtccttgcaactgtctcgtcaaagagcagcggctcgggagctagcccccatgattgataaagacaaggaagccttaatggaagagatcctcaagctaaagtccctgctgagcaccaaacgggagcagatcgccacattgagggcggtgttgaaagccaacaagcagacagctgaggtggcgctagctaatctcaagaacaaatatgaaaatgaaaaagcaatggtgactgaaaccatgacgaagcttagaaatgaactgaaggctttgaaagaagatgctgcaaccttctcatccctgagagcaatgtttgcaacaagatgtgatgaatatgtcacccagttggatgagatgcagagacagttagcagctgcagaggatgagaagaagactctgaacactttgttacgaatggctatccagcaaaaactcgccctgacccagaggctggaggacttagagtttgaccatgagcagtcccgacgcagcaaaggcaaacttggaaagagcaagatcggcagccctaaagtaagtggggaggcatcagtcaccgtgcccaccatagacacttacctcctgcatagtcagggcccacagacacccaacattcgggtcagcagtggcactcagaggaaaagacaattttcaccttccctttgtgatcagagccgtcccaggacttcaggggcttcctacctacagaatttattaagagttccccctgatcccacctccacagaatcatttcttctgaagggccccccttccatgagtgaattcatccaagggcaccggctcagcaaggaaaaaaggttaaccgtggctccaccagattgtcagcagcctgctgcctccgtaccgccacagtgctcacaactagccgggaggcaagactgcccaactgtcagtcctgacacagctctccctgaggagcagccacattccagctcccagtgcgcccctctccactgtctctccaagcctcctcacccctagtcttcatctcctgtggacgaacatctggggtggaagttttgtagccacacacaggatactgcccaagatccagcgggtgttttcttctcggttgttagatgtacaattggattaatgtccatcgttttggaagacgagagaaagttgagaagaacacgaagcacagaccctgatgtgataaaacattttgtggtttctctgagtcacagataaacttctgccatcaaatggctacagttcatttaaattt

SEQ ID NO: 3547 - DNA, 3194 bp, Homo sapiens
  source 1..3194: mol_type = unassigned DNA
tttccttctccctttccccgccagcttcgcatccatctcccccaccccgtaaccccctcctgcctccatccaccggggctatggccgcagaagaggtattgcagacggtggaccattataagactgagatagagaggctaaccaaggagctcacggagaccacccacgagaagatccaggctgccgagtacgggctggtggtgctggaggagaagctgaccctcaaacagcagtatgatgaactggaggctgagtacgacagcctcaaacaggagctggagcagctcaaagaggcatttgggcagtccttctccatccaccggaaggttgctgaagatggagagactcgggaggaaacgcttctgcaggagtcagcatcgaaggaggcttactatctggggaagatcttggagatgcagaacgagctgaaacagagccgggctgtggtcactaatgtacaggcagaaaacgagaggctcaccgcagtcgtgcaggatctgaaggagaacaatgagatggtggagctacagagaatacggatgaaggatgaaatccgagaatataagttccgggaggcacggctccttcaggactatactgaattggaagaagaaaatatcacattgcagaaactagtgtccacgttgaagcagaaccaggttgaatacgaaggcttaaagcatgagattaagcgatttgaggaggagacggtactgctgaacagccagctggaagatgccatccgattgaaagagattgctgagcaccaactggaagaagccctcgagactttaaaaaatgaaagagagcaaaagaacaacctgcggaaggagctctcccagtatatcagcctcaatgataaccatatcagcatctcagtagatggactcaaatttgccgaggatgggagtgaaccaaacaatgatgacaaaatgaacggtcatatccatgggcctcttgtgaaactgaatggagactatcggactcccaccttaaggaaaggagagtctctgaaccctgtctctgacttattcagtgagctgaacatttcagaaatacagaagttgaagcagcagcttatgcaggtagagcgggaaaaggccattcttttggccaacctacaggagtcacagacacagctggaacacaccaagggggcactgacggagcagcatgagcgggtgcaccggctcacagagcacgtcaatgccatgaggggcctgcaaagcagcaaggagctcaaggctgagctggacggggagaagggccgggactcaggggaggaggcccatgactatgaggtggacatcaatggtttagagatccttgaatgcaaatacagggtggcagtaactgaggtgattgatctgaaagctgaaattaaggccttaaaggagaaatataataaatctgtagaaaactacactgatgagaaggccaagtatgagagtaaaatccagatgtatgatgagcaggtgacaagccttgagaagaccaccaaggagagtggtgagaagatggcccacatggagaaggagttgcaaaagatgaccagcatagccaacgaaaatcacagtacccttaatacggcccaggatgagttagtgacattcagtgaggagttagctcagctttaccaccatgtgtgtctatgtaataatgaaactcccaacagggtcatgctggattactataggcagagcagagtcacccgcagtggcagcctgaaagggcccgatgatcccagaggacttttgtccccacgattagccaggcggggtgtgtcatccccggtagaaacaaggacctcatctgaaccagttgcaaaagaaagcacagaggccagcaaagaaccaagtccaactaagacccccacaatctctcctgttattactgccccaccgtcatctccagtattggatacaagtgacatccgcaaagagccaatgaatatctacaaccttaatgccataatccgggaccaaatcaagcatctgcagaaagctgtggaccggtccttgcaactgtctcgtcaaagagcagcggctcgggagctagcccccatgattgataaagacaaggaagccttaatggaagagatcctcaagctaaagtccctgctgagcaccaaacgggagcagatcgccacattgagggcggtgttgaaagccaacaagcagacagctgaggtggcgctagctaatctcaagaacaaatatgaaaatgaaaaagcaatggtgactgaaaccatgacgaagcttagaaatgaactgaaggctttgaaagaagatgctgcaaccttctcatccctgagagcaatgtttgcaacaagatgtgatgaatatgtcacccagttggatgagatgcagagacagttagcagctgcagaggatgagaagaagactctgaacactttgttacgaatggctatccagcaaaaactcgccctgacccagaggctggaggacttagagtttgaccatgagcagtcccgacgcagcaaaggcaaacttggaaagagcaagatcggcagccctaaaacaattttcaccttccctttgtgatcagagccgtcccaggacttcaggggcttcctacctacagaatttattaagagttccccctgatcccacctccacagaatcatttcttctgaagggccccccttccatgagtgaattcatccaagggcaccggctcagcaaggaaaaaaggttaaccgtggctccaccagattgtcagcagcctgctgcctccgtaccgccacagtgctcacaactagccgggaggcaagactgcccaactgtcagtcctgacacagctctccctgaggagcagccacattccagctcccagtgcgcccctctccactgtctctccaagcctcctcacccctagtcttcatctcctgtggacgaacatctggggtggaagttttgtagccacacacaggatactgcccaagatccagcgggtgttttcttctcggttgttagatgtacaattggattaatgtccatcgttttggaagacgagagaaagttgagaagaacacgaagcacagaccctgatgtgataaaacattttgtggtttctctgagtcacagataaacttctgccatcaaatggctacagttcatttaaatttaaaaaaaagaaaaaagaaacagaaaacgtgtctcagatggctggct

SEQ ID NO: 3548 - DNA, 8811 bp, Homo sapiens
  source 1..8811: mol_type = unassigned DNA
ctcgggcggtgtagctgccgctgccaccagagccggcggggcatcgcgctgctcattcatccggccgcactttcttttccgtttccacccatcccttcccatttccttctccctttccccgccagcttcgcatccatctcccccaccccgtaaccccctcctgcctccatccaccggggctatggccgcagaagaggtattgcagacggtggaccattataagactgagatagagaggctaaccaaggagctcacggagaccacccacgagaagatccaggctgccgagtacgggctggtggtgctggaggagaagctgaccctcaaacagcagtatgatgaactggaggctgagtacgacagcctcaaacaggagctggagcagctcaaagaggcatttgggcagtccttctccatccaccggaaggttgctgaagatggagagactcgggaggaaacgcttctgcaggagtcagcatcgaaggaggcttactatctggggaagatcttggagatgcagaacgagctgaaacagagccgggctgtggtcactaatgtacaggcagaaaacgagaggctcaccgcagtcgtgcaggatctgaaggagaacaatgagatggtggagctacagagaatacggatgaaggatgaaatccgagaatataagttccgggaggcacggctccttcaggactatactgaattggaagaagaaaatatcacattgcagaaactagtgtccacgttgaagcagaaccaggttgaatacgaaggcttaaagcatgagattaagcgatttgaggaggagacggtactgctgaacagccagctggaagatgccatccgattgaaagagattgctgagcaccaactggaagaagccctcgagactttaaaaaatgaaagagagcaaaagaacaacctgcggaaggagctctcccagtatatcagcctcaatgataaccatatcagcatctcagtagatggactcaaatttgccgaggatgggagtgaaccaaacaatgatgacaaaatgaacggtcatatccatgggcctcttgtgaaactgaatggagactatcggactcccaccttaaggaaaggagagtctctgaaccctgtctctgacttattcagtgagctgaacatttcagaaatacagaagttgaagcagcagcttatgcaggtagagcgggaaaaggccattcttttggccaacctacaggagtcacagacacagctggaacacaccaagggggcactgacggagcagcatgagcgggtgcaccggctcacagagcacgtcaatgccatgaggggcctgcaaagcagcaaggagctcaaggctgagctggacggggagaagggccgggactcaggggaggaggcccatgactatgaggtggacatcaatggtttagagatccttgaatgcaaatacagggtggcagtaactgaggtgattgatctgaaagctgaaattaaggccttaaaggagaaatataataaatctgtagaaaactacactgatgagaaggccaagtatgagagtaaaatccagatgtatgatgagcaggtgacaagccttgagaagaccaccaaggagagtggtgagaagatggcccacatggagaaggagttgcaaaagatgaccagcatagccaacgaaaatcacagtacccttaatacggcccaggatgagttagtgacattcagtgaggagttagctcagctttaccaccatgtgtgtctatgtaataatgaaactcccaacagggtcatgctggattactataggcagagcagagtcacccgcagtggcagcctgaaagggcccgatgatcccagaggacttttgtccccacgattagccaggcggggtgtgtcatccccggtagaaacaaggacctcatctgaaccagttgcaaaagaaagcacagaggccagcaaagaaccaagtccaactaagacccccacaatctctcctgttattactgccccaccgtcatctccagtattggatacaagtgacatccgcaaagagccaatgaatatctacaaccttaatgccataatccgggaccaaatcaagcatctgcagaaagctgtggaccggtccttgcaactgtctcgtcaaagagcagcggctcgggagctagcccccatgattgataaagacaaggaagccttaatggaagagatcctcaagctaaagtccctgctgagcaccaaacgggagcagatcgccacattgagggcggtgttgaaagccaacaagcagacagctgaggtggcgctagctaatctcaagaacaaatatgaaaatgaaaaagcaatggtgactgaaaccatgacgaagcttagaaatgaactgaaggctttgaaagaagatgctgcaaccttctcatccctgagagcaatgtttgcaacaagatgtgatgaatatgtcacccagttggatgagatgcagagacagttagcagctgcagaggatgagaagaagactctgaacactttgttacgaatggctatccagcaaaaactcgccctgacccagaggctggaggacttagagtttgaccatgagcagtcccgacgcagcaaaggcaaacttggaaagagcaagatcggcagccctaaaattgtcagcagcctgctgcctccgtaccgccacagtgctcacaactagccgggaggcaagactgcccaactgtcagtcctgacacagctctccctgaggagcagccacattccagctcccagtgcgcccctctccactgtctctccaagcctcctcacccctagtcttcatctcctgtggacgaacatctggggtggaagttttgtagccacacacaggatactgcccaagatccagcgggtgttttcttctcggttgttagatgtacaattggattaatgtccatcgttttggaagacgagagaaagttgagaagaacacgaagcacagaccctgatgtgataaaacattttgtggtttctctgagtcacagataaacttctgccatcaaatggctacagttcatttaaatttaaaaaaaagaaaaaagaaacagaaaacgtgtctcagatggctggctttacctcgatagcataagagagacctaagacatgtaaaatacgtatattgcagtatcatctttcctcacactccaaattcagctagggaagttgattccaatatgtttgtcattgatatttattttgtactttatttgctacatgatttatgtctatacaaataatttctctgaggtgaatttaattcatttattttcaaataagcataatttgctcaattaagtatgagtttgaatttagtttgaaatctggaattggccagactgtggtcatttttcttgcacaaaatgataaatgaggtgcatcagaatgttaacaataactgtattttgctgctacgctggtattgtttaggcacttactttctaatcagtagctcattaactgctgggttttgtttttgtatttttaactagagttcttcactggacattactaagtaaatctaagaaagagactaagttatgatttattgacttattcaagttttgatggcatctttacttttattttttcattgcagttgagtagatgtactggtgctgctcctttgtatgtgtgtatgtgtgtgataacgttaaagaaggctcaataacttgaagggaaaaaaatggtgtgtttatttaatgaccagaattttttttacttctcccaaaatcagggtcctactgagtctttcctgataaaaggtatcaagtacaaatgggaaaatatatacatatatagatgtaagatagcctttaattaattaatttacccagagagtgttcaaagtttgattaaaattgtatgttttgttgttgttagtttttttcataacgaatcttccttgccaaaaaaacaatagataataaaccttagctcattgtctacttttgacaaacactcaggtgcctacaaacattctattatcttgagataatacatgttcctggttaatttacagattctgctgggtaacttttatgacttgatttaaggcagtggattttcatagcaaaatttattttgcacataatctgacaaacaaggaaaacagctaactgagctgaaaggtctaacactctcgggctccttaaccatcaagtgctgcccacacaattgctcctagccctgattccttgtctttgtcaggtagccttaacttatttaaaaccataagggtttgaccttttcatataaagacatctgtaacttctcttcaaaacaaaaatgaccctcactgttaacacaaaggacagttaccagtgtagggcactgagaaaggagatccaggagccactcagcttattgagcggacatgggtggcacagaaatggagtggtccatcagagaccaaatggtaagtcgtaaagcacattgcaggagctttcgttagtcatacgcctattaagtagtggtcgctattaccaaagcaaccaggacgttttgtgttctttatatgagtgctattttccacagtgtcatttattatgcaacgtggagtaaagagttgaaatcttcaccaaaataagggttcaggttaaagtacagaaacagaaacaaaacgattcgacatgaagttcccaaccatagcagcctaaccttctgctcttttctacctgcatggccttgctgttcctaaacattgtcttcatttcactggcgttgtatctgcctagtaccagtattagtgagactgtggattttatcagagttcaatgaaagaaagcttacccctgccctcactttgtgttttttatttttccccctttctcaagcaccacgtatttggacctgagaagtggcatagctgctaagttgacttttaataaaaaactgtttgtgcctgagggaaatatatgcctttttaaaaagtacctcagaacatgttcgtagatcgtctcatcggttttgtttggtgggactgggagttcagcaggaagtattgtctgtgtgtgatgacggggcagtattgccagtcggcaatgttgtatttgcattctttatccctaactctgaatctaggactccatgaaaagccgggtcacccacaaaacatttcttccaatacaaagtgtattattacgtctattataaactagtttcatttcagttatttatcttcatagagtgggaaagtctttttctgaaatactaattctatgaaaataataattttagtgaatctttgccaagaagttatagaaacttggaaataaatttctcattttcagcacaaaattaagtgatagtccctaagcagtaagagagaataccatgtatttacactgtggcatcatttagtatagtttacactgagccatatttatttataggcatttaaagtgaatcagtatgtgtagtgttgataaaaatcagtatctgtaaagataacatcaggaattcaaaaggaaattgaaaaggggcagaactagtgagaaccaaaaagaatgaactccagtaagactaattgaagacatacttggagaggaaaaataaacagcagaaatgcactaaaaaatactggctaattattgcaaacagagtgagcaaagattaatgctaactagtaaaagtagttagcaaagtaaacaggtagttttttaaaagtaagcacaattacaatattgaatagtatggagaaatgcttttctcctgaggattttccttaatcaaaaaataagaagaagcaataaattgtctttggcctgagtgctgagtggcataaataaaggagcttggcttaatctttctggtccacacataatccattagatcccattcatatatccaactctggattctaataaaataatttggagaactttgagaaaaaggaaaactgttaaataagaaaagacctatttagaaattatactttagtctaacgaagaggaggtacaatagtagtcttcaagaaaagaatatttaacaaatgatagatatcagctatagatattgttactaagtctagaataaaaaaggcttcagtgtgaaggatgtatagtaactctaggaaagagatttttaacactgggaaattaacgtggaaattgataatcataaagaatatttgttttgtaaaaattgaatatcattggtggtctagtaagtattaagtggcaagataggagaatgcatttcagttctgggagctcataatcctgtgattcttttattttaagttttaaaatacattaaaattttactggttaatcataaaatattttatatttgaaaataggatggcaatctttatttttccaagatatttgttggaaaaaaatgatcgttggtattattttttctttcagctatattccatggtatctttaaaattgttcagaatataggacttttactaaaaaaattcaattgtcagagtctaaaaaaacaatgtcctcaggaatacttcagaaatagaaggtatgcaatcccttagtggggggcaaacacatttcagatttcgtctttatttaaaaggatcttcagtctacaacatttgcttttttcgtgctttggaaaatatccttgtgcagataagttcttctgtttgaaacaagcatgaaacattggtccaataacctaagaatgtggagatttcttgatattctgtattaattaaagttctctacatgtctcaaatggagatcacaaaacatgaaaaggaagaaatgaaatatcttttcttctgggatgagtgtcaattttaatgtataattgtcataatcaatcagccaaaagttacaatctgtccctcagagacattgggggaagctgatggatttccagtaaggaactgtggtgggttcaaactcaggctgccacaaatacattgatatggtaggtaggaagtaggactaaatttgaaagaaacttatgggataaagttcacaattttaaaaaggttgccctccagtttttttgtttgtttataaactagagtgatttttaagtaacccttatatttaaggctgcaaaaaatgtacaagagtatgttttcaagtaaagggaacataattcttcaaaaagctgttgaactggagttatgataggttatgacagagagcatgatcagtgctgatactgacaagtacttttttaccttaaaatcaacttctatggaactacaagatcaatctagctcccgagtgacattttccattgtctgtaataatgccctcggatgagttgtgtctaaaattaagttcatctttatttatatgcgaacttaactgccatagtccctaatgtattgcgtttgtaacctgatcgtattatgtttacagctgaaagatttcatctagacatgtctttcgtccttattattcaaagtgtaattgaaagagatatttagtattaagacatgttccccaattgagaattttccagaatattctacttaagaagaagaagagcaattaactgcctttagtgtaagggcgagagtgcatagaaatatgcaatgtaaaatgtttgcatgaattatttcacatcatgtaagctttcccatattcataagatgaacactatagaagtctcatttctctgtgatcttctgtccattaggaaagtaaggagattgttatctatatctagtctcctttccatattgaactgcatggctctaatcctcagtgtatttttatcccttctcgagttatttaaaatttgccctatttaagctgaagcctggataaactgctgagccagattattcctgtgattggagtttaattgctgtagaacacttgttgagaacacattttttactttttttctttcagaattattcctcaatcattgttctctaatgaaaacaccgagaagtaaatctggtgcttcttagtgtaaatatgtttttctttttaaaaagtcattttaaaacaaagatgagagaactataaagtaaggggaaatatcattttatttaaaaataattattcaatgatagataatggagatacagaatgactcattgggttcataggtatgatttgtgcagccagtcttagaggaaatacatcattttaacattattcccacaaaatgttaaagctcaatggtttgactatgagagtcaaacaattactatttgaaaatctcttatgacatttttataatctactctgtttttatttgcatgattatgcttatgtgatgaaccatccatgattctgatattgtatttctttccagtattaacatgtgtattgtgtggccaactctgatttgtacaccgtattattgttgtaatgattcaactgttcctacatttaattgcagtttaattattatgccttttggggttaaatgatgtgaagtgtttccacctactgataaataccatatgaaaacacgactaaaagactgatttaagaaacttgttatttttaaaaatatgaatttcaaaagaaatgttctcaaagacacatgcatttattttaaattcaaaaaattcttatgaatttattattgcttgtactttaactttttttattgtagacaatcctaagtgaataatgtctcatgggagaacacatgatatgtgcttgtatttgtgtaatctgatcatgcactcaatggttggaaaaggcactccagtgctaagaaaataaccagaagccaatatatcgattcttatatctcggtttatgttaccaactgaatatggtgtaatgcataactttttccagtaaataaactggttattttttgttcatttca

SEQ ID NO: 3549 - DNA, 6427 bp, Homo sapiens
  source 1..6427: mol_type = unassigned DNA
gcggcggcggctgaggagggcccggcctgcgagagcctcagtgggagccggctcagccctcggccaccatgtcggcgccgtcggaggaggaggagtacgcgcggctggtgatggaggcgcagccggagtggctgcgcgccgaggtgaagcggctgtcccacgagctggccgagaccacgcgtgagaagatccaggcggccgagtacgggctggcggtgctcgaggagaagcaccagctcaagctgcagttcgaggagctcgaggtggactatgaggctatccgcagcgagatggagcagctcaaggaggcctttggacaagcacacacaaaccacaagaaggtggctgctgacggagagagccgggaggagagcctgatccaggagtcggcctccaaggagcagtactacgtgcggaaggtgctagagctgcagacggagctgaagcagttgcgcaatgtcctcaccaacacgcagtcggagaatgagcgcctggcctctgtggcccaggagctgaaggagatcaaccagaatgtggagatccagcgtggccgcctgcgggatgacatcaaggagtacaaattccgggaagctcgtctgctgcaggactactcggaactggaggaggagaacatcagcctgcagaagcaagtgtctgtgctcagacagaaccaggtggagtttgagggcctcaagcatgagatcaagcgtctggaggaggagaccgagtacctcaacagccagctggaggatgccatccgcctcaaggagatctcagagcggcagctggaggaggcgctggagaccctgaagacggagcgcgaacagaagaacagcctgcgcaaggagctgtcacactacatgagcatcaatgactccttctacaccagccacctgcatgtctcgctggatggcctcaagttcagtgacgatgctgccgagcccaacaacgatgccgaggccctggtcaatggctttgagcacggcggcctggccaagctgccactggacaacaagacctccacgcccaagaaggagggcctcgcaccgccctcccccagcctcgtctccgacctactcagtgagctcaacatctctgagatccagaagctgaagcagcagctgatgcagatggagcgggaaaaggcgggcctgctggcaacgctgcaggacacacagaagcagctggagcacacgcggggctccctgtcagaacagcaggagaaggtgacccgcctcacagagaatctgagtgccctgcggcgcctgcaggccagcaaggagcggcagacagccctggacaacgagaaggaccgtgacagccatgaggatggggactactacgaggtggacatcaacgggcctgagatcttggcctgcaagtaccatgtggctgtggctgaggctggcgagctccgcgagcagctcaaggcactgcgcagcacgcacgaggctcgtgaggcccagcacgccgaggagaagggccgctatgaggctgagggccaggcactcacggagaaggtctccctgctagagaaggccagccgccaggaccgcgagctgctggcccggctggagaaggagctaaagaaggtgagcgacgtcgccggcgagacacagggcagcctgagtgtggcccaggatgagctggtgaccttcagtgaggagctggccaatctctaccaccacgtgtgcatgtgcaacaatgagacacccaaccgtgtcatgctggactactaccgcgagggccagggcggggccggccgcaccagtcccgggggccgcaccagccccgaggcgcgtggccggcgctcacccatcctcctacccaaggggctgctggctcctgaggcgggccgagcagatggtgggacgggggacagcagcccctcgcctggctcctcactgccatcacccctgagtgacccacgccgggagcccatgaacatctacaacctgatcgctatcatccgtgaccagatcaagcacctgcaggcagccgtggaccgcaccacggagctgtcacgccagcgcattgcctctcaggagctgggccccgccgtggacaaggacaaggaagcgcttatggaggagatcctcaagctgaagtcgctgctcagcaccaagcgggagcagatcaccacgctgcgcactgtgctcaaggccaacaagcagacggccgaggtggcccttgccaacctgaagagcaagtatgagaatgagaaggccatggttaccgagaccatgatgaagctgcgcaatgagctcaaggccctcaaggaggacgcagccaccttctcctcgctgcgtgctatgtttgccaccaggtgtgacgagtacattacacagctggatgagatgcagcggcagctggcggctgctgaggacgagaagaagacgctgaactcgctgctgcgcatggccatccagcagaagctggcgctgacccagcggctggagctgctcgagctggaccatgagcagacccggcgtggccgtgccaaagccgccccgaagaccaagccagccacaccgagcgtaagtcacacctgtgcctgtgccagcgacagggccgagggcaccgggctggccaaccaggtgttctgcagcgagaagcacagcatttactgtgattaggggctgtggggcgccgcacgctgcagctaacatctgcttcacctcaactaacccagcagcagcgggacggcggtgctaggtcaatcttaacgtgactaatgcacagagggtaggagtctagccgaggcgccatggggcgttgcatcagcaggacacttgtgagagctttgtgtcgcttctcactcctcaaagccccctcaggagcacccagtcctcagctgctctcttaggtgggggtcagaggtggggatagagctgcacattcttgcagcagatgtgtgatgaaagcatcttctaagccctgcgcacccgtggggaaacccaagggaggagtcctggtcctgctccctcagcacccaaaaggggcagaacctgagttgagacttgcatgttcctcgcatgtgtctaatgtcagcactagaaagcagttttaggaggttccagcctgcagcataggtacgacctcagaggatggctttgcacttggcatagtttcatggaaaggagtacgttgtagtttatgcagtatctgactgcaaatcatattcaggaaagaagtgcagaatttcttccccaagcccagagaagagcagccctgagcccctgtattctgctggccagacacacatggcacagacacagctgaccataacccaggaatccagagctcggtttctcatttctgagatcaggatgcttgtatagtggcctgtgaggtgacagattggcagggcccaaggccccaggttttcatttttcatgagaaaagctttccaagtgcctggccagaccttggtccttagtgcagagcccgtccttttgtacttggggtgaccccagcagccaattatccggccttccatagggggttcagtcccaaagacatggggctttgaaaaccctagcctgaagtctgagccaccaagggcttggctgggttggacacccacaggtgtatccagagcccagcccggtgctgggaaagctttgcatagggccagggccacttgtcaggattcacaggtaggagatgtttaggtctctttatttagtgcaatctgggggatggcaacagagaaagaggaaaggtagctgtagggttctcccatttccagaggctccatccacacctgccttcccacattctgagcagaacttttctcagtacttttttcccgatcaccctgtgggaccagctggacctgaggctgcagtcttctctcctgcaggctgcttgccttgtctctcatgcggaagaggcattcgagttacctggtgagagaccgtgttgccccctcccacagctctctgccctgcgcgttcttccctttggtgccgagtatgtttcggtcccctccagactccaggacacgcccatgtatgtcccctgcgtgttcatcctgggcccagatccccctgccccagcaagactcgcagtgggatggctgctggcatgcccaccctgcatgcgctttgccctctccttgcaagcctggcacatagcttctctccatactcctaagggactttgcagacacccaagccactgggacccctgctaacacatgcaggtcttctcttctgccaactaacgtgctcgcgccctcccagcacgtggagagcttcaattgtcagataaacaggaagcgacagatgaccgctttctaacgctctcttttctcccgttttcagctgtagagtagctgccaggaggacttggccacccggccctgtcacactgcagccccttccccttccctctcgtggcccacaaggaggaaggaagggcaacctaaaagcccacttagaaactttttggatatgccactgcaattcttttcaaaatagcattccccaggtttttaatgggaggaaaaaaagctttaatgttgagcatgctgcgagctgctgcgtggaaaggcctctgtatgggccgaagacccttcttccctggctgccaggctcgccaggagcccactggaaacgcccaccacgggggctccttgttacacatgttctttttttatccgatcaacctgtgcacttttgatattttgatattatatttgcttccttaattcctcgcgtagagacggtctcaggtgccgtggtctatgctcgtggtcctgtagctgtccgcctcagctcccaccgtgtttgtctggtgtcagcacgaggcagagctgtgtgctccatagcgtgtagctttagactcggagatgagtgctttgacccagcgaggagctcagctaagtgtatccacgctgtggttcagcagcctttagatcatacggcattgtggttcatgtttgaaattacagattttaaatgccatgttcattaagaaatccagggtattcagattctggggtttttcatattgtattattattattcttaggaatagttcaatgtaacaagaagaaaacttgacctttgctctggttaaaacagtaataggcacttgaaaaaaaaagataaattattgaatgagtagtattacctacaaattccagaattttctgggttttaggacgttgtgaagcatgactgattaacagaattttatacaactgtaccaataaaattccaaattggaattgttttgttactctggttgttgtgccaaattgtggtacacttagaaaattctacagtcgtcgatttttagggtgttctctttcaacacctttttgttagtaatcattgccagtagtgccttcatcagttaagggaggtgtcccagcacagatcattctcaaaagcgagcagggaagagctagtgggcatgctgaaggccagcgtggacagcaggtgaggcaggtgctcctcacacccagacctgggcatcttcattgagggaaagaaaacagtcattgtgcaaaattctgttagtcagtgattctttacttgcaaattcaggggcttagaaaatgaaagcaaacacaaaaccttgagtgtgctttgggaaccaaatggaccttctgggacaagctgagcaagctgtatgaacgccacgtttgtgaagagctgagggtatcaggagggccgacgctgtgttggcatgcgcagtaggggatgagggttagccatagtattctttgcaaatgtgaaagcgagacattatatcttctcttgcttggtgtaactaatcactgttaatttcaggaaacagaactcattaaaactccttagcaaaccaggtctacatcctgttttgtttgctgagtgaggttagtgggagtggtcaaattggtactcttggaggaagaaaaactgtccttccttctccaaaaaaggaaaaattataataatataaatgacaaaaataaaagaattctgtttcctggaataagcatttcttattcctagttgtagggactcctatttttaccttccgttacagtgttgattcataagaaatattgttacatttgagataacttcatctgtatggggtatttatttgcaatgatgtctgagtactgtattttttctgtgcattaccttagtgtcagaatgttggtctttattttaaagtcatatgcatgttctcctgccaaggaacctttacacagacccaaacaaaaaaataataatcaaatgccttcaatttctgagaaaatgaggcagagcatggaaaaggaataggaaggagaaattaattgagattttcaggacacagacatatgatgtgaatgcctacaaagccagtgcgcataggaacagtgggcctgggtaaagagtcacattggtaggaccaataaagaataataaaaagacaaagcaca

SEQ ID NO: 3550 - DNA, 4636 bp, Homo sapiens
  source 1..4636: mol_type = unassigned DNA
gcggcggcggctgaggagggcccggcctgcgagagcctcagtgggagccggctcagccctcggccaccatgtcggcgccgtcggaggaggaggagtacgcgcggctggtgatggaggcgcagccggagtggctgcgcgccgaggtgaagcggctgtcccacgagctggccgagaccacgcgtgagaagatccaggcggccgagtacgggctggcggtgctcgaggagaagcaccagctcaagctgcagttcgaggagctcgaggtggactatgaggctatccgcagcgagatggagcagctcaaggaggcctttggacaagcacacacaaaccacaagaaggtggctgctgacggagagagccgggaggagagcctgatccaggagtcggcctccaaggagcagtactacgtgcggaaggtgctagagctgcagacggagctgaagcagttgcgcaatgtcctcaccaacacgcagtcggagaatgagcgcctggcctctgtggcccaggagctgaaggagatcaaccagaatgtggagatccagcgtggccgcctgcgggatgacatcaaggagtacaaattccgggaagctcgtctgctgcaggactactcggaactggaggaggagaacatcagcctgcagaagcaagtgtctgtgctcagacagaaccaggtggagtttgagggcctcaagcatgagatcaagcgtctggaggaggagaccgagtacctcaacagccagctggaggatgccatccgcctcaaggagatctcagagcggcagctggaggaggcgctggagaccctgaagacggagcgcgaacagaagaacagcctgcgcaaggagctgtcacactacatgagcatcaatgactccttctacaccagccacctgcatgtctcgctggatggcctcaagttcagtgacgatgctgccgagcccaacaacgatgccgaggccctggtcaatggctttgagcacggcggcctggccaagctgccactggacaacaagacctccacgcccaagaaggagggcctcgcaccgccctcccccagcctcgtctccgacctactcagtgagctcaacatctctgagatccagaagctgaagcagcagctgatgcagatggagcgggaaaaggcgggcctgctggcaacgctgcaggacacacagaagcagctggagcacacgcggggctccctgtcagaacagcaggagaaggtgacccgcctcacagagaatctgagtgccctgcggcgcctgcaggccagcaaggagcggcagacagccctggacaacgagaaggaccgtgacagccatgaggatggggactactacgaggtggacatcaacgggcctgagatcttggcctgcaagtaccatgtggctgtggctgaggctggcgagctccgcgagcagctcaaggcactgcgcagcacgcacgaggctcgtgaggcccagcacgccgaggagaagggccgctatgaggctgagggccaggcactcacggagaaggtctccctgctagagaaggccagccgccaggaccgcgagctgctggcccggctggagaaggagctaaagaaggtgagcgacgtcgccggcgagacacagggcagcctgagtgtggcccaggatgagctggtgaccttcagtgaggagctggccaatctctaccaccacgtgtgcatgtgcaacaatgagacacccaaccgtgtcatgctggactactaccgcgagggccagggcggggccggccgcaccagtcccgggggccgcaccagccccgaggcgcgtggccggcgctcacccatcctcctacccaaggggctgctggctcctgaggcgggccgagcagatggtgggacgggggacagcagcccctcgcctggctcctcactgccatcacccctgagtgacccacgccgggagcccatgaacatctacaacctgatcgctatcatccgtgaccagatcaagcacctgcaggcagccgtggaccgcaccacggagctgtcacgccagcgcattgcctctcaggagctgggccccgccgtggacaaggacaaggaagcgcttatggaggagatcctcaagctgaagtcgctgctcagcaccaagcgggagcagatcaccacgctgcgcactgtgctcaaggccaacaagcagacggccgaggtggcccttgccaacctgaagagcaagtatgagaatgagaaggccatggttaccgagaccatgatgaagctgcgcaatgagctcaaggccctcaaggaggacgcagccaccttctcctcgctgcgtgctatgtttgccaccaggtgtgacgagtacattacacagctggatgagatgcagcggcagctggcggctgctgaggacgagaagaagacgctgaactcgctgctgcgcatggccatccagcagaagctggcgctgacccagcggctggagctgctcgagctggaccatgagcagacccggcgtggccgtgccaaagccgccccgaagaccaagccagccacaccgagcctgtagagtagctgccaggaggacttggccacccggccctgtcacactgcagccccttccccttccctctcgtggcccacaaggaggaaggaagggcaacctaaaagcccacttagaaactttttggatatgccactgcaattcttttcaaaatagcattccccaggtttttaatgggaggaaaaaaagctttaatgttgagcatgctgcgagctgctgcgtggaaaggcctctgtatgggccgaagacccttcttccctggctgccaggctcgccaggagcccactggaaacgcccaccacgggggctccttgttacacatgttctttttttatccgatcaacctgtgcacttttgatattttgatattatatttgcttccttaattcctcgcgtagagacggtctcaggtgccgtggtctatgctcgtggtcctgtagctgtccgcctcagctcccaccgtgtttgtctggtgtcagcacgaggcagagctgtgtgctccatagcgtgtagctttagactcggagatgagtgctttgacccagcgaggagctcagctaagtgtatccacgctgtggttcagcagcctttagatcatacggcattgtggttcatgtttgaaattacagattttaaatgccatgttcattaagaaatccagggtattcagattctggggtttttcatattgtattattattattcttaggaatagttcaatgtaacaagaagaaaacttgacctttgctctggttaaaacagtaataggcacttgaaaaaaaaagataaattattgaatgagtagtattacctacaaattccagaattttctgggttttaggacgttgtgaagcatgactgattaacagaattttatacaactgtaccaataaaattccaaattggaattgttttgttactctggttgttgtgccaaattgtggtacacttagaaaattctacagtcgtcgatttttagggtgttctctttcaacacctttttgttagtaatcattgccagtagtgccttcatcagttaagggaggtgtcccagcacagatcattctcaaaagcgagcagggaagagctagtgggcatgctgaaggccagcgtggacagcaggtgaggcaggtgctcctcacacccagacctgggcatcttcattgagggaaagaaaacagtcattgtgcaaaattctgttagtcagtgattctttacttgcaaattcaggggcttagaaaatgaaagcaaacacaaaaccttgagtgtgctttgggaaccaaatggaccttctgggacaagctgagcaagctgtatgaacgccacgtttgtgaagagctgagggtatcaggagggccgacgctgtgttggcatgcgcagtaggggatgagggttagccatagtattctttgcaaatgtgaaagcgagacattatatcttctcttgcttggtgtaactaatcactgttaatttcaggaaacagaactcattaaaactccttagcaaaccaggtctacatcctgttttgtttgctgagtgaggttagtgggagtggtcaaattggtactcttggaggaagaaaaactgtccttccttctccaaaaaaggaaaaattataataatataaatgacaaaaataaaagaattctgtttcctggaataagcatttcttattcctagttgtagggactcctatttttaccttccgttacagtgttgattcataagaaatattgttacatttgagataacttcatctgtatggggtatttatttgcaatgatgtctgagtactgtattttttctgtgcattaccttagtgtcagaatgttggtctttattttaaagtcatatgcatgttctcctgccaaggaacctttacacagacccaaacaaaaaaataataatcaaatgccttcaatttctgagaaaatgaggcagagcatggaaaaggaataggaaggagaaattaattgagattttcaggacacagacatatgatgtgaatgcctacaaagccagtgcgcataggaacagtgggcctgggtaaagagtcacattggtaggaccaataaagaataataaaaagacaaagcaca

SEQ ID NO: 3551 - DNA, 2402 bp, Homo sapiens
  source 1..2402: mol_type = unassigned DNA
cctgcccagcctttagcctcccgcccgccgcctctgtctccctctctccacaaactgcccaggagtgagtagctgctttcggtccgccggacacaccggacagatagacgtgcggacggcccaccaccccagcccgccaactagtcagcctgcgcctggcgcctcccctctccaggtccatccgccatgtggcccctgtggcgcctcgtgtctctgctggccctgagccaggccctgccctttgagcagagaggcttctgggacttcaccctggacgatgggccattcatgatgaacgatgaggaagcttcgggcgctgacacctcgggcgtcctggacccggactctgtcacacccacctacagcgccatgtgtcctttcggctgccactgccacctgcgggtggttcagtgctccgacctgggtctgaagtctgtgcccaaagagatctcccctgacaccacgctgctggacctgcagaacaacgacatctccgagctccgcaaggatgacttcaagggtctccagcacctctacgccctcgtcctggtgaacaacaagatctccaagatccatgagaaggccttcagcccactgcggaagctgcagaagctctacatctccaagaaccacctggtggagatcccgcccaacctacccagctccctggtggagctccgcatccacgacaaccgcatccgcaaggtgcccaagggagtgttcagcgggctccggaacatgaactgcatcgagatgggcgggaacccactggagaacagtggctttgaacctggagccttcgatggcctgaagctcaactacctgcgcatctcagaggccaagctgactggcatccccaaagacctccctgagaccctgaatgaactccacctagaccacaacaaaatccaggccatcgaactggaggacctgcttcgctactccaagctgtacaggctgggcctaggccacaaccagatcaggatgatcgagaacgggagcctgagcttcctgcccaccctccgggagctccacttggacaacaacaagttggccagggtgccctcagggctcccagacctcaagctcctccaggtggtctatctgcactccaacaacatcaccaaagtgggtgtcaacgacttctgtcccatgggcttcggggtgaagcgggcctactacaacggcatcagcctcttcaacaaccccgtgccctactgggaggtgcagccggccactttccgctgcgtcactgaccgcctggccatccagtttggcaactacaaaaagtagaggcagctgcagccaccgcggggcctcagtgggggtctctggggaacacagccagacatcctgatggggaggcagagccaggaagctaagccagggcccagctgcgtccaacccagccccccacctcgggtccctgaccccagctcgatgccccatcaccgcctctccctggctcccaagggtgcaggtgggcgcaaggcccggcccccatcacatgttcccttggcctcagagctgcccctgctctcccaccacagccacccagaggcaccccatgaagcttttttctcgttcactcccaaacccaagtgtccaaggctccagtcctaggagaacagtccctgggtcagcagccaggaggcggtccataagaatggggacagtgggctctgccagggctgccgcacctgtccagacacacatgttctgttcctcctcctcatgcatttccagcctttcaaccctccccgactctgcggctcccctcagcccccttgcaagttcatggcctgtccctcccagacccctgctccactggcccttcgaccagtcctcccttctgttctctctttccccgtccttcctctctctctctctctctctctctctctctttctgtgtgtgtgtgtgtgtgtgtgtgtgtgtgtgtgtgtgtgtgtgtcttgtgcttcctcagacctttctcgcttctgagcttggtggcctgttccctccatctctccgaacctggcttcgcctgtccctttcactccacaccctctggccttctgccttgagctgggactgctttctgtctgtccggcctgcacccagcccctgcccacaaaaccccagggacagcagtctccccagcctgccctgctcaggccttgcccccaaacctgtactgtcccggaggaggttgggaggtggaggcccagcatcccgcgcagatgacaccatcaaccgccagagtcccagacaccggttttcctagaagcccctcacccccactggcccactggtggctaggtctccccttatccttctggtccagcgcaaggaggggctgcttctgaggtcggtggctgtctttccattaaagaaacaccgtgcaacgtggctccgtg

SEQ ID NO: 3552 - DNA, 2253 bp, Homo sapiens
  source 1..2253: mol_type = unassigned DNA
actgctcctcctcctcctcctccttctgcccccgggtgtccactggcactgggagagggtcctacagcggcagcaggcatcggaggccctgccctgccctggaggaagggaaacaccatccaggtccatccgccatgtggcccctgtggcgcctcgtgtctctgctggccctgagccaggccctcgggcgtcctggacccggactctgtcacacccacctacagcgccatgtgtcctttcggctgccactgccacctgcgggtggttcagtgctccgacctgggtctgaagtctgtgcccaaagagatctcccctgacaccacgctgctggacctgcagaacaacgacatctccgagctccgcaaggatgacttcaagggtctccagcacctctacgccctcgtcctggtgaacaacaagatctccaagatccatgagaaggccttcagcccactgcggaagctgcagaagctctacatctccaagaaccacctggtggagatcccgcccaacctacccagctccctggtggagctccgcatccacgacaaccgcatccgcaaggtgcccaagggagtgttcagcgggctccggaacatgaactgcatcgagatgggcgggaacccactggagaacagtggctttgaacctggagccttcgatggcctgaagctcaactacctgcgcatctcagaggccaagctgactggcatccccaaagacctccctgagaccctgaatgaactccacctagaccacaacaaaatccaggccatcgaactggaggacctgcttcgctactccaagctgtacaggctgggcctaggccacaaccagatcaggatgatcgagaacgggagcctgagcttcctgcccaccctccgggagctccacttggacaacaacaagttggccagggtgccctcagggctcccagacctcaagctcctccaggtggtctatctgcactccaacaacatcaccaaagtgggtgtcaacgacttctgtcccatgggcttcggggtgaagcgggcctactacaacggcatcagcctcttcaacaaccccgtgccctactgggaggtgcagccggccactttccgctgcgtcactgaccgcctggccatccagtttggcaactacaaaaagtagaggcagctgcagccaccgcggggcctcagtgggggtctctggggaacacagccagacatcctgatggggaggcagagccaggaagctaagccagggcccagctgcgtccaacccagccccccacctcgggtccctgaccccagctcgatgccccatcaccgcctctccctggctcccaagggtgcaggtgggcgcaaggcccggcccccatcacatgttcccttggcctcagagctgcccctgctctcccaccacagccacccagaggcaccccatgaagcttttttctcgttcactcccaaacccaagtgtccaaggctccagtcctaggagaacagtccctgggtcagcagccaggaggcggtccataagaatggggacagtgggctctgccagggctgccgcacctgtccagacacacatgttctgttcctcctcctcatgcatttccagcctttcaaccctccccgactctgcggctcccctcagcccccttgcaagttcatggcctgtccctcccagacccctgctccactggcccttcgaccagtcctcccttctgttctctctttccccgtccttcctctctctctctctctctctctctctctctttctgtgtgtgtgtgtgtgtgtgtgtgtgtgtgtgtgtgtgtgtgtgtcttgtgcttcctcagacctttctcgcttctgagcttggtggcctgttccctccatctctccgaacctggcttcgcctgtccctttcactccacaccctctggccttctgccttgagctgggactgctttctgtctgtccggcctgcacccagcccctgcccacaaaaccccagggacagcagtctccccagcctgccctgctcaggccttgcccccaaacctgtactgtcccggaggaggttgggaggtggaggcccagcatcccgcgcagatgacaccatcaaccgccagagtcccagacaccggttttcctagaagcccctcacccccactggcccactggtggctaggtctccccttatccttctggtccagcgcaaggaggggctgcttctgaggtcggtggctgtctttccattaaagaaacaccgtgcaacgtg

SEQ ID NO: 3553 - DNA, 2247 bp, Homo sapiens
  source 1..2247: mol_type = unassigned DNA
actgctcctcctcctcctcctccttctgcccccgggtgtccactggcactgggagagggtcctacagcggcagcaggcatcggaggccctgccctgccctggaggaagggaaacaccatccaggtccatccgccatgtggcccctgtggcgcctcgtgtctctgctggccctgagccaggccctcgggcgtcctggacccggactctgtcacacccacctacagcgccatgtgtcctttcggctgccactgccacctgcgggtggttcagtgctccgacctgggtctgaagtctgtgcccaaagagatctcccctgacaccacgctgctggacctgcagaacaacgacatctccgagctccgcaaggatgacttcaagggtctccagcacctctacgccctcgtcctggtgaacaacaagatctccaagatccatgagaaggccttcagcccactgcggaagctgcagaagctctacatctccaagaaccacctggtggagatcccgcccaacctacccagctccctggtggagctccgcatccacgacaaccgcatccgcaaggtgcccaagggagtgttcagcgggctccggaacatgaactgcatcgagatgggcgggaacccactggagaacagtggctttgaacctggagccttcgatggcctgaagctcaactacctgcgcatctcagaggccaagctgactggcatccccaaagacctccctgagaccctgaatgaactccacctagaccacaacaaaatccaggccatcgaactggaggacctgcttcgctactccaagctgtacaggctgggcctaggccacaaccagatcaggatgatcgagaacgggagcctgagcttcctgcccaccctccgggagctccacttggacaacaacaagttggccagggtgccctcagggctcccagacctcaagctcctccaggtggtctatctgcactccaacaacatcaccaaagtgggtgtcaacgacttctgtcccatgggcttcggggtgaagcgggcctactacaacggcatcagcctcttcaacaaccccgtgccctactgggaggtgcagccggccactttccgctgcgtcactgaccgcctggccatccagtttggcaactacaaaaagtagaggcagctgcagccaccgcggggcctcagtgggggtctctggggaacacagccagacatcctgatggggaggcagagccaggaagctaagccagggcccagctgcgtccaacccagccccccacctcgggtccctgaccccagctcgatgccccatcaccgcctctccctggctcccaagggtgcaggtgggcgcaaggcccggcccccatcacatgttcccttggcctcagagctgcccctgctctcccaccacagccacccagaggcaccccatgaagcttttttctcgttcactcccaaacccaagtgtccaaggctccagtcctaggagaacagtccctgggtcagcagccaggaggcggtccataagaatggggacagtgggctctgccagggctgccgcacctgtccagacacacatgttctgttcctcctcctcatgcatttccagcctttcaaccctccccgactctgcggctcccctcagcccccttgcaagttcatggcctgtccctcccagacccctgctccactggcccttcgaccagtcctcccttctgttctctctttccccgtccttcctctctctctctctctctctctctctctctttctgtgtgtgtgtgtgtgtgtgtgtgtgtgtgtgtgtgtgtgtgtgtcttgtgcttcctcagacctttctcgcttctgagcttggtggcctgttccctccatctctccgaacctggcttcgcctgtccctttcactccacaccctctggccttctgccttgagctgggactgctttctgtctgtccggcctgcacccagcccctgcccacaaaaccccagggacagcagtctccccagcctgccctgctcaggccttgcccccaaacctgtactgtcccggaggaggttgggaggtggaggcccagcatcccgcgcagatgacaccatcaaccgccagagtcccagacaccggttttcctagaagcccctcacccccactggcccactggtggctaggtctccccttatccttctggtccagcgcaaggaggggctgcttctgaggtcggtggctgtctttccattaaagaaacaccgtgc

SEQ ID NO: 3554 - DNA, 846 bp, Homo sapiens
  source 1..846: mol_type = unassigned DNA
ctgcccaggagtgagtagctgctttcggtccgccggacacaccggacagatagacgtgcggacggcccaccaccccagcccgccaactagtcagcctgcgcctggcgcctcccctctccaggtccatccgccatgtggcccctgtggcgcctcgtgtctctgctggccctgagccaggccctgccctttgagcagagaggcttctgggacttcaccctggacgatgggccattcatgatgaacgatgaggaagcttcgggcgctgacacctcgggcgtcctggacccggactctgtcacacccacctacagcgccatgtgtcctttcggctgccactgccacctgcgggtggttcagtgctccgacctgggtctgaagtctgtgcccaaagagatctcccctgacaccacgctgctggacctgcagaacaacgacatctccgagctccgcaaggatgacttcaagggtctccagcacctctacgtaaggagctgggaggaaccagcaggcctacagcagagggcaggggtccgggccctcgtcctggtgaacaacaagatctccaagatccatgagaaggccttcagcccactgcggaagctgcagaagctctacatctccaagaaccacctggtggagatcccgcccaacctacccagctccctggtggagctccgcatccacgacaaccgcatccgcaaggtgcccaagggagtgttcagcgggctccggaacatgaactgcatcgagatgggcgggaacccactggagaacagtggctttgaacctggagccttcgatggcctgaagctcaactacctgcgcatctcagaggccaagctgact

SEQ ID NO: 3555 - DNA, 3377 bp, Homo sapiens
  source 1..3377: mol_type = unassigned DNA
gtcattttccctctactgctggaaaagaaggctcaagaggaagaatccaggttttgaggttttgctgaagatattcctgaagaatcatcccaggtgccacactaaaaaaatgatccagttgacagctacccctgtgagtgcacttgttgatgagccagtgcatatccgagctacaggcctgattccctttcagatggtgagttttcaggcatcactggaagatgaaaacggagacatgttttattctcaagcccactatagggccaatgaattcggtgaggtggacctgaatcatgcttcttcacttggaggggattatatgggagtccaccccatgggtctcttctggtctctgaaacctgaaaagctattaacaagactgttgaaaagagatgtgatgaataggcctttccaggtccaagtaaaactttatgacttagagttaatagtgaacaataaagttgccagtgctccaaaggccagcctgactttggagaggtggtatgtggcacctggtgtcacacgaattaaggttcgagaaggccgccttcgaggagctctctttctccctccaggagagggtctcttcccaggggtaattgatttgtttggtggtttgggtgggctgcttgaatttcgggccagcctcctagccagtcgtggcttcgcctccttggccttggcttaccataactatgaagacctgccccgcaaaccagaagtaacagatttggaatattttgaggaggctgccaactttctcctgagacatccaaaggtctttggctcaggcgttggggtagtctctgtatgtcaaggagtacagattggactatctatggctatttacctaaagcaagtcacagccacggtacttattaatgggaccaactttccttttggcattccacaggtatatcatggtcagatccatcagccccttccccattctgcacaattaatatccaccaatgccttggggttactagagctctatcgcacttttgagacaactcaagttggggccagtcaatatttgtttcctattgaagaggcccaggggcaattcctcttcattgtaggagaaggtgataagactatcaacagcaaagcacacgctgaacaagccataggacagctgaagagacatgggaagaacaactggaccctgctatcttaccctggggcaggccacctgatagaacctccctattctcctctgtgctgtgcctcaacgacccacgatttgaggttacactggggaggagaggtgatcccacacgcagctgcacaggaacatgcttggaaggagatccagagatttctcaggaagcacctcattccagatgtgaccagtcaactctaagaagactagatattcctagaaaataaagaagcaaatctctttaccgggaccttctctcaattttcatggcggaatgtctcccccagctgccacacacacattttgtattaattttaatgattaaaaagagcatagggtaaaaacctgatatttcacttatactgcataacaagctaaccaaactggacatggtgaataaatcataaaacaaatcattttacttattatttacatgacttttctttccatcaggtcttctaaataggactgaggtatagtacactggcaaaaataagaaaaggcaaacaagaatagcaccaaagtaacagatataaaaccaaataccatgtcagaaaacactatatagtaagaatttatcagattagagcagcaggagaaaattaatactaaattataatcattttagtgatatttttcaacttcaccacagtaactttgcaacatcatttttcatttgtggggtagtaaaattcatgtcaaaaaggaaagaaggaatggaggaggtcagttagttcattgcaataaattacctcttcagttcttaaaaacatgcccattggcacataactgagacataataactaagactggaagagccttggtttaagttatgaagcaaattaaaatggaaaatacaagaaaatagaaccaattaggttgaaaatgccccttactgaaaatctgtattaaaaataaaattaataaaagtaaaaaataaaaatagaaacacaactctactagtacaggctagcctggggagtttgataaactgagtgattgggtcaactatcactgtacttccataatgaatttcttcagtcatgttagagtagcacatgaatgtgagctctataaggacaggtactatatttccgtaagacccaatagttactgtacatcccataaataaaaaatactttagtttgctaaccaactgaatatatgaggactgcatgtaattcaaccacatggttgtttgctgtacagtcctttgcaaatattaaaaaattttttttgctataaggctttgatcatatagtcctcatagcaacataactaccatctagcatgtaccacattttgcaagactttaagttcaacattccaaactgccaatttgtattatgtccaaatgcagtatccttgaggaatatagtgggtcagttaaatatctagagacatacaaacatctgctaattcatctcattgagatggatcattctgatctccatcatccacccacttttcatcagcttctcctacttcattctcctcatagtctttatcatgagggattctgtatcctgtctctcatctacacttgctggccttcctggttgtgatttattggaacagtctacacaaaaaccatagggtcaagatccatgtcttactccaacactggctgctaacatgatcttacataccatacatttgcatttttatccttcttgtgcaccaagaaatgttttcttacatgttttctccaagtgtaaaaagtcacagctaaatgatctcactcctgtatgaataagcaagtgcttttttagtgtttgtttgcatttggctgcatagctacaatgatggcattttaacttattcatgattagagatgatgatatggtttggatatttgttgtgcccaaatttcatgctgaaatgtaatccctagtgttggaggtgaggcctggtgggagttgtttgggtcatgggggtggaccctcatggcttggtactgtcctcatgagagtatgatagtgagtgagttctcaagagatatgactgtttaaaagtgtgtggcacctcctccccatcctcacactctttcttgcctcctctctcgccatgtgagatgcctcctcgctgttcacctgctgccatgattgtaaacttcctgaggcctccccagaagccaagtagatgcaagcattatgcttctgtaaagcctgcaggaccatgatccaattaaatctcttttctttataaatta

SEQ ID NO: 3556 - DNA, 2252 bp, Homo sapiens
  source 1..2252: mol_type = unassigned DNA
ttcttttttgaggttttgaggttttgctgaagatattcctgaagaatcatcccaggtgccacactaaaaaaatgatccagttgacagctacccctgtgagtgcacttgttgatgagccagtgcatatccgagctacaggcctgattccctttcagatggtgagttttcaggcatcactggaagatgaaaacggagacatgttttattctcaagcccactatagggccaatgaattcggtgaggtggacctgaatcatgcttcttcacttggaggggattatatgggagtccaccccatgggtctcttctggtctctgaaacctgaaaagctattaacaagactgttgaaaagagatgtgatgaataggcctttccaggtccaagtaaaactttatgacttagagttaatagtgaacaataaagttgccagtgctccaaaggccagcctgactttggagaggtggtatgtggcacctggtgtcacacgaattaaggttcgagaaggccgccttcgaggagctctctttctccctccaggagagggtctcttcccaggggtaattgatttgtttggtggtttgggtgggctgcttgaatttcgggccagcctcctagccagtcgtggcttcgcctccttggccttggcttaccataactatgaagacctgccccgcaaaccagaagtaacagatttggaatattttgaggaggctgccaactttctcctgagacatccaaaggtctttggctcaggcgttggggtagtctctgtatgtcaaggagtacagattggactatctatggctatttacctaaagcaagtcacagccacggtacttattaatgggaccaactttccttttggcattccacaggtatatcatggtcagatccatcagccccttccccattctgcacaattaatatccaccaatgccttggggttactagagctctatcgcacttttgagacaactcaagttggggccagtcaatatttgtttcctattgaagaggcccaggggcaattcctcttcattgtaggagaaggtgataagactatcaacagcaaagcacacgctgaacaagccataggacagctgaagagacatgggaagaacaactggaccctgctatcttaccctggggcaggccacctgatagaacctccctattctcctctgtgctgtgcctcaacgacccacgatttgaggttacactggggaggagaggtgatcccacacgcagctgcacaggaacatgcttggaaggagatccagagatttctcaggaagcacctcattccagatgtgaccagtcaactctaagaagactagatattcctagaaaataaagaagcaaatctctttaccgggaccttctctcaattttcatggcggaatgtctcccccagctgccacacacacattttgtattaattttaatgattaaaaagagcatagggtaaaaacctgatatttcacttatactgcataacaagctaaccaaactggacatggtgaataaatcataaaacaaatcattttacttattatttacatgacttttctttccatcaggtcttctaaataggactgaggtatagtacactggcaaaaataagaaaaggcaaacaagaatagcaccaaagtaacagatataaaaccaaataccatgtcagaaaacactatatagtaagaatttatcagattagagcagcaggagaaaattaatactaaattataatcattttagtgatatttttcaacttcaccacagtaactttgcaacatcatttttcatttgtggggtagtaaaattcatgtcaaaaaggaaagaaggaatggaggaggtcagttagttcattgcaataaattacctcttcagttcttaaaaacatgcccattggcacataactgagacataataactaagactggaagagccttggtttaagttatgaagcaaattaaaatggaaaatacaagaaaatagaaccaattaggttgaaaatgccccttactgaaaatctgtattaaaaataaaattaataaaagtaaaaaataaaaatagaaacacaactctactagtacaggctagcctggggagtttgataaactgagtgattgggtcaactatcactgtacttccataatgaatttcttcagtcatgttagagtagcacatgaatgtgagctctataaggacaggtactatatttccgtaagacccaatagttactgtacatccca

SEQ ID NO: 3557 - DNA, 1071 bp, Homo sapiens
  source 1..1071: mol_type = unassigned DNA
ggtccgcaaagccggtggcgcccggaggctgcacggagagcggtgcccgcgtcagtgaccgaaggaagagaccaagatgaatgcagagcccgagaggaagtttggcgtggtggtggttggtgttggccgagccggctccgtgcggatgagggacttgcggaatccacacccttcctcagcgttcctgaacctgattggcttcgtgtcgagaagggagctcgggagcattgatggagtccagcagatttctttggaggatgctctttccagccaagaggtggaggtcgcctatatctgcagtgagagctccagccatgaggactacatcaggcagttccttaatgctggcaagcacgtccttgtggaataccccatgacactgtcattggcggccgctcaggaactgtgggagctggctgagcagaaaggaaaagtcttgcacgaggagcatgttgaactcttgatggaggaattcgctttcctgaaaaaagaagtggtggggaaagacctgctgaaagggtcgctcctcttcacagctggcccgttggaagaagagcggtttggcttccctgcattcagcggcatctctcgcctgacctggctggtctccctctttggggagctttctcttgtgtctgccactttggaagagcgaaaggaagatcagtatatgaaaatgacagtgtgtctggagacagagaagaaaagtccactgtcatggattgaagaaaaaggacctggtctaaaacgaaacagatatttaagcttccatttcaagtctgggtccttggagaatgtgccaaatgtaggagtgaataagaacatatttctgaaagatcaaaatatatttgtccagaaactcttgggccagttctctgagaaggaactggctgctgaaaagaaacgcatcctgcactgcctggggcttgcagaagaaatccagaaatattgctgttcaaggaagtaagaggaggaggtgatgtagcacttccaagatggcaccagcatttggttcttctcaagagttgaccattatctctattcttaaaattaaacatgttggggaaacaa

SEQ ID NO: 3558 - DNA, 1159 bp, Homo sapiens
  source 1..1159: mol_type = unassigned DNA
aaagccggtggcgcccggaggctgcacggagagcggtgcccgcgtcagagcctcgccctgtcaccaggctggagtacagtggcgcgatctcggctcactgcaacttccacctgctgggttcaagcaattcttctgacctcagtgaccgaaggaagagaccaagatgaatgcagagcccgagaggaagtttggcgtggtggtggttggtgttggccgagccggctccgtgcggatgagggacttgcggaatccacacccttcctcagcgttcctgaacctgattggcttcgtgtcgagaagggagctcgggagcattgatggagtccagcagatttctttggaggatgctctttccagccaagaggtggaggtcgcctatatctgcagtgagagctccagccatgaggactacatcaggcagttccttaatgctggcaagcacgtccttgtggaataccccatgacactgtcattggcggccgctcaggaactgtgggagctggctgagcagaaaggaaaagtcttgcacgaggagcatgttgaactcttgatggaggaattcgctttcctgaaaaaagaagtggtggggaaagacctgctgaaagggtcgctcctcttcacagctggcccgttggaagaagagcggtttggcttccctgcattcagcggcatctctcgcctgacctggctggtctccctctttggggagctttctcttgtgtctgccactttggaagagcgaaaggaagatcagtatatgaaaatgacagtgtgtctggagacagagaagaaaagtccactgtcatggattgaagaaaaaggacctggtctaaaacgaaacagatatttaagcttccatttcaagtctgggtccttggagaatgtgccaaatgtaggagtgaataagaacatatttctgaaagatcaaaatatatttgtccagaaactcttgggccagttctctgagaaggaactggctgctgaaaagaaacgcatcctgcactgcctggggcttgcagaagaaatccagaaatattgctgttcaaggaagtaagaggaggaggtgatgtagcacttccaagatggcaccagcatttggttcttctcaagagttgaccattatctctattcttaaaattaaacatgttggggaaacaag

SEQ ID NO: 3559 - DNA, 443 bp, Homo sapiens
  source 1..443: mol_type = unassigned DNA
ttgtgcctgtgtacgcagttcctgtagcactcggctgggcagaaatcatctttcagcactaagggaacatagttatgatctggaccttctgggagtggtcagtgcccaagaacagtgaccgaaggaagagaccaagatgaatgcagagcccgagaggaagtttggcgtggtggtggttggtgttggccgagccggctccgtgcggatgagggacttgcggaatccacacccttcctcagcgttcctgaacctgattggcttcgtgtcgagaagggagctcgggagcattgatggagtccagcagatttctttggaggatgctctttccagccaagaggtggaggtcgcctatatctgcagtgagagctccagccatgaggactacatcaggcagttccttaatgctggcaagcacgtccttgtggaataccccatgacactgt

SEQ ID NO: 3560 - DNA, 854 bp, Homo sapiens
  source 1..854: mol_type = unassigned DNA
ggcgtggcccttcgagccagctccgccccgttgttcctggcttgagtagggcagagagcaccgcccagcagccagtgggttcccgcgcgtgccgagactctgaggccttgcacccccacgatcccgtacgatggccgtcaagaagatcgcgatcttcggcgccactggccagaccgggctcaccaccctggcgcaggcggtgcaagcaggttacgaagtgacagtgctggtgcgggactcctccaggctgccatcagaggggccccggccggcccacgtggtagtgggagatgttctgcaggcagccgatgtggacaagaccgtggctgggcaggacgctgtcatcgtgctgctgggcacccgcaatgacctcagtcccacgacagtgatgtccgagggcgcccggaacattgtggcagccatgaaggctcatggtgtggacaaggtcgtggcctgcacctcggctttcctgctctgggaccctaccaaggtgcccccacgactgcaggctgtgactgatgaccacatccggatgcacaaggtgctgcgggaatcaggcctgaagtacgtggctgtgatgccgccacacataggagaccagccactaactggggcgtacacagtgaccctggatggacgagggccctcaagggtcatctccaaacatgacctgggccatttcatgctgcgctgcctcaccaccgatgagtacgacggacacagcacctacccctcccaccagtaccagtagcactctgtccccatctgggagggtggcattctgggacatgaggagcaaaggaagggggcaataaatgttgagccaagagcttcaaattactctagagaaaccg

SEQ ID NO: 3561 - DNA, 654 bp, Homo sapiens
  source 1..654: mol_type = unassigned DNA
aagcctccctgggcctctccaggggattcttgagccctggctgacaaagaccaggaagatctgagataccgggaagcctgtgactgcccatgggctccctgatgcttctcttcgtggaaacgacgcgaaattcctcagcttgcatcttccctgttattttaaatgaattatcatcaactgtggaaactataactcattttccagaagttacagatggggagtgtgtctttccattccactataaaaatggaacatattatgactgcatcaagtccaaggcaagacacaagtggtgctcgttaaacaagacctacgaaggatactggaagttttgcagtgcagaagattttgcaaactgtgtatttcccttctggtacagacgcttgatctactgggagtgtactgatgatggggaagcatttgggaaaaaatggtgttcactgaccaagaattttaacaaggaccgaatttggaaatactgtgaatgatggtttgcttgcatctgctggctatcagatacagacaaaacatgatcgatgcatccagcagtaataatcttcttcctgaaagccatggattcttcagcaggtcagaatggtctgatatacagtaacccccaattttcttaataaaataaaactctttttctccagc

SEQ ID NO: 3562 - DNA, 1958 bp, Homo sapiens
  source 1..1958: mol_type = unassigned DNA
ccggaaacagcgcggggtccgctatggcggcggcagccgagggcgtactggcgacccggagtgatgagcccgcccgagacgatgccgccgtggagacagctgaggaagcaaaggagcctgctgaagctgacatcactgagctctgccgggacatgttctccaaaatggccacttacctgactggggaactgacggccaccagtgaagactataagctcctggaaaatatgaataaactcaccagcttgaagtatcttgaaatgaaagatattgctataaacattagtaggaacttaaaggacttaaaccagaaatatgctggactgcagccttatctggatcagatcaatgtcattgaagagcaggtagcagctcttgagcaggcagcttacaagttggatgcatattcaaaaaaactggaagccaagtacaagaagctggagaagcgatgagaaacttatttctatgggacagagtcttttttttttaatgtggaagaatgtcttataaaacctgaatcctgaggctgatgaattgtgaaaattcctcaaaaggaaattatgctggtcatcacaggaacatctcaacgttcgagtaaactggaggactgtggctattcctgaaccttctttgagacagaatccctcagaatctcacacttataacttcctaccttttacttgaatgctttgccatattcaggacagagactctcacaaagttcagaaaacagctggacttaccagtaaaatcaaatgagaggacctattttctctggtagtggttgattactacattattttcttaagtggctggttttttagttactatgtaaatggtcgtttttctgttaatgatgctaatgtgttgtaaacaagattctaaatttaaaaaggaaaacaaaacaaacttgttctttgcagcttatcaccttgtgaatgtcggtaacttacttttccataatattgcaaataacataaaatcttaaaataattccaagctgagtcttctagattgagcagaaatggtgaaaggagtattgataacttggcgtatgtgatgggcccctcttgtttattttctatgtgagtcacattgacatgcgatcagtttgggaaatgtgatgaaaacaaagactagatgggtatgtgtgtttatgtgttgggtagggaggtgacgattgccactcataaaataaaggattttataaaataccttcctactgtgtatgtaggatttggggggatcttagggacctaatcgacttctttgcacactaaaaacatcagacaatgggacatactgactgaccagtctaggttgaaagataggcagccttacccagaacacaacattagcagctgggaaggtgtctgaggtccccaattacatatcccaaagagtttcttacttctgtttctgtcatttcccctctgttccagacagtcatcatttatcctctgttcttcctggactgttgctgtggtctcttctcatcttaactgtcccttccaaccaccctccacactgctgccagagcaatcttaaaaatgtaaactggccctattactcctgcttagaaccctgtagtgacttatcatggcctctgaaaaatctagactttcattatgcatacaagtcccttgtgtttttttgtttgtttatagacagggtctctattgtcacccaggctggagtgtggtggtgtgataatagctcaccttgacctcctaggctcaactgatcttcccacctcagcctcctgaatagctgggactaccagcacgctccaccatgccttgctaattattttttatacagatggagtctcactatgttgtccaggctggtcttgaactggcctcaagtgattctcttaccacagcctgccagagtgctgagattgtaggcatgaaccaccgtgcctaacataaggcccctatttaaacatttttctt

SEQ ID NO: 3563 - DNA, 2024 bp, Homo sapiens
  source 1..2024: mol_type = unassigned DNA
agtgaaggacttgaaattatggcagatggagaatggagccgacttgatggaatgaaggcaagtggagggatgtcggaacaggctgctttggctggattagcaccgggtgtaggcgggacacttagtcattctcccttggcccagacgatgccgccgtggagacagctgaggaagcaaaggagcctgctgaagctgacatcactgagctctgccgggacatgttctccaaaatggccacttacctgactggggaactgacggccaccagtgaagactataagctcctggaaaatatgaataaactcaccagcttgaagtatcttgaaatgaaagatattgctataaacattagtaggaacttaaaggacttaaaccagaaatatgctggactgcagccttatctggatcagatcaatgtcattgaagagcaggtagcagctcttgagcaggcagcttacaagttggatgcatattcaaaaaaactggaagccaagtacaagaagctggagaagcgatgagaaacttatttctatgggacagagtcttttttttttaatgtggaagaatgtcttataaaacctgaatcctgaggctgatgaattgtgaaaattcctcaaaaggaaattatgctggtcatcacaggaacatctcaacgttcgagtaaactggaggactgtggctattcctgaaccttctttgagacagaatccctcagaatctcacacttataacttcctaccttttacttgaatgctttgccatattcaggacagagactctcacaaagttcagaaaacagctggacttaccagtaaaatcaaatgagaggacctattttctctggtagtggttgattactacattattttcttaagtggctggttttttagttactatgtaaatggtcgtttttctgttaatgatgctaatgtgttgtaaacaagattctaaatttaaaaaggaaaacaaaacaaacttgttctttgcagcttatcaccttgtgaatgtcggtaacttacttttccataatattgcaaataacataaaatcttaaaataattccaagctgagtcttctagattgagcagaaatggtgaaaggagtattgataacttggcgtatgtgatgggcccctcttgtttattttctatgtgagtcacattgacatgcgatcagtttgggaaatgtgatgaaaacaaagactagatgggtatgtgtgtttatgtgttgggtagggaggtgacgattgccactcataaaataaaggattttataaaataccttcctactgtgtatgtaggatttggggggatcttagggacctaatcgacttctttgcacactaaaaacatcagacaatgggacatactgactgaccagtctaggttgaaagataggcagccttacccagaacacaacattagcagctgggaaggtgtctgaggtccccaattacatatcccaaagagtttcttacttctgtttctgtcatttcccctctgttccagacagtcatcatttatcctctgttcttcctggactgttgctgtggtctcttctcatcttaactgtcccttccaaccaccctccacactgctgccagagcaatcttaaaaatgtaaactggccctattactcctgcttagaaccctgtagtgacttatcatggcctctgaaaaatctagactttcattatgcatacaagtcccttgtgtttttttgtttgtttatagacagggtctctattgtcacccaggctggagtgtggtggtgtgataatagctcaccttgacctcctaggctcaactgatcttcccacctcagcctcctgaatagctgggactaccagcacgctccaccatgccttgctaattattttttatacagatggagtctcactatgttgtccaggctggtcttgaactggcctcaagtgattctcttaccacagcctgccagagtgctgagattgtaggcatgaaccaccgtgcctaacataaggcccctatttaaacatttttctt

SEQ ID NO: 3564 - DNA, 1217 bp, Homo sapiens
  source 1..1217: mol_type = unassigned DNA
ggaaacagcgcggggtccgctatggcggcggcagccgagggcgtactggcgacccggagtgatgagcccgcccgagacgatgccgccgtggagacagctgaggaagcaaaggagcctgctgaagctgacatcactgagctctgccgggacatgttctccaaaatggccacttacctgactggggaactgacggccaccagtgaagactataagctcctggaaaatatgaataaactcaccagcttgaagtatcttgaaatgaaagatattgctataaacattagtaggaacttaaaggacttaaaccagaaatatgctggactgcagccttatctggatcagatcaatgtcattgaagagcaggtagcagctcttgagcaggcagcttacaagttggatgcatattcaaaaaaactggaagccaagtacaagaagctggagaagcgatgagaaacttatttctatgggacagagtcttttttttttaatgtggaagaatgtcttataaaacctgaatcctgaggctgatgaattgtgaaaattcctcaaaaggaaattatgctggtcatcacaggaacatctcaacgttcgagtaaactggaggactgtggctattcctgaaccttctttgagacagaatccctcagaatctcacacttataacttcctaccttttacttgaatgctttgccatattcaggacagagactctcacaaagttcagaaaacagctggacttaccagtaaaatcaaatgagaggacctattttctctggtagtggttgattactacattattttcttaagtggctggttttttagttactatgtaaatggtcgtttttctgttaatgatgctaatgtgttgtaaacaagattctaaatttaaaaaggaaaacaaaacaaacttgttctttgcagcttatcaccttgtgaatgtcggtaacttacttttccataatattgcaaataacataaaatcttaaaataattccaagctgagtcttctagattgagcagaaatggtgaaaggagtattgataacttggcgtatgtgatgggcccctcttgtttattttctatgtgagtcacattgacatgcgatcagtttgggaaatgtgatgaaaacaaagactagatgggtatgtgtgtttatgtgttgggtagggaggtgacgattgccactcataaaataaaggattttataaaataccttc

SEQ ID NO: 3565 - DNA, 2024 bp, Homo sapiens; identical to SEQ ID NO: 3563
  source 1..2024: mol_type = unassigned DNA

SEQ ID NO: 3566 - DNA, 2599 bp, Homo sapiens
  source 1..2599: mol_type = unassigned DNA
gaaatcacagcccttcagctgccacggtgagaacgcagcactcgggttaggaagcggatctcgcaagctccgagcgtcagctgccggttcggtgccatggcgtcccagggtcgtcggcggaggcccctgcggaggccggagacggtggtgccgggggaggcgaccgagacggattccgagcgctctgcgtcctcgtcggaggaggaggagctgtacctgggtccttcgggcccgacgcgcggccgccccacggggctgcgggtggctggggaagccgcggagaccgactcggagccggagccggagccggaaccgacggccgcgccgagggacctgcctccactcgtggtgcagcgggaatcggcggaggaggcctggggcacggaggaggccccggcgcccgcccccgcgcgctcgctcctgcaacttcggctggcggagagccaggcgcggctggaccacgacgtggcggccgccgtgagcggtgtctaccgccgtgcaggccgcgacgtggccgccctggctagtaggctggcggcagcccaggcggcggggctggcggcggcccacagcgtgcgcctggcgcgcggggacctttgtgcgctggccgagcgtctggacatcgtggctggctgccgcctgctgccggacatccgcggcgtgccagggaccgagcctgagaaagacccggggccgcgggcctagccatgattctacttcccaacctgactgcaatttgggggtaggccttgctgcctctgggacctgactctgtctcctgtgtctcttatcaccccccacccccgctcccatcttggtgtcacccatgggggctaatccggtccccttggataatgctttatattggatatagttcaacccctactgcggagaccagggccccactatccttagatctggttcctctcccgatcctgaccctgccgcctggttctgagccttcccctggggcttggctccagcctttgttacatagttgctccttaatctgtttccaccctgggggctcaccaattttttttttttttttttttttttggagacagggtgtttatctgtcacccaggctagagtgcagtggcgggattactgctcactgcaacctcgacctcctgggctcaagtgatcctcccagctcagccttcaagagtagctgggactgcagacctgcaccaccacgtccagctgcccggttaatttttttctgtcggtttgaagaggggagaaggtctcactatgttgcccaggcttgtctcaaactcccgggctcaagcaatcctcccactgtggcgtcccaaagtgctggggttacaggtgtgagccaccacacactgggctctgctctgcctttctgagtttggtttctgcttatggtggggagcttgttcccgttcttcccacaagaacccaggatgtggcacagcttccctgccgtcttccttcactcagttggctacgcctcccatcctagctccacttccagaactgccttcaccctaggctgggtccttgttttgtttttagagacagggtctcactgtgtctcccaggctggagtacagtggcgtgatctcggctcactgccacctccacctcccgagttcaagcgattctcctgcctcagcctcccgagtagctaggattacaggcatgcaccaccacgcctggctactttttatatttttagtagagatgaggtttcaccttgttggccaggctggtctcgaactcctggcctcaggtgatccacccgcctcacctcctaaaatgctgggattacaggcgtgggccactgcgcctagccagctgggtccttgttctgctgcccaagcttggccctggttccgtgtgctggttctactttttgttctcccatctgcctcctgcctcctcccctttgagcttagccccgccctctcagcctgatttctgtttcccaagtccagcagtgtcgtgggataggttttgctttcttttactgtctccatcctacttacacctccctgatcctggggtctggggactccccatggtttccttccttctgcaggcccaaaatgatggcccctcttaacccaaggcaggggatcttcctcccaactccctggaccaaggtggcatttcctgcacacccctccaggccaagatgatgctcgctctcaactctgtaggccaaggtggcgtctcctcttgactctccagacctaaagtgacacccttcaggcacttcgggcccaattcagcccagtcctggtgctttcagcgccagatgacagcactttgcagataagaacgatatgatgtgtggatttcactacatttggctcctggatgctataaaaggacttggatttctgacttggctcagggactggggttagcagtctctttctgctccttttcacctgtgttttcttccgatcccagctctggtccctcagccgcattcatatttactctcctctcccagcctgatatccctgtccctcatctcaacccgaagccaagatctgagcccccaagatggagaatggggaggagctttttatggcggactgattaaaactcttaagcattt

SEQ ID NO: 3567 - DNA, 2075 bp, Homo sapiens
  source 1..2075: mol_type = unassigned DNA
agcaggagattgctgcctatgcaaagcaggtaagaagccgaactctgaggcctctcgccattgtctccgagtcggccagctggagcgttttcggggctgtaaagggagaatggcgcatgcgcatattcagggcggaaggcgcgctaagagcagatttgtggtctgcattatgtctggagccagaagtaagcttgctcttttcctctgcggctgttacgtggttgccctgggagcccacaccggggaggagagcgtggctgaccatcacgaggctgaatattatgtggctgccgtgtatgagcatccatccatcctgagtctgaaccctctggctctcatcagccgccaagaggccttggagctcatgaaccagaaccttgacatctatgaacagcaagtgatgactgcagcccaaaaggatgtacagattatagtgtttccagaagatggcattcatggattcaactttacaagaacatccatttatccatttttggacttcatgccgtctccccaggtggtcaggtggaacccatgcctggagcctcaccgcttcaatgacacagaggtgctccagcgcctgagttgtatggccatcaggggagatatgttcttggtggccaatcttgggacaaaggagccttgtcatagcagtgacccaaggtgcccaaaagatgggagataccagttcaacacaaatgtcgtgttcagcaataatggaacccttgttgaccgctaccgtaaacacaacctctactttgaggcagcattcgatgttcctcttaaagtggatctcatcacctttgataccccctttgctggcaggtttggcatcttcacatgctttgatatattgttctttgaccctgccatcagagtcctcagagactacaaggtgaagcatgttgtgtacccaactgcctggatgaaccagctcccactcttggcagcaattgagattcagaaagcttttgctgttgcctttggcatcaacgttctggcagctaatgtccaccacccagttctggggatgacaggaagtggcatacacacccctctggagtccttttggtaccatgacatggaaaatcccaaaagtcaccttataattgcccaggtggccaaaaatccagtgggtctcattggtgcagagaatgcaacaggtgaaacggacccatcccatagtaagtttttaaaaattttgtcaggcgatccgtactgtgagaaggatgctcaggaagtccactgtgatgaggccaccaagtggaacgtgaatgctcctcccacatttcactctgagatgatgtatgacaatttcaccctggtccctgtctggggaaaggaaggctatctccacgtctgttccaatggcctctgctgttatttactttacgagaggcccaccttatccaaagagctgtatgccctgggggtctttgatgggcttcacacagtacatggcacttactacatccaagtgtgtgccctggtcaggtgtgggggtcttggcttcgacacctgtggacaggaaatcacagaggccacggggatatttgagtttcacctgtggggcaacttcagtacttcctatatctttcctttgtttctgacctcagggatgaccctagaagtccctgaccagcttggctgggagaatgaccactatttcctgaggaaaagtaggctgtcctctgggctggtgacggcggctctctatgggcgcttgtatgagagggactaggaaaagtgtgtggtctgtggggcggactctggccatcatgttgacagccttgcacttccacaggctacaagccctgggaccatctttctgccttaagggcaggagcccacttctgtggcaccagattccaccctgggaactgtggaaaaagtaggagaggcagattccctcagtgtcttcctcttaaacctcaatcatcgagacattagggggtattttctgttcacatttatctttttcaagccacatcttcctctaacaaatctctcagtatgcgattggtctcaagctaaaacaaaaataaatgtcagtttatattttacacatccacaaa

SEQ ID NO: 3568 - DNA, 2138 bp, Homo sapiens
  source 1..2138: mol_type = unassigned DNA
agttggacttggggagggctgcgcaaaggctgccgggagctgggaagcccggcgcgcgtcgtttgctggggctgtttgtgcgttgctgctgtgctaccgcgttgcgttttctaggcatttacttacacgctttgtggtttacgctctcataaccttgtggttttatagtccttaaattattgtagcgcacgttacttaaatccagaagcagatgtgtaccccagcaagagataaaatgacgctcagagtcagtagatccagaccgtgcctgagatcctgaatcctgtttcctacccactattcagccattgggtcacaagcgatgaaaagagcaccttgaagatttgtggtctgcattatgtctggagccagaagtaagcttgctcttttcctctgcggctgttacgtggttgccctgggagcccacaccggggaggagagcgtggctgaccatcacgaggctgaatattatgtggctgccgtgtatgagcatccatccatcctgagtctgaaccctctggctctcatcagccgccaagaggccttggagctcatgaaccagaaccttgacatctatgaacagcaagtgatgactgcagcccaaaaggatgtacagattatagtgtttccagaagatggcattcatggattcaactttacaagaacatccatttatccatttttggacttcatgccgtctccccaggtggtcaggtggaacccatgcctggagcctcaccgcttcaatgacacagaggtgctccagcgcctgagttgtatggccatcaggggagatatgttcttggtggccaatcttgggacaaaggagccttgtcatagcagtgacccaaggtgcccaaaagatgggagataccagttcaacacaaatgtcgtgttcagcaataatggaacccttgttgaccgctaccgtaaacacaacctctactttgaggcagcattcgatgttcctcttaaagtggatctcatcacctttgataccccctttgctggcaggtttggcatcttcacatgctttgatatattgttctttgaccctgccatcagagtcctcagagactacaaggtgaagcatgttgtgtacccaactgcctggatgaaccagctcccactcttggcagcaattgagattcagaaagcttttgctgttgcctttggcatcaacgttctggcagctaatgtccaccacccagttctggggatgacaggaagtggcatacacacccctctggagtccttttggtaccatgacatggaaaatcccaaaagtcaccttataattgcccaggtggccaaaaatccagtgggtctcattggtgcagagaatgcaacaggtgaaacggacccatcccatagtaagtttttaaaaattttgtcaggcgatccgtactgtgagaaggatgctcaggaagtccactgtgatgaggccaccaagtggaacgtgaatgctcctcccacatttcactctgagatgatgtatgacaatttcaccctggtccctgtctggggaaaggaaggctatctccacgtctgttccaatggcctctgctgttatttactttacgagaggcccaccttatccaaagagctgtatgccctgggggtctttgatgggcttcacacagtacatggcacttactacatccaagtgtgtgccctggtcaggtgtgggggtcttggcttcgacacctgtggacaggaaatcacagaggccacggggatatttgagtttcacctgtggggcaacttcagtacttcctatatctttcctttgtttctgacctcagggatgaccctagaagtccctgaccagcttggctgggagaatgaccactatttcctgaggaaaagtaggctgtcctctgggctggtgacggcggctctctatgggcgcttgtatgagagggactaggaaaagtgtgtggtctgtggggcggactctggccatcatgttgacagccttgcacttccacaggctacaagccctgggaccatctttctgccttaagggcaggagcccacttctgtggcaccagattccaccctgggaactgtggaaaaagtaggagaggcagattccctcagtgtcttcctcttaaacctcaatcatcgagacatta

SEQ ID NO: 3569 - DNA, 2097 bp, Homo sapiens
  source 1..2097: mol_type = unassigned DNA
attgtctccgagtcggccagctggagcgttttcggggctgtaaagggagaatggcgcatgcgcatattcagggcggaaggcgcgctaagagcagacagatttccccacgcagacgctgtgtgtcacagggggaatgggcagcgtcactttttacatccagtcatattgtatgaaattgcaacaaattcaaaaagatgccatcgtgggagtgtgaagacactattgtaatagcatggctaggaaggaaacacagctaattattaagatgaatcatttagcaagatttgtggtctgcattatgtctggagccagaagtaagcttgctcttttcctctgcggctgttacgtggttgccctgggagcccacaccggggaggagagcgtggctgaccatcacgaggctgaatattatgtggctgccgtgtatgagcatccatccatcctgagtctgaaccctctggctctcatcagccgccaagaggccttggagctcatgaaccagaaccttgacatctatgaacagcaagtgatgactgcagcccaaaaggatgtacagattatagtgtttccagaagatggcattcatggattcaactttacaagaacatccatttatccatttttggacttcatgccgtctccccaggtggtcaggtggaacccatgcctggagcctcaccgcttcaatgacacagaggtgctccagcgcctgagttgtatggccatcaggggagatatgttcttggtggccaatcttgggacaaaggagccttgtcatagcagtgacccaaggtgcccaaaagatgggagataccagttcaacacaaatgtcgtgttcagcaataatggaacccttgttgaccgctaccgtaaacacaacctctactttgaggcagcattcgatgttcctcttaaagtggatctcatcacctttgataccccctttgctggcaggtttggcatcttcacatgctttgatatattgttctttgaccctgccatcagagtcctcagagactacaaggtgaagcatgttgtgtacccaactgcctggatgaaccagctcccactcttggcagcaattgagattcagaaagcttttgctgttgcctttggcatcaacgttctggcagctaatgtccaccacccagttctggggatgacaggaagtggcatacacacccctctggagtccttttggtaccatgacatggaaaatcccaaaagtcaccttataattgcccaggtggccaaaaatccagtgggtctcattggtgcagagaatgcaacaggtgaaacggacccatcccatagtaagtttttaaaaattttgtcaggcgatccgtactgtgagaaggatgctcaggaagtccactgtgatgaggccaccaagtggaacgtgaatgctcctcccacatttcactctgagatgatgtatgacaatttcaccctggtccctgtctggggaaaggaaggctatctccacgtctgttccaatggcctctgctgttatttactttacgagaggcccaccttatccaaagagctgtatgccctgggggtctttgatgggcttcacacagtacatggcacttactacatccaagtgtgtgccctggtcaggtgtgggggtcttggcttcgacacctgtggacaggaaatcacagaggccacggggatatttgagtttcacctgtggggcaacttcagtacttcctatatctttcctttgtttctgacctcagggatgaccctagaagtccctgaccagcttggctgggagaatgaccactatttcctgaggaaaagtaggctgtcctctgggctggtgacggcggctctctatgggcgcttgtatgagagggactaggaaaagtgtgtggtctgtggggcggactctggccatcatgttgacagccttgcacttccacaggctacaagccctgggaccatctttctgccttaagggcaggagcccacttctgtggcaccagattccaccctgggaactgtggaaaaagtaggagaggcagattccctcagtgtcttcctcttaaacctcaatcatcgagacattagggggtattttctgttcac

SEQ ID NO: 3570 - DNA, 1820 bp, Homo sapiens
  source 1..1820: mol_type = unassigned DNA
cacttcccgggagaggtgagaatgtaaacacgcgcgttctccaatcagaactgcgctctcttctcggctcctccattcgcgcgccagaatgccagagggaggcgggactagcaggagattgctgcctatgcaaagcagatttgtggtctgcattatgtctggagccagaagtaagcttgctcttttcctctgcggctgttacgtggttgccctgggagcccacaccggggaggagagcgtggctgaccatcacgaggctgaatattatgtggctgccgtgtatgagcatccatccatcctgagtctgaaccctctggctctcatcagccgccaagaggccttggagctcatgaaccagaaccttgacatctatgaacagcaagtgatgactgcagcccaaaaggatgtacagattatagtgtttccagaagatggcattcatggattcaactttacaagaacatccatttatccatttttggacttcatgccgtctccccaggtggtcaggtggaacccatgcctggagcctcaccgcttcaatgacacagaggtgctccagcgcctgagttgtatggccatcaggggagatatgttcttggtggccaatcttgggacaaaggagccttgtcatagcagtgacccaaggtgcccaaaagatgggagataccagttcaacacaaatgtcgtgttcagcaataatggaacccttgttgaccgctaccgtaaacacaacctctactttgaggcagcattcgatgttcctcttaaagtggatctcatcacctttgataccccctttgctggcaggtttggcatcttcacatgctttgatatattgttctttgaccctgccatcagagtcctcagagactacaaggtgaagcatgttgtgtacccaactgcctggatgaaccagctcccactcttggcagcaattgagattcagaaagcttttgctgttgcctttggcatcaacgttctggcagctaatgtccaccacccagttctggggatgacaggaagtggcatacacacccctctggagtccttttggtaccatgacatggaaaatcccaaaagtcaccttataattgcccaggtggccaaaaatccagtgggtctcattggtgcagagaatgcaacaggtgaaacggacccatcccatagtaagtttttaaaaattttgtcaggcgatccgtactgtgagaaggatgctcaggaagtccactgtgatgaggccaccaagtggaacgtgaatgctcctcccacatttcactctgagatgatgtatgacaatttcaccctggtccctgtctggggaaaggaaggctatctccacgtctgttccaatggcctctgctgttatttactttacgagaggcccaccttatccaaagagctgtatgccctgggggtctttgatgggcttcacacagtacatggcacttactacatccaagtgtgtgccctggtcaggtgtgggggtcttggcttcgacacctgtggacaggaaatcacagaggccacggggatatttgagtttcacctgtggggcaacttcagtacttcctatatctttcctttgtttctgacctcagggatgaccctagaagtccctgaccagcttggctgggagaatgaccactatttcctgaggaaaagtaggctgtcctctgggctggtgacggcggctctctatgggcgcttgtatgagagggactaggaaaagtgtgtggtctgtggggcggactctggccatcatgttgacagccttgcacttccacaggctacaagccctgggaccatctttctgcctt

SEQ ID NO: 3571 - DNA, 2156 bp, Homo sapiens
  source 1..2156: mol_type = unassigned DNA
gacgcagcgagggcgctatggctggcggcctcgcctcctggaaaggccatggtcgctgaggcgacgagcgagggcggggcagcgccgacggggacactcatcccgggagccagagccagcaccgagaggggacggtctacgcgggtgccggcggttccaggactgcgaaaccacgagccgagtttcggtcgcccatgggaaagcacccggcagggcgtggcttcggggcggggcgggcagagggcggagcaggatggagaggcgaggtgggcggagcagagggcgtggcttcggggcagagtgggccgggtaccgcgcttggtcttagcgcatgcgcactcccggcagctacgcgacctgtgaccatggtggctgtgctgggcggccggggcgtgttgcgcctgcggctgcttctctcagcgctgaagcccgggatccacgtcccacgggccggacccgcggccgcgttcggaaatcagcctgagcctgagtaccgctaaggctttaatcacgggtcccgagagccctaagtcttctctttgcttgctgatctcgtaccttaatgtgcaaaagaatcacgttgggaactgaaaattcagaatcctgggcctcactcccagaggatctgatctacatgtgtggagatgcccaggaatctgctttattctcttttgtcctcccacctgtccccccatttcagcacctcggtaacctctgccaaagtggctgtgaatggcgttcagctgcattaccagcagactggagagggagatcacgcagtcctgctacttcctgggatgttaggaagtggagagactgattttggacctcagctcaagaacctcaataagaagctcttcacggtggtcgcctgggatcctcgaggctatggacattccaggcccccagatcgcgatttcccagcagacttttttgaaagggatgcaaaagatgctgttgatttgatgaaggcgctgaagtttaagaaggtttctctgctggggtggagtgatgggggcataaccgcactcattgctgctgcaaaatatccatcttacatccacaagatggtgatctggggcgccaacgcctacgtcactgacgaagacagcatgatatatgagggcatccgagatgtttccaaatggagtgagagaacaagaaagcctctagaagccctctatggatggagtctcactctgtcaccaggctggaatgcaatggcatgatctcagctcactgcaatctctgtctcctgggttcaagcgattgctctgcctcagcctcccaagtagctgggaccacaggcgtgcaccaccacacaggtaacatctgccggcacctgctgccccgggtccagtgccccgccttgattgtgcacggtgagaaggatcctctggtcccacggtttcatgccgacttcattcataagcacgtgaaaggctcacggctgcatttgatgccagaaggcaaacacaacctgcatttgcgttttgcagatgaattcaacaagttagcagaagacttcctacaatgagaatgcacactccagtcttggtggttccttcgtgtggggcttgatcgtgttgctgcctgttaacatgatgcctttgaaactctccgcctttgaaactttctacccctcccttcaatcttatcctaaccaaatgagaataatgacatattgaaaacagcctctagcttcaggctgggcacggtggctcacagctataatctcagcactttgggaggctgaggtgggagaattgcctgagcccaggagttcaagaccagcttgtgcaatatagggagactccggctctacaaaaaagagtttttcaaaattagccaggcgaagtggcacacatctgtggtcccaggtgctcaggaagctgaggtgggaggatcacttgagcccaattcaaagctgcagtgagctgtaattgcatcactgcactccaacctgggcaacagagtaagaccttgtcttaaaaaaaaataaaaacataaaaaaaaataaaaaaggaataaagcctctaacttcaatagctatgaaaattaaatccgattttctaagatgaagttgtgacaagttataccattgtcttaacaggtgaattcctgccataatttattttcaaataaattttaggtgg

SEQ ID NO: 3572 - DNA, 2088 bp, Homo sapiens
  source 1..2088: mol_type = unassigned DNA
gacgcagcgagggcgctatggctggcggcctcgcctcctggaaaggccatggtcgctgaggcgacgagcgagggcggggcagcgccgacggggacactcatcccgggagccagagccagcaccgagaggggacggtctacgcgggtgccggcggttccaggactgcgaaaccacgagccgagtttcggtcgcccatgggaaagcacccggcagggcgtggcttcggggcggggcgggcagagggcggagcaggatggagaggcgaggtgggcggagcagagggcgtggcttcggggcagagtgggccgggtaccgcgcttggtcttagcgcatgcgcactcccggcagctacgcgacctgtgaccatggtggctgtgctgggcggccggggcgtgttgcgcctgcggctgcttctctcagcgctgaagcccgggatccacgtcccacgggccggacccgcggccgcgttcggaaatcagcctgagcctgagtaccgctaaggctttaatcacgggtcccgagagccctaagtcttctctttgcttgctgatctcgtaccttaatgtgcaaaagaatcacgttgggaactgaaaattcagaatcctgggcctcactcccagaggatctgatctacatgtgtggagatgcccaggaatctgctttattctcttttgtcctcccacctgtccccccatttcagcacctcggtaacctctgccaaagtggctgtgaatggcgttcagctgcattaccagcagactggagagggagatcacgcagtcctgctacttcctgggatgttaggaagtggagagactgattttggacctcagctcaagaacctcaataagaagctcttcacggtggtcgcctgggatcctcgaggctatggacattccaggcccccagatcgcgatttcccagcagacttttttgaaagggatgcaaaagatgctgttgatttgatgaaggcgctgaagtttaagaaggtttctctgctggggtggagtgatgggggcataaccgcactcattgctgctgcaaaatatccatcttacatccacaagatggtgatctggggcgccaacgcctacgtcactgacgaagacagcatgatatatgagggcatccgagatgtttccaaatggagtgagagaacaagaaagcctctagaagccctctatgggtatgactactttgccagaacctgtgaaaagtgggtggatggcataagacagtttaaacatctcccagatggtaacatctgccggcacctgctgccccgggtccagtgccccgccttgattgtgcacggtgagaaggatcctctggtcccacggtttcatgccgacttcattcataagcacgtgaaaggctcacggctgcatttgatgccagaaggcaaacacaacctgcatttgcgttttgcagatgaattcaacaagttagcagaagacttcctacaatgagaatgcacactccagtcttggtggttccttcgtgtggggcttgatcgtgttgctgcctgttaacatgatgcctttgaaactctccgcctttgaaactttctacccctcccttcaatcttatcctaaccaaatgagaataatgacatattgaaaacagcctctagcttcaggctgggcacggtggctcacagctataatctcagcactttgggaggctgaggtgggagaattgcctgagcccaggagttcaagaccagcttgtgcaatatagggagactccggctctacaaaaaagagtttttcaaaattagccaggcgaagtggcacacatctgtggtcccaggtgctcaggaagctgaggtgggaggatcacttgagcccaattcaaagctgcagtgagctgtaattgcatcactgcactccaacctgggcaacagagtaagaccttgtcttaaaaaaaaataaaaacataaaaaaaaataaaaaaggaataaagcctctaacttcaatagctatgaaaattaaatccgattttctaagatgaagttgtgacaagttataccattgtcttaacaggtgaattcctgccataatttattttcaaataaattttaggtgg

SEQ ID NO: 3573 - DNA, 1928 bp, Homo sapiens
  source 1..1928: mol_type = unassigned DNA
gcttggtcttagcgcatgcgcactcccggcagctacgcgacctgtgaccatggtggctgtgctgggcggccggggcgtgttgcgcctgcggctgcttctctcagcgctgaagcccgggatccacgtcccacgggccggacccgcggccgcgttcggcacctcggtaacctctgccaaagtggctgtgaatggcgttcagctgcattaccagcagactggagagggagatcacgcagtcctgctacttcctgggatgttaggaagtggagagactgattttggacctcagctcaagaacctcaataagaagctcttcacggtggtcgcctgggatcctcgaggctatggacattccaggcccccagatcgcgatttcccagcagacttttttgaaagggatgcaaaagatgctgttgatttgatgaaggcgctgaagtttaagaaggtttctctgctggggtggagtgatgggggcataaccgcactcattgctgctgcaaaatatccatcttacatccacaagatggtgatctggggcgccaacgcctacgtcactgacgaagacagcatgatatatgagggcatccgagatgtttccaaatggagtgagagaacaagaaagcctctagaagccctctatgggtatgactactttgccagaacctgtgaaaagtgggtggatggcataagacagtttaaacatctcccagatggtaacatctgccggcacctgctgccccgggtccagtgccccgccttgattgtgcacggtgagaaggatcctctggtcccacggtttcatgccgacttcattcataagcacgtgaaaggctcacggctgcatttgatgccagaaggcaaacacaacctgcatttgcgttttgcagatgaattcaacaagttagcagaagacttcctacaatgagaatgcacactccagtcttggtggttccttcgtgtggggcttgatcgtgttgctgcctgttaacatgatgcctttgaaactctccgcctttgaaactttctacccctcccttcaatcttatcctaaccaaatgagaataatgacatattgaaaacagcctctagcttcaggctgggcacggtggctcacagctataatctcagcactttgggaggctgaggtgggagaattgcctgagcccaggagttcaagaccagcttgtgcaatatagggagactccggctctacaaaaaagagtttttcaaaattagccaggcgaagtggcacacatctgtggtcccaggtgctcaggaagctgaggtgggaggatcacttgagcccaattcaaagctgcagtgagctgtaattgcatcactgcactccaacctgggcaacagagtaagaccttgtcttaaaaaaaaataaaaacataaaaaaaaataaaaaaggaataaagcctctaacttcaatagctatgaaaattaaatccgattttctaagatgaagttgtgacaagttataccattgtcttaacaggtgaattcctgccataatttattttcaaataaattttaggtggagaatgtgtagtgttaatgttggagattttaagacatcttgaatttgtactgtaccttttatctgagaggttcaagcttcacttgtgtttttatttgtgtttatctatcatattcaaagagaagtagggagagtccgtgcccgaggtcctcaattctaagatcagaggatgtccagaacagcagcagataggggcaggtttgctttaccccatatccctctcctggttcacttttgagagatgaatactttgggccagtaaaggtgaacaaaatatgtattttcatcactctgtactaaaaggacaggaatgttattaattaaaacactaaagcagaaatcctacattgctattaaaattaaactttgattaccacaataaaaa

SEQ ID NO: 3574 - DNA, 2073 bp, Homo sapiens
  source 1..2073: mol_type = unassigned DNA
aggatgggtcctcggccggctcgactagaagactaagggggcgtctccccggcttcctgcggcgtcggtggcgagctgaggtggaggcaggctgcggcagacggcgacagtggcggcggcgccatggcagggcttgcaggatccctgctgccttggtgatcccgggctgacagccagagagcacagcggctcagctcctggagagtgagggttgaagaaagcggagggcagccgcctgcgcccgctggctcccattaggtcggttcctgcagcggtgcccggcagccttggtgaaggccctgcccggcagagatcatgtattgcctccagtggctgctgcccgtcctcctcatccccaagcccctcaaccccgccctgtggttcagccactccatgttcatgggcttctacctgctcagcttcctcctggaacggaagccttgcacaatttgtgccttggttttcctggcagccctgttccttatctgctatagctgctggggaaactgtttcctgtaccactgctccgattccccgcttccagaatcggcgcatgatcccggcgttgtgggcacctaacggcctgccctgttagctttccaaggaagcagaagacgggaggggaggcattgacataggtcataaagcattggagtttcaaatcccgcagcctcgcgggtgtcacattcctgacggcgcctttttggcctgtgatgttttatccttacaatgtgaataatggcactgaccggtgcttttattgtaaagtcctatagtcgtgggtggtcttgtggttgtgtgtgttctgtccccatctaggtcctggctggccgcatgaccacccctctcgcctcattactgtgaggagtctgggtccatcctggtcagctgccccaatgtgacctggggcagataaaatgccagtctcattgtcacctctgtgacccctccttgtcagggtctccttccttcccagaatgttactgactcctcagtccctcttctggtttccctttatttctcttctacccttttccttttttggggagtacctgtccaagacagggctcatttttgcacttatctcgaatttgaagagattgctgacgcccgagagcctcgctttttcatccttctttccttgttcagcaggctagacagaaacatgtcttgactgttagttgtccacaaatcttcagtattttctccacttcatttttaagaaaggaagcaacagatagatgttgctctttcacctgggtgtctgggctcaagctttcccgcccagcctcacttcctttgcccttcctcctgcctttctcaactgtcccaaggagggggcctcattgtgtctcccgtgcatgctctgcagcattgaagtatggtgtgttcacgtagttctagcagtccccagctgagtgagtgggagagtacctgtgtgtttcgtaacggccttgatccccttgatagatgtttggatattttttggtgtgccctgtgtgtgtgtgtgtacaaatacatgtgtatattccttttaaagaagctttatcgaacgtggtctgattttgaggtttagcaatagctagctatatatggtaggtgccgctacagtttttatttagcatggggattgcagagtgaccagcacactggactccgaggtggttcagacaagacagaggggagcagtggccatcatcctcccgccaggagcttcttcgttcctgcgcatatagactgtacattatgaagaatacccaggaagactttgtgactgtcacttgctgctttttctgcgcttcagtaacaagtgttggcaaacgagactttctcctggcccctgcctgctggagatcagcatgcctgtcctttcagtctgatccatccatctctctcttgcctgaggggaaagagagatgggccaggcagagaacagaactggaggcagtccatctagggaatgggactgtgaggccatacttgtgaaacgtctggactgctattctagagcttttatttggtgtgttcgttgcacagctgtttgaaatgtttaataaagctttataaacttta

SEQ ID NO: 3575 - DNA, 633 bp, Homo sapiens
  source 1..633: mol_type = unassigned DNA
acataaagccagagacaaggctgaacaggcggcagggccatttggtgagacagtcagctgaccccgtgtagaaagagccctgactcactggggagtgggagaggaagacaagtccgaggccgagcactgcccaccctgacgtgatggcaggggagagcccagggccacggacctggatccctgctgccttggtgatcccgggctgacagccagagagcacagcggctcagctcctggagagtgagggttgaagaaagcggagggcagccgcctgcgcccgctggctcccattaggtcggttcctgcagcggtgcccggcagccttggtgaaggccctgcccggcagagatcatgtattgcctccagtggctgctgcccgtcctcctcatccccaagcccctcaaccccgccctgtggttcagccactccatgttcatgggcttctacctgctcagcttcctcctggaacggaagccttgcacaatttgtgccttggttttcctggcagccctgttccttatctgctatagctgctggggaaactgtttcctgtaccactgctccgattccccgcttccagaatcggcgcatgatcccggcgttgtgggcacctaacggcctgccctgttagct

SEQ ID NO: 3576 - DNA, 566 bp, Homo sapiens
  source 1..566: mol_type = unassigned DNA
tagaccgccagtcttgtgggtccctcgcacagcgcggattttcgggcgggaagaccggaatgcggtttgatccctgctgccttggtgatcccgggctgacagccagagagcacagcggctcagctcctggagagtgagggttgaagaaagcggagggcagccgcctgcgcccgctggctcccattaggtcggttcctgcagcggtgcccggcagccttggtgaaggccctgcccggcagagatcatgtattgcctccagtggctgctgcccgtcctcctcatccccaagcccctcaaccccgccctgtggttcagccactccatgttcatgggcttctacctgctcagcttcctcctggaacggaagccttgcacaatttgtgccttggttttcctggcagccctgttccttatctgctatagctgctggggaaactgtttcctgtaccactgctccgattccccgcttccagaatcggcgcatgatcccggcgttgtgggcacctaacggcctgccctgttagctttccaaggaagcagaagacgggaggggaggcattgacata

SEQ ID NO: 3577 - DNA, 685 bp, Homo sapiens
  source 1..685: mol_type = unassigned DNA
cttctgggtcaccttaggcgtcgccgggtccccgtcactggggttttccttccgcataccccgggaaggcagggcgcccctgtccggcttcaggtgattgccgtgattggacctagcctgggccttggggggtcccttcccagcccggaggatccctgctgccttggtgatcccgggctgacagccagagagcacagcggctcagctcctggagagtgagggttgaagaaagcggagggcagccgcctgcgcccgctggctcccattaggtcggttcctgcagcggtgcccggcagccttggtgaaggccctgcccggcagagatcatgtattgcctccagtggctgctgcccgtcctcctcatccccaagcccctcaaccccgccctgtggttcagccactccatgttcatgggcttctacctgctcagcttcctcctggaacggaagccttgcacaatttgtgccttggttttcctggcagccctgttccttatctgctatagctgctggggaaactgtttcctgtaccactgctccgattccccgcttccagaatcggcgcatgatcccggcgttgtgggcacctaacggcctgccctgttagctttccaaggaagcagaagacgggaggggaggcattgacataggtcataaagcattggagtttcaaatcccgcagcctc

SEQ ID NO: 3578 - DNA, 2036 bp, Homo sapiens
  source 1..2036: mol_type = unassigned DNA
atattgtcccttctgggtcaccttaggcgtcgccgggtccccgtcactggggttttccttccgcataccccgggaaggcagggcgcccctgtccggcttcaggatccctgctgccttggtgatcccgggctgacagccagagagcacagcggctcagctcctggagagtgagggttgaagaaagcggagggcagccgcctgcgcccgctggctcccattaggtcggttcctgcagcggtgcccggcagccttggtgaaggccctgcccggcagagatcatgtattgcctccagtggctgctgcccgtcctcctcatccccaagcccctcaaccccgccctgtggttcagccactccatgttcatgggcttctacctgctcagcttcctcctggaacggaagccttgcacaatttgtgccttggttttcctggcagccctgttccttatctgctatagctgctggggaaactgtttcctgtaccactgctccgattccccgcttccagaatcggcgcatgatcccggcgttgtgggcacctaacggcctgccctgttagctttccaaggaagcagaagacgggaggggaggcattgacataggtcataaagcattggagtttcaaatcccgcagcctcgcgggtgtcacattcctgacggcgcctttttggcctgtgatgttttatccttacaatgtgaataatggcactgaccggtgcttttattgtaaagtcctatagtcgtgggtggtcttgtggttgtgtgtgttctgtccccatctaggtcctggctggccgcatgaccacccctctcgcctcattactgtgaggagtctgggtccatcctggtcagctgccccaatgtgacctggggcagataaaatgccagtctcattgtcacctctgtgacccctccttgtcagggtctccttccttcccagaatgttactgactcctcagtccctcttctggtttccctttatttctcttctacccttttccttttttggggagtacctgtccaagacagggctcatttttgcacttatctcgaatttgaagagattgctgacgcccgagagcctcgctttttcatccttctttccttgttcagcaggctagacagaaacatgtcttgactgttagttgtccacaaatcttcagtattttctccacttcatttttaagaaaggaagcaacagatagatgttgctctttcacctgggtgtctgggctcaagctttcccgcccagcctcacttcctttgcccttcctcctgcctttctcaactgtcccaaggagggggcctcattgtgtctcccgtgcatgctctgcagcattgaagtatggtgtgttcacgtagttctagcagtccccagctgagtgagtgggagagtacctgtgtgtttcgtaacggccttgatccccttgatagatgtttggatattttttggtgtgccctgtgtgtgtgtgtgtacaaatacatgtgtatattccttttaaagaagctttatcgaacgtggtctgattttgaggtttagcaatagctagctatatatggtaggtgccgctacagtttttatttagcatggggattgcagagtgaccagcacactggactccgaggtggttcagacaagacagaggggagcagtggccatcatcctcccgccaggagcttcttcgttcctgcgcatatagactgtacattatgaagaatacccaggaagactttgtgactgtcacttgctgctttttctgcgcttcagtaacaagtgttggcaaacgagactttctcctggcccctgcctgctggagatcagcatgcctgtcctttcagtctgatccatccatctctctcttgcctgaggggaaagagagatgggccaggcagagaacagaactggaggcagtccatctagggaatgggactgtgaggccatacttgtgaaacgtctggactgctattctagagcttttatttggtgtgttcgttgcacagctgtttgaaatgtttaataaagctttataaacttta

SEQ ID NO: 3579 - DNA, 581 bp, Homo sapiens
  source 1..581: mol_type = unassigned DNA
ttcctgcggcgtcggtggcgagctgaggtggaggcaggctgcggcagacggcgacagtggcggcggcgccatggcagggcttgcaggggcgcgagttgggaaccctctcccacccgaaaccccgtcagacttacctgcagcagcacgcggaagatgtaccagccgatgatgagcagttcagccgaggccgccgccactgccgccatggttccaagaatggatccctgctgccttggtgatcccgggctgacagccagagagcacagcggctcagctcctggagagtgagggttgaagaaagcggagggcagccgcctgcgcccgctggctcccattaggtcggttcctgcagcggtgcccggcagccttggtgaaggccctgcccggcagagatcatgtattgcctccagtggctgctgcccgtcctcctcatccccaagcccctcaaccccgccctgtggttcagccactccatgttcatgggcttctacctgctcagcttcctcctggaacggaagccttgcacaatttgtgccttggttttcctggcagccctgttccttatctgctatagctgctgg

SEQ ID NO: 3580 - DNA, 2205 bp, Homo sapiens
  source 1..2205: mol_type = unassigned DNA
aggatgggtcctcggccggctcgactagaagactaagggggcgtctccccggcttcctgcggcgtcggtggcgagctgaggtggaggcaggctgcggcagacggcgacagtggcggcggcgccatggcagggcttgcaggggcgcgagttgggaaccctctcccacccgaaaccccgtcagacttacctgcagcagcacgcggaagatgtaccagccgatgatgagcagttcagccgaggccgccgccactgccgccatggttccaagaatggatccctgctgccttggtgatcccgggctgacagccagagagcacagcggctcagctcctggagagtgagggttgaagaaagcggagggcagccgcctgcgcccgctggctcccattaggtcggttcctgcagcggtgcccggcagccttggtgaaggccctgcccggcagagatcatgtattgcctccagtggctgctgcccgtcctcctcatccccaagcccctcaaccccgccctgtggttcagccactccatgttcatgggcttctacctgctcagcttcctcctggaacggaagccttgcacaatttgtgccttggttttcctggcagccctgttccttatctgctatagctgctggggaaactgtttcctgtaccactgctccgattccccgcttccagaatcggcgcatgatcccggcgttgtgggcacctaacggcctgccctgttagctttccaaggaagcagaagacgggaggggaggcattgacataggtcataaagcattggagtttcaaatcccgcagcctcgcgggtgtcacattcctgacggcgcctttttggcctgtgatgttttatccttacaatgtgaataatggcactgaccggtgcttttattgtaaagtcctatagtcgtgggtggtcttgtggttgtgtgtgttctgtccccatctaggtcctggctggccgcatgaccacccctctcgcctcattactgtgaggagtctgggtccatcctggtcagctgccccaatgtgacctggggcagataaaatgccagtctcattgtcacctctgtgacccctccttgtcagggtctccttccttcccagaatgttactgactcctcagtccctcttctggtttccctttatttctcttctacccttttccttttttggggagtacctgtccaagacagggctcatttttgcacttatctcgaatttgaagagattgctgacgcccgagagcctcgctttttcatccttctttccttgttcagcaggctagacagaaacatgtcttgactgttagttgtccacaaatcttcagtattttctccacttcatttttaagaaaggaagcaacagatagatgttgctctttcacctgggtgtctgggctcaagctttcccgcccagcctcacttcctttgcccttcctcctgcctttctcaactgtcccaaggagggggcctcattgtgtctcccgtgcatgctctgcagcattgaagtatggtgtgttcacgtagttctagcagtccccagctgagtgagtgggagagtacctgtgtgtttcgtaacggccttgatccccttgatagatgtttggatattttttggtgtgccctgtgtgtgtgtgtgtacaaatacatgtgtatattccttttaaagaagctttatcgaacgtggtctgattttgaggtttagcaatagctagctatatatggtaggtgccgctacagtttttatttagcatggggattgcagagtgaccagcacactggactccgaggtggttcagacaagacagaggggagcagtggccatcatcctcccgccaggagcttcttcgttcctgcgcatatagactgtacattatgaagaatacccaggaagactttgtgactgtcacttgctgctttttctgcgcttcagtaacaagtgttggcaaacgagactttctcctggcccctgcctgctggagatcagcatgcctgtcctttcagtctgatccatccatctctctcttgcctgaggggaaagagagatgggccaggcagagaacagaactggaggcagtccatctagggaatgggactgtgaggccatacttgtgaaacgtctggactgctattctagagcttttatttggtgtgttcgttgcacagctgtttgaaatgtttaataaagctttataaacttt

SEQ ID NO: 3581 - DNA, 591 bp, Homo sapiens
  source 1..591: mol_type = unassigned DNA
atctgtaggagggatacaggaaggattggcgcccttcgtatgcacggaaggaatgagctctacggagaagtggttggaatatgcttggggatagttttctgctggacaggtcgtttcgacctcagtcttccgctcccctcccccaagccctggatccctgctgccttggtgatcccgggctgacagccagagagcacagcggctcagctcctggagagtgagggttgaagaaagcggagggcagccgcctgcgcccgctggctcccattaggtcggttcctgcagcggtgcccggcagccttggtgaaggccctgcccggcagagatcatgtattgcctccagtggctgctgcccgtcctcctcatccccaagcccctcaaccccgccctgtggttcagccactccatgttcatgggcttctacctgctcagcttcctcctggaacggaagccttgcacaatttgtgccttggttttcctggcagccctgttccttatctgctatagctgctggggaaactgtttcctgtaccactgctccgattccccgcttccagaatcggcgcatgatcccggcgttgtgggcaccta

SEQ ID NO: 3582 - DNA, 588 bp, Homo sapiens
  source 1..588: mol_type = unassigned DNA
ttcctgcggcgtcggtggcgagctgaggtggaggcaggctgcggcagacggcgacagtggcggcggcgccatggcagggcttgcagacttacctgcagcagcacgcggaagatgtaccagccgatgatgagcagttcagccgaggccgccgccactgccgccatggttccaagaatggatccctgctgccttggtgatcccgggctgacagccagagagcacagcggctcagctcctggagagtgagggttgaagaaagcggagggcagccgcctgcgcccgctggctcccattaggtcggttcctgcagcggtgcccggcagccttggtgaaggccctgcccggcagagatcatgtattgcctccagtggctgctgcccgtcctcctcatccccaagcccctcaaccccgccctgtggttcagccactccatgttcatgggcttctacctgctcagcttcctcctggaacggaagccttgcacaatttgtgccttggttttcctggcagccctgttccttatctgctatagctgctggggaaactgtttcctgtaccactgctccgattccccgcttccagaatcgg

SEQ ID NO: 3583 - DNA, 572 bp, Homo sapiens
  source 1..572: mol_type = unassigned DNA
cttaccgcgtaggtcgctaaatgcctgggtgatcgtccgcagcggtcgcccgccgcgccccgagtctttgttccctggcaggcgcgggcgcactagggagggtcagcgcgaggaggacggcgcagggaatgggcagggggcgcgcggtgccggcagcggcacttgggcaggcaaggatcgcggcaatcggaataggacgggtccgggaagcggcaatcgcgacgcagtcttgcgggttctaggggcgcgagttgggaaccctctcccacccgaaaccccgtcagacttacctgcagcagcacgcggaagatgtaccagccgatgatgagcagttcagccgaggccgccgccactgccgccatggttccaagaatggatccctgctgccttggtgatcccgggctgacagccagagagcacagcggctcagctcctggagagtgagggttgaagaaagcggagggcagccgcctgcgcccgctggctcccattaggtcggttcctgcagcggtgcccggcagccttggtgaaggccctgcccggcagagatcatgtattgcctccagtggctg

SEQ ID NO: 3584 - DNA, 2417 bp, Homo sapiens
  source 1..2417: mol_type = unassigned DNA
gacggcgctgactcagcaacgcgaggggggagttttgtccctccgcggaccccgtttctcccagcctcagcctccccgccgccgccgccgccgccgccgccgagccggtttcctttttccggcgctccgggtgcgagagacaggtcgggccccctaggcagcgagccgcagcgcaatcccggcgctcgcccaaggaccctggaagctaccgttaccccgccgggcagcgtgggcgccatgagcagctcgggactgaattcggagaaggtagctgctctgatacagaaactgaattccgacccccagttcgtacttgcccagaatgtcgggaccacccacgacctgctggacatctgtctgaagcgggccacggtgcagcgcgcgcagcatgtgttccagcacgccgtgccccaggagggcaagccaatcaccaaccagaagagctcagggcgatgctggatcttttcttgtctgaatgttatgaggcttccattcatgaaaaagttaaatattgaagaatttgagtttagccaatcttacctgtttttttgggacaaggttgaacgctgttatttcttcttgagtgcttttgtggacacagcccagagaaaggagcctgaggatgggaggctggtgcagtttttgcttatgaaccctgcaaatgatggtggccaatgggatatgcttgttaatattgttgaaaaatatggtgttatccctaagaaatgcttccctgaatcttatacaacagaggcaaccagaaggatgaatgatattctgaatcacaagatgagagaattctgtatacgactgcggaacctggtacacagtggagcaaccaaaggagaaatctcggccacacaggacgtcatgatggaggagatattccgagtggtgtgcatctgtttgggtaatccaccagagacattcacctgggaatatcgagacaaagataaaaattatcagaaaattggccccataacacccttggagttttacagggaacatgtcaagccactcttcaatatggaagataagatttgtttagtgaatgaccctaggccccagcacaagtacaacaaactttacacagtggaatacttaagcaatatggttggagggagaaaaactctatacaacaaccagcccattgacttcctgaaaaagatggttgctgcctccatcaaagatggagaggctgtgtggtttggctgtgatgttggaaaacacttcaatagcaagctgggcctcagtgacatgaatctctatgaccatgagttagtgtttggtgtctccttgaagaacatgaataaagcggagaggctgacttttggtgagtcacttatgacccacgccatgaccttcactgctgtctcagagaaggatgatcaggatggtgctttcacaaaatggagagtggagaattcatggggtgaagaccatggccacaaaggttacctgtgcatgacagatgagtggttctctgagtatgtctacgaagtggtggtggacaggaagcatgtccctgaagaggtgctagctgtgttagagcaggaacccattatcctgccagcatgggaccccatgggagctttggctgagtgatactgccctccagctctttcctccttccatggaacctgacgtagctgcaaaggacagatccagggactgaagccaaagttatgcaagggactgtgtgttgccacaggacacagtcagatttccagtctccaccaggaacctcttcagaaagtgtgctttatgctgaaacagaatactgttaaaggaaaaaaaagaggggggaagatcaggtcatactatctactctcctcatctctaacagctcaggatctcttagcattttaattagatgtaattgtttgtctttaactgtcaaaaagtttggttctgtgtctgtgttttaataagacgagaggacgagcgattgaggtgtatggagagaaaacagacctaatgctccttgttcctagagtagagtggagggagggtggcctaagagttgagctctcggaactgcatgctgctggacagtatcactgtctttcctagatggcagtcactgaattccattttttcaaggtaatttcttgtgcctctaatagcccaagaatgggaggttgatcagatctgacatgattccttcctgttctgaactgtggggtgtgcacatctctgcttgagtcaggtttgagtagaggcttagagacagttgggtgagaacaaccaaaatcttatcatggtctcagtcataatcattagggggaactctagccaaatggtttaacttctgcctgtggaactggggattgggtgggcaggaaaaggtgatatccattctttctgataactagatggtgctgagaagcttttgaataaaaactttgctaaatgag

SEQ ID NO: 3585 - DNA, 1473 bp, Homo sapiens
  source 1..1473: mol_type = unassigned DNA
accgttaccccgccgggcagcgtgggcgccatgagcagctcgggactgaattcggagaaggtagctgctctgatacagaaactgaattccgacccccagttcgtacttgcccagaatgtcgggaccacccacgacctgctggacatctgtctgaagcgggccacggtgcagcgcgcgcagcatgtgttccagcacgccgtgccccaggagggcaagccaatcaccaaccagaagagctcaggttgaacgctgttatttcttcttgagtgcttttgtggacacagcccagagaaaggagcctgaggatgggaggctggtgcagtttttgcttatgaaccctgcaaatgatggtggccaatgggatatgcttgttaatattgttgaaaaatatggtgttatccctaagaaatgcttccctgaatcttatacaacagaggcaaccagaaggatgaatgatattctgaatcacaagatgagagaattctgtatacgactgcggaacctggtacacagtggagcaaccaaaggagaaatctcggccacacaggacgtcatgatggaggagatattccgagtggtgtgcatctgtttgggtaatccaccagagacattcacctgggaatatcgagacaaagataaaaattatcagaaaattggccccataacacccttggagttttacagggaacatgtcaagccactcttcaatatggaagataagatttgtttagtgaatgaccctaggccccagcacaagtacaacaaactttacacagtggaatacttaagcaatatggttggagggagaaaaactctatacaacaaccagcccattgacttcctgaaaaagatggttgctgcctccatcaaagatggagaggctgtgtggtttggctgtgatgttggaaaacacttcaatagcaagctgggcctcagtgacatgaatctctatgaccatgagttagtgtttggtgtctccttgaagaacatgaataaagcggagaggctgacttttggtgagtcacttatgacccacgccatgaccttcactgctgtctcagagaaggatgatcaggatggtgctttcacaaaatggagagtggagaattcatggggtgaagaccatggccacaaaggttacctgtgcatgacagatgagtggttctctgagtatgtctacgaagtggtggtggacaggaagcatgtccctgaagaggtgctagctgtgttagagcaggaacccattatcctgccagcatgggaccccatgggagctttggctgagtgatactgccctccagctctttcctccttccatggaacctgacgtagctgcaaaggacagatccagggactgaagccaaagttatgcaagggactgtgtgttgccacaggacacagtcagatttccagtctccaccaggaacctcttcagaaagtgtgctttatgctgaaacagaatactgttaaagg

SEQ ID NO: 3586 - DNA, 2336 bp, Homo sapiens
  source 1..2336: mol_type = unassigned DNA
gtgcgggtggcggccggcgcgcggtggggcatggcgggttcgcggggtgcggggcgcacggcggcgccgagcgtgcggccggagaagcggcggtctgagcccgaactggagcctgagcccgagccggagccccccctcctctgcacctctcctctcagccacagcaccggcagcgattctggcgtctccgacagcgaggagagtgtgttctcaggcctggaagattccggcagtgacagcagtgaggatgatgacgaaggcgacgaggagggagaggacggagcccttgatgacgagggccacagtgggattaaaaagaccactgaggagcaggtgcaggccagcactccttgcccgaggacagagatggcgagcgcccggattggggatgagtatgcggaggacagctctgatgaggaggacatccggaacacggtgggcaacgtgcccttggagtggtacgatgacttcccccacgtgggctacgacctggatggcaggcgcatctacaagcccctgcggacccgggatgagctggaccagttcctggacaagatggacgatcctgactactggcgcaccgtgcaggacccgatgacagggcgggacctgagactgacggatgagcaggtggccctggtgcggcggctgcagagtggccagtttggggatgtgggcttcaacccctatgagccggctgtcgacttcttcagcggggacgtcatgatccacccggtgaccaaccgcccggccgacaagcgcagcttcatcccctccctggtggagaaggagaaggtctctcgcatggtgcacgccatcaagatgggctggatccagcctcgccggccccgagaccccacccccagcttctatgacctgtgggcccaggaggaccccaacgccgtgctcgggcgccacaagatgcacgtacctgctcccaagctggccctgccaggccacgccgagtcgtacaacccaccccctgaatacctgctcagcgaggaggagcgcttggcgtgggaacagcaggagccaggcgagaggaagctgagctttttgccacgcaagttcccgagcctgcgggccgtgcctgcctacggacgcttcatccaggaacgcttcgagcgctgccttgacctgtacctgtgcccacggcagcgcaagatgagggtgaatgtagaccctgaggacctcatccccaagctgcctcggccgagggacctgcagcccttccccacgtgccaggccctggtctacaggggccacagtgaccttgtccggtgcctcagtgtctctcctgggggccagtggctggtttcaggctctgacgacggctccctgcggctctgggaggtggccactgcccgctgtgtgaggactgttcccgtggggggcgtggtgaagagtgtggcctggaaccccagccccgctgtctgcctggtggctgcagccgtggaggactcggtgctgctgctgaacccagctctgggggaccggctggtggcgggcagcacagatcagctgttgagcgccttcgtcccgcctgaggagccccccttgcagccggcccgctggctggaggcctcagaggaggagcgccaagtgggcctgcggctgcgcatctgccacgggaagccagtgacgcaggtgacctggcacgggcgtggggactacctggccgtggtgctggccacccaaggccacacccaggtgctgattcaccagctgagccgtcgccgcagccagagtccgttccgccgcagccacggacaggtgcagcgagtggccttccaccctgcccggcccttcctgttggtggcgtcccagcgcagcgtccgcctctaccacctgctgcgccaggagctcaccaagaagctgatgcccaactgcaagtgggtgtccagcctggcggtgcaccctgcaggtgacaacgtcatctgtgggagctacgatagcaagctggtgtggtttgacctggatctttccaccaagccatacaggatgctgagacaccacaagaaggctctgcgggctgtggccttccacccgcggtacccactctttgcgtcaggctcggacgacggcagtgtcatcgtctgccatggcatggtgtacaatgaccttctgcagaaccccttgctggtgcccgtcaaggtgctgaagggacacgtgctgacccgagatctgggagtgctggacgtcatcttccaccccacccagccgtgggtcttctcctcgggggcagacgggactgtccgcctcttcacctagctgttctgcctgcctggggctggggtggtcgtgctgaagtcaacagagcctttaccctgtgctgc

SEQ ID NO: 3587 - DNA, 5567 bp, Homo sapiens
  source 1..5567: mol_type = unassigned DNA
gtcgcgatgcctattttagtcaaagcggctgcgggcttggggacccggcccgggcagcggagcttccggacccgccgacccgccgaggagcgcgcgtcgggctcccgtcgagcagctgagcccgtgtgccccgcgtcccgcgccccgaagctgccgctccgaactttggtcggcgctgcccaggctccccgccagggaccagccgggaattttcaaaatgaattatacagagtccagcccattgagagaatcaactgccataggttttacacctgagttagaaagtatcatacctgtgccttccaataagaccacttgtgaaaactggagagagatacatcatctggtttttcatgtagcaaatatttgttttgcagttgggttggttattccaactactcttcaccttcatatgatatttcttaggggaatgttaactctaggatgtaccctttatatcgtctgggccactctctaccgatgtgccttggatataatgatctggaactctgtgttcttgggtgtcaacattttgcatctgtcgtatcttttatacaagaagagaccggtaaagattgaaaaggaactcagtggcatgtaccggcgattgtttgaaccactccgtgtgcctccagatttgttcagaagactaactggacagttttgcatgatccaaaccttgaaaaagggccaaacttatgctgcagaggataaaacctcagttgatgaccgtctgagtattctcttgaagggaaaaatgaaggtctcctatcgaggacattttctgcataacatttacccctgtgcctttatagattctcctgaatttagatcaactcagatgcacaaaggtgaaaaattccaggtcaccattattgcagatgataactgcagatttttatgctggtcaagagaaagattaacatactttctggaatcagaacctttcttgtatgaaatctttaggtatcttattggaaaagacatcacaaataagctctactcattgaatgatcccaccttaaatgataaaaaagccaaaaagctggaacatcagctcagcctctgcacacagatctccatgttggaaatgaggaacagtatagccagctccagtgacagtgacgacggcttgcaccagtttcttcggggtacctccagcatgtcctctcttcatgtgtcatccccacaccagcgagcctctgccaagatgaaaccgatagaagaaggagcagaagatgatgatgacgtttttgaaccggcatctccaaatacattgaaagtccatcagctgccttgatcagagagagaattcaggttaccaagacggaaggtgtcttgaagagatcctgaaaaataccagcactttttcatggcttttaggttattctgctttagtgcatccagactggtggagtcggagggaggaagtgaggaagggtcaaggatggaagagttctttcacttaccctttttattagtcagcttttaaagtaattgttttactgagccttctgactatgccttgttctcttttgagatatatattttcacagtcttttctagatatattattgttttaacttaacaaatcttagcaatctctcaatgccttttcacttatttttttccaagttatgattctttttcctcacagtcttttttgttccatagcaatgaggttgtccatttgataattttaacaaacaatgtaagtttaaaattgaggctaaggtaacatgaaaaagcagggaatctcaaactttattccatatatacacacacacacacacacacacacacacacatacatacatacatatatatatatatatacatatatatacatacacacatacatataattttttttttttttgagatggagtttcactctgtcgcccaggctggagtgtagtggcacattctcagctcactgcaaactccacctcctggattcacgccactctcctgcctcagcctcccgagtagctgggactacaggcacctgccaccgcgcccagctaatttttttgtatttttagtagagatggggtttcactgtgttagccaggatggtctcgatctcctgacctcgtgatccgcccaccttggcctcccagagtgctgggattacaggcgtgagccaccgcgcccggcctattccatatttttttaatgggacattttagagaaaggtgtgatttgactggttttatttttctcccaggccagaagtattactccactagatcaccttacttaattgggcactgtgtggataacttgataatgaacaaaactctcagattttactcacattacccttgtattatgccatttataaactgctctgaaacctgaagctggaaagataacagatgggtttctgagcacggggttaacctccagctaaactcaacttccttgggatttggagtcaccatgttgtgcacactctggtgtgggaaacactttatgtagggtgggaggacaggggagttaaatggctgggcaggtgccacaggatgaggccactgaaagatctgcttcattctttgatctgtattctgaagttccagattgttcatctagaggcagagacatctcttttaaaaaagtgccagatgccccagtgccagagctgcgaacgtgaacacagtggaaggcagagggtttactacaggccaggccatggacaccccacccaggtactgcagtgagggccttgattccagagctctttttcctactgaaatcatggtttagtaaacagtggcatttggctggtgggaaatgcgtaactggtcagtgtgtctggccagcgtggctgtggcacttggccaggacgctccgttgaatgaagctcattgattggccatgctggtcatgtctattttgcttcatccactagaaccaactttgagtcagtctcctgttacgttaaatggctaagaaaagttccaaatgaagttgttctcaggtgaactgagccaaaagaagcaactcttaccatgaggtgatttctgttagaggagacatataaataagctcatctagggtcacctcattttcctaaatatgtttttaaagcaattattgtagtaatttcatttgagttaaatttacatgctcggtcactcattgagaaaatttacacagactctgaatccagttcctgtcatcttcagatgttggtttattgacatcacagtaaaaaggctactgtcgactggacacagtggctcacacatgtaatcacagcactttggggggccaaggtgggtggattgcttaagcccaggagttcaagaccagcctgggcaacatggctaaaccccatctctacaaaaaaaattagctgggtgtggtggtacatacctgtagtcccagctactcagaaggctgaggtgggaggttcacttgaacctgggaggttgaggttgcagtgagcacagatcacaccactgcactccagcctgggcaacagagtgagaccctatttcaaaaaaaggctgctttcactgtactgctgcagcagtctcttcaggtagctaaattaggagcttgttttggagaaatgaagcaaaggtgaatgacagcctaggcttgaaattataaagctctctcaggttgaactctctcgtgcgctctcgctctcactttcgccctgtacctgagagcacaggtgtaactgtgatgtcatagtgccgagactactttcctttaaccattggggttaagttgggcagcccatttagtttacacgcgcataagactaatttacaaaatcactctatacagtcattagatgtaacatccttccctgagtagaaagtaatgcatgtgtttggagattattttctgtaatgctgggaacaaacctgttttaaaagcacactgctaaaagtaggtgatataagaccatttgctgtttttattaaagtatgtgtgtgtatcagtgtctcaatgtgaagattgtaacctcaagattaggaatcttaaaagagccacttagcctgaatgggaaacgtgagactatttttaaacacacacctctaaggaagaagcctcccatatagacttgatctcaaagaagcagataagaagacagaaaagtgttttaagtgtaagatctcctatggagtactttaaattcatttatacaaatgaataagtgtatctttgtataatgcataaatacatagataaaaacatgtttgctgccaaagttcccaataagatgcttcctgtgttttttggcctttacttagctgaatgatcaaagttcagaaaatggtctgcaaaagttactccatatacaaccccaaatctactactttaaatgtaacatcaactcagttgtatgaatctggagtgtaatatttatattagaatgtatatgtcatttaaaatattttgaaagccctcataaatatttatatttactaaactaatagcatagacactatataaatccgcagtgatgcttatatatcttaaattagtaataatgggtgctatataattattttcagttactatccctgacactctggaatcttctccatttctccctatcactcaatttcattttaatcattggacacctttgcgttttgctgctaacagtgtgtgtatgtcaccctctttatatctggttttcccacttgtctgaagctctcctgatcttagaacctggagctgcagattcctccatgtcagctcccatcacggccccaaagacagagtcacttggttgctgagtcacttggttgctggaaaaatctttggggaaagctggtataagctacacactgacctgtccccagtgtttccaggtaatgacttggcactccagagaaagtttcatgctgttgcgtgtggtggctccaagccaagcacctggcatgcaggtcagcccttcccagcgggcgtggcgtcgtcctcttcacagatgccacgttgcagccccaaggcctcaccattttgcgttttttagaaacccattttcttggtcatttataaagctgctttatagatatctttgatcctggcatgccttggtttcctctcccttccctctttccaatcctggtttcctaacctcctcttgtagtaattctcaactcaactcaaagtcccaagaatttggaatggtaggatgctgtgcggggagctcgaggctgaggcataatcactgcttcggttctgctcatcaggggacacgctcccttactcatggcagccatgtttgattgtcacagagccccccgaatactctgtctatagtgacacactgtaggtgtcataaattttaagaaacctgcttttaagtactatttataggtttttctgttatacttgcaacctagttttaaaatacatgaggattttatgaaagctttatacagacatttataggaaactcattctttgattttaggtgccatttaaattgataacacttactttataaaaagatgctttttgtctggatagagccttatagtttaaaatatcttcatatattgccatttgatcaaataaatttcttacttagaaaa

SEQ ID NO: 3588 - DNA, 1663 bp, Homo sapiens
  source 1..1663: mol_type = unassigned DNA
gcggccgccgctcaggtcaggcagccccagcgtccccgggccctcggccccaccgagtgccggctcccgcgctctgcggcggcaagccccttggaattttcaaaatgaattatacagagtccagcccattgagagaatcaactgccataggttttacacctgagttagaaagtatcatacctgtgccttccaataagaccacttgtgaaaactggagagagatacatcatctggtttttcatgtagcaaatatttgttttgcagttgggttggttattccaactactcttcaccttcatatgatatttcttaggggaatgttaactctaggatgtaccctttatatcgtctgggccactctctaccgatgtgccttggatataatgatctggaactctgtgttcttgggtgtcaacattttgcatctgtcgtatcttttatacaagaagagaccggtaaagattgaaaaggaactcagtggcatgtaccggcgattgtttgaaccactccgtgtgcctccagatttgttcagaagactaactggacagttttgcatgatccaaaccttgaaaaagggccaaacttatgctgcagaggataaaacctcagttgatgaccgtctgagtattctcttgaagggaaaaatgaaggtctcctatcgaggacattttctgcataacatttacccctgtgcctttatagattctcctgaatttagatcaactcagatgcacaaaggtgaaaaattccaggtcaccattattgcagatgataactgcagatttttatgctggtcaagagaaagattaacatactttctggaatcagaacctttcttgtatgaaatctttaggtatcttattggaaaagacatcacaaataagctctactcattgaatgatcccaccttaaatgataaaaaagccaaaaagctggaacatcagctcagcctctgcacacagatctccatgttggaaatgaggaacagtatagccagctccagtgacagtgacgacggcttgcaccagtttcttcggggtacctccagcatgtcctctcttcatgtgtcatccccacaccagcgagcctctgccaagatgaaaccgatagaagaaggagcagaagatgatgatgacgtttttgaaccggcatctccaaatacattgaaagtccatcagctgccttgatcagagagagaattcaggttaccaagacggaaggtgtcttgaagagatcctgaaaaataccagcactttttcatggcttttaggttattctgctttagtgcatccagactggtggagtcggagggaggaagtgaggaagggtcaaggatggaagagttctttcacttaccctttttattagtcagcttttaaagtaattgttttactgagccttctgactatgccttgttctcttttgagatatatattttcacagtcttttctagatatattattgttttaacttaacaaatcttagcaatctctcaatgccttttcacttatttttttccaagttatgattctttttcctcacagtcttttttgttccatagcaatgaggttgtccatttgataattttaacaaacaatgtaagtttaaaattgaggctaaggtaacatgaaaaagcagggaatctcaaactttattccatata

SEQ ID NO: 3589 - DNA, 1500 bp, Homo sapiens
  source 1..1500: mol_type = unassigned DNA
ggagagcgccgatggctggggacccgaggtccgcgccacccacccgcaacctccttccccgagcctttgggaacgggttgttggccagacaagtcccagaaactgcctgctttgaagcatgaataagtgcgaaaagactcttagcaatgaattttcaaaatgaattatacagagtccagcccattgagagaatcaactgccataggttttacacctgagttagaaagtatcatacctgtgccttccaataagaccacttgtgaaaactggagagagatacatcatctggtttttcatgtagcaaatatttgttttgcagttgggttggttattccaactactcttcaccttcatatgatatttcttaggggaatgttaactctaggatgtaccctttatatcgtctgggccactctctaccgatgtgccttggatataatgatctggaactctgtgttcttgggtgtcaacattttgcatctgtcgtatcttttatacaagaagagaccggtaaagattgaaaaggaactcagtggcatgtaccggcgattgtttgaaccactccgtgtgcctccagatttgttcagaagactaactggacagttttgcatgatccaaaccttgaaaaagggccaaacttatgctgcagaggataaaacctcagttgatgaccgtctgagtattctcttgaagggaaaaatgaaggtctcctatcgaggacattttctgcataacatttacccctgtgcctttatagattctcctgaatttagatcaactcagatgcacaaaggtgaaaaattccaggtcaccattattgcagatgataactgcagatttttatgctggtcaagagaaagattaacatactttctggaatcagaacctttcttgtatgaaatctttaggtatcttattggaaaagacatcacaaataagctctactcattgaatgatcccaccttaaatgataaaaaagccaaaaagctggaacatcagctcagcctctgcacacagatctccatgttggaaatgaggaacagtatagccagctccagtgacagtgacgacggcttgcaccagtttcttcggggtacctccagcatgtcctctcttcatgtgtcatccccacaccagcgagcctctgccaagatgaaaccgatagaagaaggagcagaagatgatgatgacgtttttgaaccggcatctccaaatacattgaaagtccatcagctgccttgatcagagagagaattcaggttaccaagacggaaggtgtcttgaagagatcctgaaaaataccagcactttttcatggcttttaggttattctgctttagtgcatccagactggtggagtcggagggaggaagtgaggaagggtcaaggatggaagagttctttcacttaccctttttattagtcagcttttaaagtaattgttttactgagccttctgactatgccttgttctcttttgagatatatattttcacagtc

SEQ ID NO: 3590 - DNA, 1877 bp, Homo sapiens
  source 1..1877: mol_type = unassigned DNA
cgccgctcggagccgccgggcaggtcccccagcgctcgcgtctgggcccgccccccgctgcggggcggattgacaggagcccggcggccaatcggacgccgtggggcggggcgaggcggggcggtgcaggccggctcccggcgcggggcgctatttacggcgcggagccggagagacctgggctggcgcgggcgggagctgcggcggatacccttgcgtgctgtggagaccctactctcttcgctgagaacggccgctagcggggactgaaggccgggagcccactcccgacccggggctagcgtgcgtccctagagtcgagcggggcaagggagccagtggccgccgacgggggaccgggaaacttttctgggctcctgggcgcgccctgtagccgcgctccatgctccggcagcggcccgaaacccagccccgccgctgacggcgcccgccgctccgggcagggcccatgccctgcgcgctccgggggtcgtaggctgccgccgagccggggctccggaagccggcgggggcgccgcggccgtgcggggcgtcaatggatcgccactccagctacatcttcatctggctgcagctggagctctgcgccatggccgtgctgctcaccaaaggtgaaattcgatgctactgtgatgctgcccactgtgtagccactggttatatgtgtaaatctgagctcagcgcctgcttctctagacttcttgatcctcagaactcaaattccccactcacccatggctgcctggactctcttgcaagcacgacagacatctgccaagccaaacaggcccgaaaccactctggcaccaccatacccacattggaatgctgtcatgaagacatgtgcaattacagagggctgcacgatgttctctctcctcccaggggtgaggcctcaggacaaggaaacaggtatcagcatgatggtagcagaaaccttatcaccaaggtgcaggagctgacttcttccaaagagttgtggttccgggcagcggtcattgccgtgcccattgctggagggctgattttagtgttgcttattatgttggccctgaggatgcttcgaagtgaaaataagaggctgcaggatcagcggcaacagatgctctcccgtttgcactacagctttcacggacaccattccaaaaaggggcaggttgcaaagttagacttggaatgcatggtgccggtcagtgggcacgagaactgctgtctgacctgtgataaaatgagacaagcagacctcagcaacgataagatcctctcgcttgttcactggggcatgtacagtgggcacgggaagctggaattcgtatgacggagtcttatctgaactacacttactgaacagcttgaaggccttttgagttctgctggacaggagcactttatctgaagacaaactcatttaatcatctttgagagacaaaatgacctctgcaaacagaatcttggatatttcttctgaaggattatttgcacagacttaaatacagttaaatgtgttatttgcttttaaaattataaaaagcaaagagaagactttgtacacactgtcaccagggttatttgcatccaagggagctggaattgagtacctaaataaacaaaaatgtgccctatgtaagcttctacatcttgatttattgtaaagatttaaaagaaatatatatattttgtctgaaatttaatagtgtctttcataaatttaactgggaaacgtgagacagtacatgttaattatacaaatggccatttgctgttaataatttgttctcaactctaggatgtggcttggtttttttttttctcttttcttttttaaacaagaccaagatcttgcttattcttccatg

SEQ ID NO: 3591 - DNA, 1484 bp, Homo sapiens
  source 1..1484: mol_type = unassigned DNA
gctggcgcgggcgggagctgcggcggatacccttgcgtgctgtggagaccctactctcttcgctgagaacggccgctagcggggactgaaggccgggagcccactcccgacccggggctagcgtgcgtccctagagtcgagcggggcaagggagccagtggccgccgacgggggaccgggaaacttttctgggctcctgggcgcgccctgtagccgcgctccatgctccggcagcggcccgaaacccagccccgccgctgacggcgcccgccgctccgggcagggcccatgccctgcgcgctccgggggtcgtaggctgccgccgagccggggctccggaagccggcgggggcgccgcggccgtgcggggcgtcaatggatcgccactccagctacatcttcatctggctgcagctggagctctgcgccatggccgtgctgctcaccaaaggtgaaattcgatgctactgtgatgctgcccactgtgtagccactggttatatgtgtaaatctgagctcagcgcctgcttctctagacttcttgatcctcagaactcaaattccccacacatctgccaagccaaacaggcccgaaaccactctggcaccaccatacccacattggaatgctgtcatgaagacatgtgcaattacagagggctgcacgatgttctctctcctcccaggggtgaggcctcaggacaaggaaacaggtatcagcatgatggtagcagaaaccttatcaccaaggtgcaggagctgacttcttccaaagagttgtggttccgggcagcggtcattgccgtgcccattgctggagggctgattttagtgttgcttattatgttggccctgaggatgcttcgaagtgaaaataagaggctgcaggatcagcggcaacagatgctctcccgtttgcactacagctttcacggacaccattccaaaaaggggcaggttgcaaagttagacttggaatgcatggtgccggtcagtgggcacgagaactgctgtctgacctgtgataaaatgagacaagcagacctcagcaacgataagatcctctcgcttgttcactggggcatgtacagtgggcacgggaagctggaattcgtatgacggagtcttatctgaactacacttactgaacagcttgaaggccttttgagttctgctggacaggagcactttatctgaagacaaactcatttaatcatctttgagagacaaaatgacctctgcaaacagaatcttggatatttcttctgaaggattatttgcacagacttaaatacagttaaatgtgttatttgcttttaaaattataaaaagcaaagagaagactttgtacacactgtcaccagggttatttgcatccaagggagctggaattgagtacctaaataaacaaaaatgtgccctatgtaagcttctacatcttgatttattgtaaagatttaaaagaaatatatatattttgtctg

SEQ ID NO: 3592 - DNA, 5031 bp, Homo sapiens
  source 1..5031: mol_type = unassigned DNA
ggacagtggagacgcgccttctcggctctggtccgcgccctggggccctggcctccctggaggggctggggaactggaagctgggccgagagagttcccgctgcagctatcgcgcagtccctcctgcgcccgggcgcccccagcgggttccgggaggcgcccggtgagcccacgtctgttgcggcggagcgagcgcgctccgggagggccgagagccggcggggctggcaggagctctcgggcgcccgcctccctccttcgcggacggtctcccgacacgccggctgagagcccttttcgactgtgagctgcggcagctgagcagaggcggcggcgcgggacctgcagtcgccagggattccctccaggtgacgatgctctggttctccggcgtcggggctctggctgagcgttactgccgccgctcgcctgggattacgtgctgcgtcttgctgctactcaattgctcgggggtccccatgtctctggcttcctccttcttgacaggttctgttgcaaaatgtgaaaatgaaggtgaagtcctccagattccatttatcacagacaacccttgcataatgtgtgtctgcttgaacaaggaagtgacatgtaagagagagaagtgccccgtgctgtcccgagactgtgccctggccatcaagcagaggggagcctgttgtgaacagtgcaaaggttgcacctatgaaggaaatacctataacagctccttcaaatggcagagcccggctgagccttgtgttctacgccagtgccaggagggcgttgtcacagagtctggggtgcgctgtgttgttcattgtaaaaaccctttggagcatctgggaatgtgctgccccacatgtccaggctgtgtgtttgagggtgtgcagtatcaagaaggggaggaatttcagccagaaggaagcaaatgtaccaagtgttcctgcactggaggcaggacacaatgtgtgagagaagtctgtcccattctctcctgtccccagcaccttagtcacatacccccaggacagtgctgccccaaatgtttgggtcagaggaaagtgtttgacctcccttttgggagctgcctctttcgaagtgatgtttatgacaatggatcctcatttctgtacgataactgcacagcttgtacctgcagggactctactgtggtttgcaagaggaagtgctcccaccctggtggctgtgaccaaggccaggagggctgttgtgaagagtgcctcctacgagtgcccccagaagacatcaaagtatgcaaatttggcaacaagattttccaggatggagagatgtggtcctctatcaattgtaccatctgtgcttgtgtgaaaggcaggacggagtgtcgcaataagcagtgcattcccatcagtagctgcccacagggcaaaattctcaacagaaaaggatgctgtcctatttgcactgaaaagcccggcgtttgcacggtgtttggagatccccactacaacacttttgacggtcggacatttaactttcaggggacgtgtcagtacgttttgacaaaagactgctcctcccctgcctcgcccttccaggtgctggtgaagaacgacgcccgccggacacgctccttctcgtggaccaagtcggtggagctggtgctgggcgagagcagggtcagcctgcagcagcacctcaccgtgcgctggaacggctcgcgcatcgcgctcccctgccgcgcgccacacttccacatcgacctggatggctacctcttgaaagtgaccaccaaagcaggtttggaaatatcttgggatggagacagttttgtagaagtcatggctgcgccgcatctcaagggcaagctctgtggtctttgtggcaactacaatggacataaacgtgatgacttaattggtggagatggaaacttcaagtttgatgtggatgactttgctgaatcttggagggtggagtccaatgagttctgcaacagacctcagagaaagccagtgcctgaactgtgtcaagggacagtcaaggtaaagctccgggcccatcgagaatgccaaaagctcaaatcctgggagtttcagacctgccactcgactgtggactacgccactttctaccggtcctgtgtgacagacatgtgtgaatgtccagtccataaaaactgttattgcgagtcatttttggcatatacccgggcctgccagagagagggcatcaaagtccactgggagcctcagcagaattgtgcagccacccagtgtaagcatggtgctgtgtacgatacctgtggtccgggatgtatcaagacgtgtgacaactggaatgaaattggtccatgcaacaagccgtgcgttgctgggtgccactgtccagcaaacttggtccttcacaagggaaggtgcatcaagccagtcctttgtccccagcggtgacctttgtttcgatccttaagactctgaaatctggtgactttgacactgaagcggaagagccaatgaaggactgcagtatttgtgtgcccgattctgtaaacacacacacacagagtatatatgtgtatatatatatagatatattcaaaaacattgcatcatttatatgaactatagggggattattatatgtatattttttgctataagacatgtattgtttctaggatcctaacctgtaagccattgaacatgttgtataaatacaccaggtgtttttaatttaataaggtggcatgcagatacattggatagtgttaacatcacatacatttgtcatttttaaggaagttttctaagagccctcaattgcctgcctgtattaattttagttttgagtcaggatttgtaatggagtgggaaatgtgtttctctggagaagggcacatttatctaggggcatttcaggtttccaaagaaaggaatgtatgcctgggaaagacagcaggagattggtgaccggccctaatggtgcatgaaaagcgagtgataggctgttagaatgtattaggtcatgggctaacattatttccaaaattgattggctggttgccaagaaatatatatttgtcactagggcataaccgaagaatcaagtgatttcttgccatccttgcgtagtcctcaagtcttctaatcatctatgtgtgtatgatggatgtgaccatttatatgtcatgtgttgaaattaaagggtgtctggatgccatgttaattttattgagcatgagaaagtatttgaagaaactgttgcacaacatatgatgaaattttgatttctctgaatctcagagtaatttaagatgggcaaatccaatgagttgatgtaacccatctacattttgtggctatttcatgtataaaatgaaaggctttagttatttctagaggagtcccatccaacactatttggcgactgttaatatgttataattattagacagtggaaaagcctttattgactaattgatttaacctcagtccaaagaacagtctctatacttgccctcatttactgataggctgctactagttaccatttgattgtcttgactttcgtcttcagttgaattggtgaaaacatcaacaaaaacaaaacccactgtgtcttaaaataaaatgttctgcattgtagtcaataaagggcttaagatgtaaaacaatgcattttctctctcaagatgtcctgtgttatactttacaattagttgtatcaacttcagattcattaaattttaacagctgtatttagttataatttttgtatcttacaacagtatatataaagactattattaatagacaaaagcaaacccacgtttttgacaagccagcatattgccaatgctcgtcaaagacatttatgtttcttttacattcatgacagctaaagtattaacttggaatttttttttttttttttgactggaaaatccctagttgtttgaattaactgaataaagtgcagggcgtaatagtgactggctgggggcactgggcctttgtgttttttttcattcctgtgtttggatactaatcaccctcgtatctgcagcctgaggtagtcaggtcattgtttcaatgctgcccttggaaagaagactttgacttaggtgctttgggatctaagtgtggtttgtgactatccccattatttaagcatttgggggtctcacttttgcttatctgtaacacaaagaggccatgtagtatagtgagcagggttgagaatcgggaaaactagacccctgccactaacaggctaggagactttgggcagtaatgggaggcactgagggtttgcaaatactttcctacttgtaatctcattgattccctgctctgccctgacaggaggggtagggaaaatcagttgacgttgcctggtggttcctaccttctgtaaaacgaacagattccttaagattagctttaaatcccttttcagttcactgttggttctcatctttgaaagagggcagcataagggaaatgatggagaagggagaattgtggatggttatttatagctcatgattcatccaaggactgagttattctccccatgaggctaaccggcctctttcccaacacttaatcatggcagccaggatgggtgaatgatgaaagctcttctgcatgagccggtttcatcatcttgggtgggttgattacaagtttgtgtggcattcctttagctggggattagcttaatctctgtacatttttctcatttctaattgaagaagaaagggagggcagagaggacagaaaattacttgggtttactaattcaaagagccatctctgatgggagagggtgaggaaatcagctgaatggttggcctgcatattcttttttaggccacaggctacagctgagcaatggcttagtctaatgattgggcacaatgaggatttaccaagtgcttcaatgagagcagtcctgtttcattcacatgggatgttttcaattggttcttcaactaagctcttgcagagtgagatgacttgaaataaaaatgttctatgaatattg

SEQ ID NO: 3593 - DNA, 3399 bp, Homo sapiens
  source 1..3399: mol_type = unassigned DNA
gcggacggtctcccgacacgccggctgagagcccttttcgactgtgagctgcggcagctgagcagaggcggcggcgcgggacctgcagtcgccagggattccctccaggtgacgatgctctggttctccggcgtcggggctctggctgagcgttactgccgccgctcgcctgggattacgtgctgcgtcttgctgctactcaattgctcgggggtccccatgtctctggcttcctccttcttgacaggttctgttgcaaaatgtgaaaatgaaggtgaagtcctccagattccatttatcacagacaacccttgcataatgtgtgtctgcttgaacaaggaagtgacatgtaagagagagaagtgccccgtgctgtcccgagactgtgccctggccatcaagcagaggggagcctgttgtgaacagtgcaaaggttgcacctatgaaggaaatacctataacagctccttcaaatggcagagcccggctgagccttgtgttctacgccagtgccaggagggcgttgtcacagagtctggggtgcgctgtgttgttcattgtaaaaaccctttggagcatctgggaatgtgctgccccacatgtccaggctgtgtgtttgagggtgtgcagtatcaagaaggggaggaatttcagccagaaggaagcaaatgtaccaagtgttcctgcactggaggcaggacacaatgtgtgagagaagtctgtcccattctctcctgtccccagcaccttagtcacatacccccaggacagtgctgccccaaatgtttgggtcagaggaaagtgtttgacctcccttttgggagctgcctctttcgaagtgatgtttatgacaatggatcctcatttctgtacgataactgcacagcttgtacctgcagggactctactgtggtttgcaagaggaagtgctcccaccctggtggctgtgaccaaggccaggagggctgttgtgaagagtgcctcctacgagtgcccccagaagacatcaaagtatgcaaatttggcaacaagattttccaggatggagagatgtggtcctctatcaattgtaccatctgtgcttgtgtgaaaggcaggacggagtgtcgcaataagcagtgcattcccatcagtagctgcccacagggcaaaattctcaacagaaaaggatgctgtcctatttgcactgaaaagcccggcgtttgcacggtgtttggagatccccactacaacacttttgacggtcggacatttaactttcaggggacgtgtcagtacgttttgacaaaagactgctcctcccctgcctcgcccttccaggtgctggtgaagaacgacgcccgccggacacgctccttctcgtggaccaagtcggtggagctggtgctgggcgagagcagggtcagcctgcagcagcacctcaccgtgcgctggaacggctcgcgcatcgcgctcccctgccgcgcgccacacttccacatcgacctggatggctacctcttgaaagtgaccaccaaagcaggtttggaaatatcttgggatggagacagttttgtagaagtcatggctgcgccgcatctcaagggcaagctctgtggtctttgtggcaactacaatggacataaacgtgatgacttaattggtggagatggaaacttcaagtttgatgtggatgactttgctgaatcttggagggtggagtccaatgagttctgcaacagacctcagagaaagccagtgcctgaactgtgtcaagggacagtcaaggtaaagctccgggcccatcgagaatgccaaaagctcaaatcctgggagtttcagacctgccactcgactgtggactacgccactttctaccggtcctgtgtgacagacatgtgtgaatgtccagtccataaaaactgttattgcgagtcatttttggcatatacccgggcctgccagagagagggcatcaaagtccactgggagcctcagcagaattgtgcagccacccagtgtaagcatggtgctgtgtacgatacctgtggtccgggatgtatcaagacgtgtgacaactggaatgaaattggtccatgcaacaagccgtgcgttgctgggtgccactgtccagcaaacttggtccttcacaagggaaggtgcatcaagccagtcctttgtccccagcggtgacctttgtttcgatccttaagactctgaaatctggtgactttgacactgaagcggaagagccaatgaaggactgcagtatttgtgtgcccgattctgtaaacacacacacacagagtatatatgtgtatatatatatagatatattcaaaaacattgcatcatttatatgaactatagggggattattatatgtatattttttgctataagacatgtattgtttctaggatcctaacctgtaagccattgaacatgttgtataaatacaccaggtgtttttaatttaataaggtggcatgcagatacattggatagtgttaacatcacatacatttgtcatttttaaggaagttttctaagagccctcaattgcctgcctgtattaattttagttttgagtcaggatttgtaatggagtgggaaatgtgtttctctggagaagggcacatttatctaggggcatttcaggtttccaaagaaaggaatgtatgcctgggaaagacagcaggagattggtgaccggccctaatggtgcatgaaaagcgagtgataggctgttagaatgtattaggtcatgggctaacattatttccaaaattgattggctggttgccaagaaatatatatttgtcactagggcataaccgaagaatcaagtgatttcttgccatccttgcgtagtcctcaagtcttctaatcatctatgtgtgtatgatggatgtgaccatttatatgtcatgtgttgaaattaaagggtgtctggatgccatgttaattttattgagcatgagaaagtatttgaagaaactgttgcacaacatatgatgaaattttgatttctctgaatctcagagtaatttaagatgggcaaatccaatgagttgatgtaacccatctacattttgtggctatttcatgtataaaatgaaaggctttagttatttctagaggagtcccatccaacactatttggcgactgttaatatgttataattattagacagtggaaaagcctttattgactaattgatttaacctcagtccaaagaacagtctctatacttgccctcatttactgataggctgctactagttaccatttgattgtcttgactttcgtcttcagttgaattggtgaaaacatcaacaaaaacaaaacccactgtgtcttaaaataaaatgttctgcattgtagtcaataaagggcttaagatgtaaaacaatgca

SEQ ID NO: 3594 - DNA, 2499 bp, Homo sapiens
  source 1..2499: mol_type = unassigned DNA
gtgatggtgcctcaaagcagtaactttttgcttagagcttgagagtcaaagttaaggacccacatgtatacttcggctctagcgagtctaaggatgataatatggatacaaaatctattctagaagaacttcttctcaaaagatcacagcaaaagaagaaaatgtcaccaaataattacaaagaacggctttttgttttgaccaaaacaaacctttcctactatgaatatgacaaaatgaaaaggggcagcagaaaaggatccattgaaattaagaaaatcagatgtgtggagaaagtaaatctcgaggagcagacgcctgtagagagacagtacccatttcagattgtctataaagatgggcttctctatgtctatgcatcaaatgaagagagccgaagtcagtggttgaaagcattacaaaaagagataaggggtaacccccacctgctggtcaagtaccatagtgggttcttcgtggacgggaagttcctgtgttgccagcagagctgtaaagcagccccaggatgtaccctctgggaagcatatgctaatctgcatactgcagtcaatgaagagaaacacagagttcccaccttcccagacagagtgctgaagatacctcgggcagttcctgttctcaaaatggatgcaccatcttcaagtaccactctagcccaatatgacaacgaatcaaagaaaaactatggctcccagccaccatcttcaagtaccagtctagcgcaatatgacagcaactcaaagaaaatctatggctcccagccaaacttcaacatgcagtatattccaagggaagacttccctgactggtggcaagtaagaaaactgaaaagtagcagcagcagtgaagatgttgcaagcagtaaccaaaaagaaagaaatgtgaatcacaccacctcaaagatttcatgggaattccctgagtcaagttcatctgaagaagaggaaaacctggatgattatgactggtttgctggtaacatctccagatcacaatctgaacagttactcagacaaaagggaaaagaaggagcatttatggttagaaattcgagccaagtgggaatgtacacagtgtccttatttagtaaggctgtgaatgataaaaaaggaactgtcaaacattaccacgtgcatacaaatgctgagaacaaattatacctggcagaaaactactgttttgattccattccaaagcttattcattatcatcaacacaattcagcaggcatgatcacacggctccgccaccctgtgtcaacaaaggccaacaaggtccccgactctgtgtccctgggaaatggaatctgggaactgaaaagagaagagattaccttgttgaaggagctgggaagtggccagtttggagtggtccagctgggcaagtggaaggggcagtatgatgttgctgttaagatgatcaaggagggctccatgtcagaagatgaattctttcaggaggcccagactatgatgaaactcagccatcccaagctggttaaattctatggagtgtgttcaaaggaataccccatatacatagtgactgaatatataagcaatggctgcttgctgaattacctgaggagtcacggaaaaggacttgaaccttcccagctcttagaaatgtgctacgatgtctgtgaaggcatggccttcttggagagtcaccaattcatacaccgggacttggctgctcgtaactgcttggtggacagagatctctgtgtgaaagtatctgactttggaatgacaaggtatgttcttgatgaccagtatgtcagttcagtcggaacaaagtttccagtcaagtggtcagctccagaggtgtttcattacttcaaatacagcagcaagtcagacgtatgggcatttgggatcctgatgtgggaggtgttcagcctggggaagcagccctatgacttgtatgacaactcccaggtggttctgaaggtctcccagggccacaggctttaccggccccacctggcatcggacaccatctaccagatcatgtacagctgctggcacgagcttccagaaaagcgtcccacatttcagcaactcctgtcttccattgaaccacttcgggaaaaagacaagcattgaagaagaaattaggagtgctgataagaatgaatatagatgctggccagcattttcattcattttaaggaaagtagcaaggcataatgtaatttagctagtttttaatagtgttctctgtattgtctattatttagaaatgaacaaggcaggaaacaaaagattcccttgaaatttagatcaaattagtaattttgtttatgctgctcctgatataacactttccagcctatagcagaagcacattttcagactgcaatatagagactgtgttcatgtgtaaagactgagcagaactgaaaaattacttattggatattcattcttttctttatattgtcattgtcacaacaattaaatatactaccaagta

SEQ ID NO: 3595 - DNA, 2531 bp, Homo sapiens
  source 1..2531: mol_type = unassigned DNA
aggaaaatgtgaaacaatttgcttctggaaacaggacagccggggccgtgttcctgcaacagcagaccaagcaccgcggcggacccaggcaagcacggaacaagctgagacggatgataatatggatacaaaatctattctagaagaacttcttctcaaaagatcacagcaaaagaagaaaatgtcaccaaataattacaaagaacggctttttgttttgaccaaaacaaacctttcctactatgaatatgacaaaatgaaaaggggcagcagaaaaggatccattgaaattaagaaaatcagatgtgtggagaaagtaaatctcgaggagcagacgcctgtagagagacagtacccatttcagattgtctataaagatgggcttctctatgtctatgcatcaaatgaagagagccgaagtcagtggttgaaagcattacaaaaagagataaggggtaacccccacctgctggtcaagtaccatagtgggttcttcgtggacgggaagttcctgtgttgccagcagagctgtaaagcagccccaggatgtaccctctgggaagcatatgctaatctgcatactgcagtcaatgaagagaaacacagagttcccaccttcccagacagagtgctgaagatacctcgggcagttcctgttctcaaaatggatgcaccatcttcaagtaccactctagcccaatatgacaacgaatcaaagaaaaactatggctcccagccaccatcttcaagtaccagtctagcgcaatatgacagcaactcaaagaaaatctatggctcccagccaaacttcaacatgcagtatattccaagggaagacttccctgactggtggcaagtaagaaaactgaaaagtagcagcagcagtgaagatgttgcaagcagtaaccaaaaagaaagaaatgtgaatcacaccacctcaaagatttcatgggaattccctgagtcaagttcatctgaagaagaggaaaacctggatgattatgactggtttgctggtaacatctccagatcacaatctgaacagttactcagacaaaagggaaaagaaggagcatttatggttagaaattcgagccaagtgggaatgtacacagtgtccttatttagtaaggctgtgaatgataaaaaaggaactgtcaaacattaccacgtgcatacaaatgctgagaacaaattatacctggcagaaaactactgttttgattccattccaaagcttattcattatcatcaacacaattcagcaggcatgatcacacggctccgccaccctgtgtcaacaaaggccaacaaggtccccgactctgtgtccctgggaaatggaatctgggaactgaaaagagaagagattaccttgttgaaggagctgggaagtggccagtttggagtggtccagctgggcaagtggaaggggcagtatgatgttgctgttaagatgatcaaggagggctccatgtcagaagatgaattctttcaggaggcccagactatgatgaaactcagccatcccaagctggttaaattctatggagtgtgttcaaaggaataccccatatacatagtgactgaatatataagcaatggctgcttgctgaattacctgaggagtcacggaaaaggacttgaaccttcccagctcttagaaatgtgctacgatgtctgtgaaggcatggccttcttggagagtcaccaattcatacaccgggacttggctgctcgtaactgcttggtggacagagatctctgtgtgaaagtatctgactttggaatgacaaggtatgttcttgatgaccagtatgtcagttcagtcggaacaaagtttccagtcaagtggtcagctccagaggtgtttcattacttcaaatacagcagcaagtcagacgtatgggcatttgggatcctgatgtgggaggtgttcagcctggggaagcagccctatgacttgtatgacaactcccaggtggttctgaaggtctcccagggccacaggctttaccggccccacctggcatcggacaccatctaccagatcatgtacagctgctggcacgagcttccagaaaagcgtcccacatttcagcaactcctgtcttccattgaaccacttcgggaaaaagacaagcattgaagaagaaattaggagtgctgataagaatgaatatagatgctggccagcattttcattcattttaaggaaagtagcaaggcataatgtaatttagctagtttttaatagtgttctctgtattgtctattatttagaaatgaacaaggcaggaaacaaaagattcccttgaaatttagatcaaattagtaattttgtttatgctgctcctgatataacactttccagcctatagcagaagcacattttcagactgcaatatagagactgtgttcatgtgtaaagactgagcagaactgaaaaattacttattggatattcattcttttctttatattgtcattgtcacaacaattaaatatactaccaagtacagaaatgtgga

SEQ ID NO: 3596 - DNA, 2598 bp, Homo sapiens
  source 1..2598: mol_type = unassigned DNA
atgaacatacatcacaatgtgaacagtggtcatctccagatagtagaatttcagatatgtttctttccatttttctgacagtttgaattttctgtaataattaattgacttttatacaatggaaacaacttttttgttttggaaaaaagaaagatgctgccgctaatcagtggatgaaagatgataatatggatacaaaatctattctagaagaacttcttctcaaaagatcacagcaaaagaagaaaatgtcaccaaataattacaaagaacggctttttgttttgaccaaaacaaacctttcctactatgaatatgacaaaatgaaaaggggcagcagaaaaggatccattgaaattaagaaaatcagatgtgtggagaaagtaaatctcgaggagcagacgcctgtagagagacagtacccatttcagattgtctataaagatgggcttctctatgtctatgcatcaaatgaagagagccgaagtcagtggttgaaagcattacaaaaagagataaggggtaacccccacctgctggtcaagtaccatagtgggttcttcgtggacgggaagttcctgtgttgccagcagagctgtaaagcagccccaggatgtaccctctgggaagcatatgctaatctgcatactgcagtcaatgaagagaaacacagagttcccaccttcccagacagagtgctgaagatacctcgggcagttcctgttctcaaaatggatgcaccatcttcaagtaccactctagcccaatatgacaacgaatcaaagaaaaactatggctcccagccaccatcttcaagtaccagtctagcgcaatatgacagcaactcaaagaaaatctatggctcccagccaaacttcaacatgcagtatattccaagggaagacttccctgactggtggcaagtaagaaaactgaaaagtagcagcagcagtgaagatgttgcaagcagtaaccaaaaagaaagaaatgtgaatcacaccacctcaaagatttcatgggaattccctgagtcaagttcatctgaagaagaggaaaacctggatgattatgactggtttgctggtaacatctccagatcacaatctgaacagttactcagacaaaagggaaaagaaggagcatttatggttagaaattcgagccaagtgggaatgtacacagtgtccttatttagtaaggctgtgaatgataaaaaaggaactgtcaaacattaccacgtgcatacaaatgctgagaacaaattatacctggcagaaaactactgttttgattccattccaaagcttattcattatcatcaacacaattcagcaggcatgatcacacggctccgccaccctgtgtcaacaaaggccaacaaggtccccgactctgtgtccctgggaaatggaatctgggaactgaaaagagaagagattaccttgttgaaggagctgggaagtggccagtttggagtggtccagctgggcaagtggaaggggcagtatgatgttgctgttaagatgatcaaggagggctccatgtcagaagatgaattctttcaggaggcccagactatgatgaaactcagccatcccaagctggttaaattctatggagtgtgttcaaaggaataccccatatacatagtgactgaatatataagcaatggctgcttgctgaattacctgaggagtcacggaaaaggacttgaaccttcccagctcttagaaatgtgctacgatgtctgtgaaggcatggccttcttggagagtcaccaattcatacaccgggacttggctgctcgtaactgcttggtggacagagatctctgtgtgaaagtatctgactttggaatgacaaggtatgttcttgatgaccagtatgtcagttcagtcggaacaaagtttccagtcaagtggtcagctccagaggtgtttcattacttcaaatacagcagcaagtcagacgtatgggcatttgggatcctgatgtgggaggtgttcagcctggggaagcagccctatgacttgtatgacaactcccaggtggttctgaaggtctcccagggccacaggctttaccggccccacctggcatcggacaccatctaccagatcatgtacagctgctggcacgagcttccagaaaagcgtcccacatttcagcaactcctgtcttccattgaaccacttcgggaaaaagacaagcattgaagaagaaattaggagtgctgataagaatgaatatagatgctggccagcattttcattcattttaaggaaagtagcaaggcataatgtaatttagctagtttttaatagtgttctctgtattgtctattatttagaaatgaacaaggcaggaaacaaaagattcccttgaaatttagatcaaattagtaattttgtttatgctgctcctgatataacactttccagcctatagcagaagcacattttcagactgcaatatagagactgtgttcatgtgtaaagactgagcagaactgaaaaattacttattggatattcattcttttctttatattgtcattgtcacaacaattaaatatactaccaagtacagaaatgtgga

SEQ ID NO: 3597 - DNA, 1372 bp, Homo sapiens
  source 1..1372: mol_type = unassigned DNA
agacgccccggctcggagtcccagggccacagccgaaactcgccctcccgcgcccctctccggcttgcagcgcccgcccgcaccgccacctgccacccgaggcgacgcagtccgcttctccccacccgccaggtggcaggttcagggccggggtccgagcctgcttccctgcagctgccacagccaccctcgccgccagggggcgagagtcccaggcaggacaagcagcgctgctgccttggcgtgaaggtggtttcaaactttaggcttcttttccctaccccgcgtctctgaagagcagagaggaagatggaaaccgagtccgggccgcaaacatcaaaccagatgcaaacagattcattatctccatcccctaatcctgtgtcacctgtgcctttgaataacccaacaagtgccccaagatatggaacagtgatccctaatcgcatctttgtaggaggaattgattttaagacaaacgaaagtgatttaagaaaatttttttcccagtatgggtctgtgaaagaagtgaagattgtaaatgacagagctggagtatccaaagggttctagtataatgccagcagctggaacaatgtatctaacaacttcaactggatatccttatacttaccataatggtgttgcttattttcatactccagaggtaacttcggtcccaccgccttggccttcacgttctgtatgtagctcccctgtgatggtagctcagcccatttatcagcaacctgcatatcactaccaggccaccacacagtatttaccaggacagtggcagtggagtgttcctcagccttctgcctcttctgctccattcttatacctgcaaccttctgaggttatttatcaaccagtggaaattgcacaggatggtggatgtgttcctcctccactgtctctgatggaaacttcagttccagagccttattctgatcatggagttcaagcaacatatcaccaggtttatgctccaagtgccatcactatgcctgcgcctgtgatgcagcctgagccaattaaaacagtgtggagcattcattattaagacaattgggcagctctattccagctcaactgatttcttgtccaatgatccttgcgtggccgagatccagcttcaacgaaccagctagaagctgcccgttgtgaaacttagtgttagttaatacctcaccatactcagttattccactataagctgtctaaatttgatgaaatttgctttttcagctgttctacaaaattatttaggtagatgtggcatgttggttttttatgtgctaacctaactgtaatgaccttttctacaacatgttttatccattccataaataataaccacattgggaat

SEQ ID NO: 3598 - DNA, 3135 bp, Homo sapiens
  source 1..3135: mol_type = unassigned DNA
acaccagtcttcggaagtcgcccgtcaaccggcttcttctacctcagtaaagccttaaggtcacctcaacctctcgaaacccaccagtcccagaggccgactcttctcaagtggaggagaggggaaggcgtgcatggagctttgcctgaccgctcgctctctcctccccagccgtctgagagaaggcgagaggggtcccagaaccgagccctcgctccgcacgccccacgcccgccccgctgtgccgtgcgctctgcccctgagacgccccggctcggagtcccagggccacagccgaaactcgccctcccgcgcccctctccggcttgcagcgcccgcccgcaccgccacctgccacccgaggcgacgcagtccgcttctccccacccgccaggtggcaggttcagggccggggtccgagcctgcttccctgcagctgccacagccaccctcgccgccagggggcgagagtcccaggcaggacaagcagcgctgctgccttggcgtgaaggtggtttcaaactttaggcttcttttccctaccccgcgtctctgaagagcagagaggaagatggaaaccgagtccgggccgcaaacatcaaaccagatgcaaacagattcattatctccatcccctaatcctgtgtcacctgtgcctttgaataacccaacaagtgccccaagatatggaacagtgatccctaatcgcatctttgtaggaggaattgattttaagacaaacgaaagtgatttaagaaaatttttttcccagtatgggtctgtgaaagaagtgaagattgtaaatgacagagctggagtatccaaagggtatggtttcgtcacttttgaaacacaagaagatgcacaaaaaattttacaagaggctgaaaaacttaattataaggataagaagctgaacattggtccagcaataagaaaacaacaagtagggatccctcgttctagtataatgccagcagctggaacaatgtatctaacaacttcaactggatatccttatacttaccataatggtgttgcttattttcatactccagaggtaacttcggtcccaccgccttggccttcacgttctgtatgtagctcccctgtgatggtagctcagcccatttatcagcaacctgcatatcactaccaggccaccacacagtatttaccaggacagtggcagtggagtgttcctcagccttctgcctcttctgctccattcttatacctgcaaccttctgaggttatttatcaaccagtggaaattgcacaggatggtggatgtgttcctcctccactgtctctgatggaaacttcagttccagagccttattctgatcatggagttcaagcaacatatcaccaggtttatgctccaagtgccatcactatgcctgcgcctgtgatgcagcctgagccaattaaaacagtgtggagcattcattattaagacaattgggcagctctattccagctcaactgatttcttgtccaatgatccttgcgtggccgagatccagcttcaacgaaccagctagaagctgcccgttgtgaaacttagtgttagttaatacctcaccatactcagttattccactataagctgtctaaatttgatgaaatttgctttttcagctgttctacaaaattatttaggtagatgtggcatgttggttttttatgtgctaacctaactgtaatgaccttttctacaacatgttttatccattccataaataataaccacattgggaatagtgaggtgtcttttattttctctgctttgtgttattttttcttatcaaacaattagatgttatgtttcatattatttgatatttattttcatatttaggataagaatcatttttaattataatacttttaatactttcatatattttacaacagtatactatttaatattaatgacaattctatttttgctttgctgttttgtcatttaatatgcttttgtctaatttttaattcatttattactgttactccttatttaattttgcgtctgccatggttttcagaatctgaatagtatttatacttcttttttataacattttccaaatattagaaataccatcaacatgatcagtattcttgccttttcatgtaatttgactatattaaattttttctccagtgtttgagacaatattgaaatcttcctataacataatttatttggtatcaaattttataaaatatggatccacctttggaattttgataaaagggttcatctctgacatgatcccataacactgactgaaattccaccaaattactgttctttgaatgctttaatccttaaaccttttcttctgatatgcaaccaatatattcaattatatatgtgattaatttttaaaaggacaattgttttcataaaatgcaaaactattttttacaccaaaggaaaattttagattctgattctaaatccgatttttactataaaattggaaaatagatgggaggggtgtcattcattgttcaaaaggtacagaacaaatcataggggtttttaatctctaaaatttctacagtagtacaggaaatattcctctttacattcatttgcagttctttcactgacctcctaattttaggtggagggggcagggggagccataaaagttggtattaccctaataaatctatctctttcctcccctgtttcaaccccacatgtattccatgctcagcagcagcagcagaaatagtaggatatagatcacaaaggtttttctggtgagtcaaatagggtgttttcttttgaaactgtaatgaatatgtttgccagtcaaatggcttcatgagaacagtagaaccttatgaatgtatactagcatacaaggatctcaaatacattaattattctcagttttaggaatgtaaatagattaagtcccacaatgaaatttcagaagtttttgttctgtaagtaaaaaattactaaccactgatgttcaagattttcttttaatagcactatccttgagaaccaaaaagtttatgttttgattttcaaatgttaaacaagatgctaaacaaatcctggactgttaataaaaattaattatgtattattggataaggaatttt

SEQ ID NO: 3599 - DNA, 2838 bp, Homo sapiens
  source 1..2838: mol_type = unassigned DNA
aatcagggagcgccgcgcgagggtggggaccagctgcgcacgaggccagcggcggggtcgctgccgttgaggcttcccgccactgctgctggcggatttgtggggcaaaatttctcgctggctagccttcttttccctcccgcactttggtggggagggggtggatcctcgtttcggtgcccaagttcacgatgacccgagagaactcgaggaagttgtcgccgcggccatttcccccagtgccgcaacttgctggccttggagggggaggagcgccgaggcagtgactgcgacgcaaacatcaaaccagatgcaaacagattcattatctccatcccctaatcctgtgtcacctgtgcctttgaataacccaacaagtgccccaagatatggaacagtgatccctaatcgcatctttgtaggaggaattgattttaagacaaacgaaagtgatttaagaaaatttttttcccagtatgggtctgtgaaagaagtgaagattgtaaatgacagagctggagtatccaaagggtatggtttcgtcacttttgaaacacaagaagatgcacaaaaaattttacaagaggctgaaaaacttaattataaggataagaagctgaacattggtccagcaataagaaaacaacaagtagggatccctcgttctagtataatgccagcagctggaacaatgtatctaacaacttcaactggatatccttatacttaccataatggtgttgcttattttcatactccagaggtaacttcggtcccaccgccttggccttcacgttctgtatgtagctcccctgtgatggtagctcagcccatttatcagcaacctgcatatcactaccaggccaccacacagtatttaccaggacagtggcagtggagtgttcctcagccttctgcctcttctgctccattcttatacctgcaaccttctgaggttatttatcaaccagtggaaattgcacaggatggtggatgtgttcctcctccactgtctctgatggaaacttcagttccagagccttattctgatcatggagttcaagcaacatatcaccaggtttatgctccaagtgccatcactatgcctgcgcctgtgatgcagcctgagccaattaaaacagtgtggagcattcattattaagacaattgggcagctctattccagctcaactgatttcttgtccaatgatccttgcgtggccgagatccagcttcaacgaaccagctagaagctgcccgttgtgaaacttagtgttagttaatacctcaccatactcagttattccactataagctgtctaaatttgatgaaatttgctttttcagctgttctacaaaattatttaggtagatgtggcatgttggttttttatgtgctaacctaactgtaatgaccttttctacaacatgttttatccattccataaataataaccacattgggaatagtgaggtgtcttttattttctctgctttgtgttattttttcttatcaaacaattagatgttatgtttcatattatttgatatttattttcatatttaggataagaatcatttttaattataatacttttaatactttcatatattttacaacagtatactatttaatattaatgacaattctatttttgctttgctgttttgtcatttaatatgcttttgtctaatttttaattcatttattactgttactccttatttaattttgcgtctgccatggttttcagaatctgaatagtatttatacttcttttttataacattttccaaatattagaaataccatcaacatgatcagtattcttgccttttcatgtaatttgactatattaaattttttctccagtgtttgagacaatattgaaatcttcctataacataatttatttggtatcaaattttataaaatatggatccacctttggaattttgataaaagggttcatctctgacatgatcccataacactgactgaaattccaccaaattactgttctttgaatgctttaatccttaaaccttttcttctgatatgcaaccaatatattcaattatatatgtgattaatttttaaaaggacaattgttttcataaaatgcaaaactattttttacaccaaaggaaaattttagattctgattctaaatccgatttttactataaaattggaaaatagatgggaggggtgtcattcattgttcaaaaggtacagaacaaatcataggggtttttaatctctaaaatttctacagtagtacaggaaatattcctctttacattcatttgcagttctttcactgacctcctaattttaggtggagggggcagggggagccataaaagttggtattaccctaataaatctatctctttcctcccctgtttcaaccccacatgtattccatgctcagcagcagcagcagaaatagtaggatatagatcacaaaggtttttctggtgagtcaaatagggtgttttcttttgaaactgtaatgaatatgtttgccagtcaaatggcttcatgagaacagtagaaccttatgaatgtatactagcatacaaggatctcaaatacattaattattctcagttttaggaatgtaaatagattaagtcccacaatgaaatttcagaagtttttgttctgtaagtaaaaaattactaaccactgatgttcaagattttcttttaatagcactatccttgagaaccaaaaagtttatgttttgattttcaaatgttaaacaagatgctaaacaaatcctggactgttaataaaaattaattatgtattattggataaggaatttt

SEQ ID NO: 3600 - DNA, 1270 bp, Homo sapiens
  source 1..1270: mol_type = unassigned DNA
agatctcgaggttgattctcaaggggaggggccagtgagggcacattgctttggaggagtagtttaataaactctctagtgctggaagttttagcaaacggaggagccttcaaacccggcaacagtccccatctaggtgtttccgtaacacatgcggaattattgctagtggaatttcaggctttctttgttgtttaactcaatgcatcgctaattgtttataatgaacttagatgttgcctccacctgagccttgctattgctaacattaaaatattttgtaggcctggcgcgatggctcccgcctgtaatcccagcactttgggaggccaaggtgggcggatcacgaggtcaggagatcgagaccatcctggccaaaatgcaaacatcaaaccagatgcaaacagattcattatctccatcccctaatcctgtgtcacctgtgcctttgaataacccaacaagtgccccaagatatggaacagtgatccctaatcgcatctttgtaggaggaattgattttaagacaaacgaaagtgatttaagaaaatttttttcccagtatgggtctgtgaaagaagtgaagattgtaaatgacagagctggagtatccaaagggtatggtttcgtcacttttgaaacacaagaagatgcacaaaaaattttacaagaggctgaaaaacttaattataaggataagaagctgaacattggtccagcaataagaaaacaacaagtagggatccctcgttctagtataatgccagcagctggaacaatgtatctaacaacttcaactggatatccttatacttaccataatggtgttgcttattttcatactccagaggtaacttcggtcccaccgccttggccttcacgttctgtatgtagctcccctgtgatggtagctcagcccatttatcagcaacctgcatatcactaccaggccaccacacagtatttaccaggacagtggcagtggagtgttcctcagccttctgcctcttctgctccattcttatacctgcaaccttctgaggttatttatcaaccagtggaaattgcacaggatggtggatgtgttcctcctccactgtctctgatggaaacttcagttccagagccttattctgatcatggagttcaagcaacatatcaccaggtttatgctccaagtgccatcactatgcctgcgcctgtgatgcagcctgagccaattaaaacagtgtggagcattcattattaagacaattgggcagctctattc

SEQ ID NO: 3601 - DNA, 811 bp, Homo sapiens
  source 1..811: mol_type = unassigned DNA
agtcctggccctgagcgggaatcgcagtggccgaggctgagcggcaggtagaaggggcgtctccggggcttcacagggaacacaggggcttcggcccaaccacaactggaggtcgaattcaccacgtcacgtagagaaaaggggcggtgtctcgggtctccccgtgtggcatcaaggcgggctccctataggagctggtgtggacgtccgggcgtggggttagggcggatgcggggatcgcggggcgggtgttgacattgtgctctcaccaggcggatcgccccgaccctcactcctggcgtctgagtctctggcgtagcccatgctgagtgggcggctggtcctgggtctggtctccatggctggccgcgtttgtttgtgccagggcagcgcgggatccggggccatcggtccggtggaggccgccattcgcacgaagttggaggaggccctgagccccgaggtgctagagcttcgcaacgagagcggtggccacgcggtcccgcctggcagtgagactcacttccgcgtggctgtggtgagctctcgtttcgagggactgagccccctacaacgacaccggctggtccacgcagcgctggccgaggagctgggaggtccggtccatgcgctggccatccaggcacggacccccgcccagtggagagagaactctcagctggacactagccccccatgcctgggtgggaacaagaaaactctaggaaccccctgaaccccaagagagggaggaccaggatccgaatgggctgggtgagcacgaattaccgaggccttccctttgatacag

SEQ ID NO: 3602 - DNA, 859 bp, Homo sapiens
  source 1..859: mol_type = unassigned DNA
aggactgcattttgctccggagcgtccagagtcctggccctgagcgggaatcgcagtggccgaggctgagcggcaggcggatcgccccgaccctcactcctggcgtctgagtctctggcgtagcccatgctgagtgggcggctggtcctgggtctggtctccatggctggccgcgtttgtttgtgccagggcagcgcgggatccggggccatcggtccggtggaggccgccattcgcacgaagttggaggaggccctgagccccgaggtgctagagcttcgcaacgagagcggtggccacgcggtcccgcctggcagtgagactcacttccgcgtggctgtggtgagctctcgtttcgagggactgagccccctacaacgacaccggctggtccacgcagcgctggccgaggagctgggaggtccggtccatgcgctggccatccaggcacggacccccgcccagtggagagagaactctcagctggacactagccccccatgcctgggtgggaacaagaaaactctaggaaccccctgaaccccaagagagggaggaccaggatccgaatgggctgggtgagcacgaattaccgaggccttccctttgatacagtccaggatttgtaagggatgaagacccctgggccccattctgttggggtccatacatactctccgaagatagcaacttgcttcaggtcaaagtgaacccgagaaaagagaagaatcactcactactgctcttgccctggactattcaggaagggcagcccggatgttccatgttaaatcgtgacagaattgcaccagacctgatgagttggaaacaatcctatacattaaaagaaattacacta

SEQ ID NO: 3603 - DNA, 1137 bp, Homo sapiens
  source 1..1137: mol_type = unassigned DNA
ggttctgagcgttgtctgtgtttaaccttgatttcagccttgcctccctgctttccgcgtcctgacattacggctaaaattgcagttacagcttcttttacaaggagaagaatgtggaaagaataaccaatttgatgtaatttataagagctaccgggaggggtgaagggaagtcgtttgattggctaaaagcggagccgtatctaacagccaatagaaaagcagaaagccgcctcttggtttgcgtcctgcactgaaaggaaatgacggattttactttctgaccaccttaccagtggggagaatccgagactacagttcccatgagccctcagggcaccacgtggtgcctgcccgtgctaccaacgcgcagcgaggactccatttcccagcgtgcctcaggaagggcgccaggactgcattttgctccggagcgtccagagtcctggccctgagcgggaatcgcagtggccgaggctgagcggcagctggaggtcgaattcaccacgtcacgtagagaaaaggggcggtgtctcgggtctccccgtgtggcatcaaggcgggctccctataggagctggtgtggacgtccgggcgtggggttagggcggatgcggggatcgcggggcgggtgttgacattgtgctctcaccaggcggatcgccccgaccctcactcctggcgtctgagtctctggcgtagcccatgctgagtgggcggctggtcctgggtctggtctccatggctggccgcgtttgtttgtgccagggcagcgcgggatccggggccatcggtccggtggaggccgccattcgcacgaagttggaggaggccctgagccccgaggtgctagagcttcgcaacgagagcggtggccacgcggtcccgcctggcagtgagactcacttccgcgtggctgtggtgagctctcgtttcgagggactgagccccctacaacgacaccggctggtccacgcagcgctggccgaggagctgggaggtccggtccatgcgctggccatccaggcacggacccccgcccagtggagagagaactctcagctggacactagccccccatgcctgggtgggaacaagaaaactctaggaaccccctgaaccccaagagagggagga

SEQ ID NO: 3604 - DNA, 1012 bp, Homo sapiens
  source 1..1012: mol_type = unassigned DNA
cttcctcccggcacagaaggcctccccctctcaccagggccctcgcccgctggtccgccaggccccgccttttttgcggcccccattgtgctgctggacccgacgagcagtgttgacagtgaaccccacgtagacgcggccccggtaccgggggttcaggcagtagagcaggtagacgccgaaaaagcgccctggcctcgccgcgacccccgcgggacccatcgggccttggggttcgggaaccacagcagggggttgattgccgtgacctagggtccaggggagggctggatcgctagggctgcagggtgcttgcttcggaacaagctctcggggactatccggaggcagcctgcaggaagccgtagcgccggtacgtgcccctctcctgtctggaggcgggtgtagaagtccgaccgcggaagccagactgctgtccagtcggcgagcgcgtaccattcagcatcggctccgcccgagtcccaccttcctcaggctctgattggctgacacatggcaagcgcgaaaagcctggaccgctggaaagcccggctgcttgagggcggaagtactgcgttgacgtacgccttagtaagggcggaagtgagttttccagcggaagtggctcctgtaaggcagcaaggtagcgtggccggcgcccgagctggggttgtgtccctgctgggctgccgttccagctggactgccgccatggaactcagcgccgaatacctccgcgagaagctgcagcgggacctggaggcggagcatgtggaggtggaggacacgaccctcaaccgttgctcctgtagcttccgagtcctggtggtgtcggccaagttcgaggggaaaccgctgcttcagagacacaggctggtgaacgcgtgcctagcagaagagctcccgcacatccatgcctttgaacagaaaaccctgaccccagaccagtgggcacgtgagcgacagaaatgagggactgggatctgcacagccattaaattataaatctgga

SEQ ID NO: 3605 - DNA, 444 bp, Homo sapiens
  source 1..444: mol_type = unassigned DNA
gacctcgggcggcgggtcacgtcggccgggcatggctgcatggagcccggccgcggcagcgcctctcctccgcgggatccgcgggcttccacttcaccatcggatgtttgccactcagactgagggggagctcagagtgacccaaattctcaaagaaaagtttccacgagctacagctataaaagtcactgacatttcaggcactaaaagaagaaatcaaagagatgcatggattgcggatatttacctctgtccccaaacgctgaccacgccctggctgcatagatgctgctgcttaagaccttggatgaacttcactgacatcattcttccctaagcagtcaccaaaaaatttatatattttgctcatatacatttccatattataattatagaagatgtataatctatttagatgttaattaaaggaaacaaacaactgaa

SEQ ID NO: 3606 - DNA, 639 bp, Homo sapiens
  source 1..639: mol_type = unassigned DNA
ggaggctgacggcctccgggcggcagggggcggcctctcccacggcggcggctctcggtcccccgctccgcgtctttcgggcatacagtgacctcgggcggcgggtcacgtcggccgggcatggctgcatggagcccggccgcggcagcgcctctcctccgcgggatccgcgggcttccacttcaccatcggatgtttgccactcagactgagggggagctcagagtgacccaaattctcaaagaaaagtttccacgagctacagctataaaagtcactgacatttcaggaggttgtggggcgatgtatgaaattaaaattgaatcagaagaatttaaggagaagagaactgtccagcagcaccagatggttaatcaggcactaaaagaagaaatcaaagagatgcatggattgcggatatttacctctgtccccaaacgctgaccacgccctggctgcatagatgctgctgcttaagaccttggatgaacttcactgacatcattcttccctaagcagtcaccaaaaaatttatatattttgctcatatacatttccatattataattatagaagatgtataatctatttagatgttaattaaaggaaacaaacaactgaagcttttgaagggtcatt

SEQ ID NO: 3607 - DNA, 2833 bp, Homo sapiens
  source 1..2833: mol_type = unassigned DNA
ctccacctcctactcttcagtgccagatgggtaagcatttagccaagcatgctgggagacacacagaactgaagcaaaggagtatctggatgtcttggattttcttcccattctgttctgttctgttctcctaataccatctcgttactagacgtaggcattggacgtgacaatcaactgcatttgaactgagaagaagaaatattaaagacacagtcttcagaagaaatggctcaaaggcagcctcactcacctaatcagactttaatttcaatcacaaatgacacagaatcatcaagctctgtggtttctaacgataacacaaataaaggatggagcggggacaactctccaggaatagaagcattgtgtgccatctatattacttatgctgtgatcatttcagtgggcatccttggaaatgctattctcatcaaagtctttttcaagaccaaatccatgcaaacagttccaaatattttcatcaccagcctggcttttggagatcttttacttctgctaacttgtgtgccagtggatgcaactcactaccttgcagaaggatggctgttcggaagaattggttgtaaggtgctctctttcatccggctcacttctgttggtgtgtcagtgttcacattaacaattctcagcgctgacagatacaaggcagttgtgaagccacttgagcgacagccctccaatgccatcctgaagacttgtgtaaaagctggctgcgtctggatcgtgtctatgatatttgctctacctgaggctatattttcaaatgtatacacttttcgagatcccaataaaaatatgacatttgaatcatgtacctcttatcctgtctctaagaagctcttgcaagaaatacattctctgctgtgcttcttagtgttctacattattccactctctattatctctgtctactattccttgattgctaggaccctttacaaaagcaccctgaacatacctactgaggaacaaagccatgcccgtaagcagattgaatcccgaaagagaattgccagaacggtattggtgttggtggctctgtttgccctctgctggttgccaaatcacctcctgtacctctaccattcattcacttctcaaacctatgtagacccctctgccatgcatttcattttcaccattttctctcgggttttggctttcagcaattcttgcgtaaacccctttgctctctactggctgagcaaaagcttccagaagcattttaaagctcagttgttctgttgcaaggcggagcggcctgagcctcctgttgctgacacctctcttaccaccctggctgtgatgggaacggtcccgggcactgggagcatacagatgtctgaaattagtgtgacctcgttcactgggtgtagtgtgaagcaggcagaggacagattctagcttttcaaggaaaaatgctgcttctcctcccagcgtgtgtatccgactctaagctgtgtgcaggtgtatggtgtccagatttttgttgtttgaaaagtgtgttgaaatcttaggagtgaaggatccctataagtaagtaaaatacaaaccattactttcttcaaagtacaaatagtaatgtcatcgggctttctaaataaaatgaagccccactaagtgcagaaagacaagtttatatatgccagtgaatcgtaagggaagtcaaatgggaaggaaggtgtaataaacaagatgaaacttaaaaatctcatttgttgtttaatcacatctgtgatgcttctaactcctcatatactgtgatttgcataaaattgtgtttgtgtttactgtgtggtgtaaatctagagatactttgtatgtgaaaaggggatcacaaaagagagaaagcatctcttaggctattttcttaaaaataaaccttcacagaatggctgtccttttccattaatctgtattccattgtagctgaatctgtgcagttgaaatgaaaatgttttggagtcagcgaatataaagcactgagtaaggatctggggcacagtgcttgccttactgggtcaacacttacaactgccatggattaataactgggctaagttatcattcacaaatattgttaggaacttgccttattcataggcagaataagtggtcatgtttatggtgtcatttgaggacctctgttgaaaaatctgcaaacctgccacagtgtctgaaattcttcctttacagaaattcgtttctttctggtaagcagtgccctctttctaaaaacatgcagaagtaccatatgaaatccctaacccctgggtgtgcaattgtgatcagatcatcttcctgcttgactttattaaacccaatgggtgcctaagtcctgtaagtgtatggcctaattaatctctgcccatggaaatcagatggaaagttctgattttctatcctgtgctcctacctgctaacatcattcacttgttaataattattgttttaaaaaaaaaaactcttgtcaatagacgtgtcagatttagacctgtggtttcagaaaaatttttggagcaaatttaaacatgtttggcactataggtaaatttgtatttaaaaaaaaaaacaatgtttgagtgtgcttttggtaatgctgagctttctttaaatggcttgtggagtcgtgaacttttgctaatgatgtggctccaaaaggtaatacatattaacattagactttaactttctgtaaaattggtttacttaaagttgggcggggggtgtgatactgtattagtattgttttaaagtggacactgtaacacgtgtggaaaaacaaataaatatgaaataaagttttaaa

SEQ ID NO: 3608 - DNA, 732 bp, Homo sapiens
  source 1..732: mol_type = unassigned DNA
gattgtggctcaccctccatcactcccaggggcccctggcccagcagccgcagctcccaaccacaatatcctttggggtttggcctacggagctggggcggatgacccccaaatagccctggcagattccccctagacccgcccgcaccatggtcaggcatgcccctcctcatcgctgggcacagcccagagggtataaacagtgctggaggctggcggggcaggccagctgagtcctgagcagcagcccagcgcagccaccgagacaccatgagagccctcacactcctcgccctattggccctggccgcactttgcatcgctggccaggcaggtgcgaagcccagcggtgcagagtccagcaaaggtgcagcctttgtgtccaagcaggagggcagcgaggtagtgaagagacccaggcgctacctgtatcaatggctgggagccccagtcccctacccggatcccctggagcccaggagggaggtgtgtgagctcaatccggactgtgacgagttggctgaccacatcggctttcaggaggcctatcggcgcttctacggcccggtctagggtgtcgctctgctggcctggccggcaaccccagttctgctcctctccaggcacccttctttcctcttccccttgcccttgccctgacctcccagccctatggatgtggggtccccatcatcccagctgctcccaaataaactccagaagaggaatctg

SEQ ID NO: 3609 - DNA, 1480 bp, Homo sapiens
  source 1..1480: mol_type = unassigned DNA
aaagtgctgggattacaggcatgagccgccgcgccccgccccacgctcagtcttgaaattgtctggaacgggaaacggcaaacagcgagatatccgagcgagagtcccgccctgcatcagtttgcggaaccgccttggtagaaggagagaaggggagtggaggaagcacgggactggagggaccaaagttccccgatggcggcccaggggtgcgcggcatcgcggctgctccagctgctgctgcagcttctgcttctactgttgctgctggcggcgggcggggcgcgcgcgcggtggcgcggggagggcaccagcgcacacttgcgggacatcttcctgggccgctgcgccgagtaccgcgcactgctgagtcccgagcagcggaacaagaactgcacagccatctgggaagcctttaaagtggcgctggacaaggatccctgctccgtgctgccctcagactatgacctttttattaacttgtccaggcactctattcccagagataagtccctgttctgggaaaatagccacctccttgttaacagctttgcagacaacacccgtcgttttatgcccctgagcgatgttctgtatggcagggttgcagatttcttgagctggtgtcgacagaaaaatgactctggactcgattaccaatcctgccctacatcagaagactgtgaaaataatcctgtggattccttttggaaaagggcatccatccagtattccaaggatagttctggggtgatccacgtcatgctgaatggttcagagccaacaggagcctatcccatcaaaggtttttttgcagattatgaaattccaaacctccagaaggaaaaaattacacgaatcgagatctgggttatgcatgaaattgggggacccaatgtggaatcctgcggggaaggcagcatgaaagtcctggaaaagaggctgaaggacatggggttccagtacagctgtattaatgattaccgaccagtgaagctcttacagtgcgtggaccacagcacccatcctgactgtgccttaaagtcggcagcagccgctactcaaagaaaagccccaagtctttatacagaacaaagggcgggtcttatcattcccctctttctggtgctggcttccaggactcaactgtaactggaaactgtgttgctctaaccctcctccagccctgcagcctccccttgcagtcatcattcgtgttctgtgtataccaaatgattctgttatctaaagaagctttttgctgggaaaacgatgtcctgaaaatggtatttcaatgaggcatatgttcaggatttcagaaacaagaagttagttctatttagcaggttaaaaaatgctgcattagaattaaagcaagttattttcttatttgtataatgacacaaagcattgggagtcagactgcttgtatattatcaaacattttaagagaattctaataaagctgtattttacatca

SEQ ID NO: 3610 - DNA, 1019 bp, Homo sapiens
  source 1..1019: mol_type = unassigned DNA
ataaaggggtggcccgtagaagattccagcaccctcccctaactccaggccagactctaaaggggagatctggatggcatctacttcgtatgactattgcagagtgcccatggaagacggggataagcgctgtaagcttctgctggggataggaattctggtgctcctgatcatcgtgattctgggggtgcccttgattatcttcaccatcaaggccaacagcgaggcctgccgggacggccttcgggcagtgatggagtgtcgcaatgtcacccatctcctgcaacaagagctgaccgaggcccagaagggctttcaggatgtggaggcccaggccgccacctgcaaccacactgtgatggccctaatggcttccctggatgcagagaaggcccaaggacaaaagaaagtggaggagcttgagggagagatcactacattaaaccataagcttcaggacgcgtctgcagaggtggagcgactgagaagagaaaaccaggtcttaagcgtgagaatcgcggacaagaagtactaccccagctcccaggactccagctccgctgcggcgccccagctgctgattgtgctgctgggcctcagcgctctgctgcagtgagatcccaggaagctggcacatcttggaaggtccgtcctgctcggcttttcgcttgaacattcccttgatctcatcagttctgagcgggtcatggggcaacacggttagcggggagagcacggggtagccggagaagggcctctggagcaggtctggaggggccatggggaagtcctgggtgtggggacacagtcgggttgacccagggctgtctccctccagagcctccctccggacaatgagtcccccctcttgtctcccaccctgagattgggcatggggtgcggtgtggggggcatgtgctgcctgttgttatgggttttttttgcggggggggttgcttttttctggggtctttgagctccaaaaaataaacacttcctttgagggagagcacacctga

SEQ ID NO: 3611 - DNA, 1109 bp, Homo sapiens
  source 1..1109: mol_type = unassigned DNA
accctcccctaactccaggccagactctaaaggggagatctggatggcatctacttcgtatgactattgcagagtgcccatggaagacggggataagcgctgtaagcttctgctggggataggaattctggtgctcctgatcatcgtgattctgggggtgcccttgattatcttcaccatcaaggccaacagcgaggcctgccgggacggccttcgggcagtgatggagtgtcgcaatgtcacccatctcctgcaacaagagctgaccgaggcccagaagggctttcaggatgtggaggcccaggccgccacctgcaaccacactgtgatggccctaatggcttccctggatgcagagaaggcccaaggacaaaagaaagtggaggagcttgagggagagatcactacattaaaccataagcttcaggacgcgtctgcagaggtggagcgactgagaagagaaaaccaggtcttaagcgtgagaatcgcggacaagaagtactaccccagctcccacttcccctccactcctcagagccggcttcagacccaactaacgacactgaagattgagatggacgaagccaaggcacaggggacccagatgggggccgagaacggggcgctgacaggtgcgttggggtgtaagggagtgggcagggatagaagtgggaggagcctaggtgaatcctagttatccaaacaagcacagttgcaaacgtaatgcaaataacacggatataaacgcaaaaacttatgaaaagaatgcaaacaacatgcagaggccatgcaaatgtcacaaaaacaaggcaaatgccacaaaacatgcaaactccttgtaaacgactcacgaaagcaatgcaaacctatgaaaagctatgcaaatggcacgtggaagccatgcaatggtacacactaatttaattcaaataaaggaaagcgtgcaaacggcatgcagactatcaacttggattccggcgtgcgtggggcgggtgggcgcgggagtctccagcctgacccggctccctgcgcccccagaggccctggcgcgctgggaggcggcggccacggagtctacgcggcggctggacgaggctctgcggcgcgca

SEQ ID NO: 3612 - DNA, 1179 bp, Homo sapiens
  source 1..1179: mol_type = unassigned DNA
atggtcctcctcagtattcttagaattctttttctttgtgaactcgtgcttttcatggaacacagggcccaaatggcagaaggagggcagtcctctattgcccttctggctgaggcccctactttgcccctgattgaggagctgctagaagaatcccctggcgaacagccaaggaagccccggctcctagggcattcactgcggtacatgctggagttgtaccggcgttcagctgactcgcatgggcaccctagagagaaccgcaccattggggccaccatggtgaggctggtgaagcccttgaccaatgtggcaaggcctcacagaggtacctggcatatacagatcctgggctttcctctcagaccaaaccgaggactataccaactagttagagccactgtggtttaccgccatcatctccaactaactcgcttcaatctctcctgccatgtggagccctgggtgcagaaaaacccaaccaaccacttcccttcctcagaaggagattcctcaaaaccttccctgatgtctaacgcttggaaagagatggatatcacacaacttgttcagcaaaggttctggaataacaagggacacaggatcctacgactccgttttatgtgtcagcagcaaaaagatagtggtggtcttgagctctggcatggcacttcatccttggacattgccttcttgttactctatttcaatgatactcataaaagcattcggaaggctaaatttcttcccaggggcatggaggagttcatggaaagggaatctcttctccggagaacccgacaagcagatggtatctcagctgaggttactgcctcttcctcaaaacatagcgggcctgaaaataaccagtgttccctccaccctttccaaatcagcttccgccagctgggttgggatcactggatcattgctccccctttctacaccccaaactactgtaaaggaacttgtctccgagtactacgcgatggtctcaattcccccaatcacgccattattcagaaccttatcaatcagttggtggaccagagtgtcccccggccctcctgtgtcccgtataagtatgttccaattagtgtccttatgattgaggcaaatgggagtattttgtacaaggagtatgagggtatgattgctgagtcttgtacatgcagatga

SEQ ID NO: 3613 - DNA, 5734 bp, Homo sapiens
  source 1..5734: mol_type = unassigned DNA
agatcttgaaaacacccgggccacacacgccgcgacctacagctctttctcagcgttggagtggagacggcgcccgcagcgccctgcgcgggtgaggtccgcgcagctgctggggaagagcccacctgtcaggctgcgctgggtcagcgcagcaagtggggctggccgctatctcgctgcacccggccgcgtcccgggctccgtgcgccctcgccccagctggtttggagttcaaccctcggctccgccgccggctccttgcgccttcggagtgtcccgcagcgacgccgggagccgacgcgccgcgcgggtacctagccatggctggggcgagcaggctgctctttctgtggctgggctgcttctgcgtgagcctggcgcagggagagagaccgaagccacctttcccggagctccgcaaagctgtgccaggtgaccgcacggcaggtggtggcccggactccgagctgcagccgcaagacaaggtctctgaacacatgctgcggctctatgacaggtacagcacggtccaggcggcccggacaccgggctccctggagggaggctcgcagccctggcgccctcggctcctgcgcgaaggcaacacggttcgcagctttcgggcggcagcagcagaaactcttgaaagaaaaggactgtatatcttcaatctgacatcgctaaccaagtctgaaaacattttgtctgccacactgtatttctgtattggagagctaggaaacatcagcctgagttgtccagtgtctggaggatgctcccatcatgctcagaggaaacacattcagattgatctttctgcatggaccctcaaattcagcagaaaccaaagtcaactccttggccatctgtcagtggatatggccaaatctcatcgagatattatgtcctggctgtctaaagatatcactcaactcttgaggaaggccaaagaaaatgaagagttcctcataggatttaacattacgtccaagggacgccagctgccaaagaggaggttaccttttccagagccttatatcttggtatatgccaatgatgccgccatttctgagccagaaagtgtggtatcaagcttacagggacaccggaattttcccactggaactgttcccaaatgggatagccacatcagagctgccctttccattgagcggaggaagaagcgctctactggggtcttgctgcctctgcagaacaacgagcttcctggggcagaataccagtataaaaaggatgaggtgtgggaggagagaaagccttacaagacccttcaggctcaggcccctgaaaagagtaagaataaaaagaaacagagaaaggggcctcatcggaagagccagacgctccaatttgatgagcagaccctgaaaaaggcaaggagaaagcagtggattgaacctcggaattgcgccaggagatacctcaaggtagactttgcagatattggctggagtgaatggattatctcccccaagtcctttgatgcctattattgctctggagcatgccagttccccatgccaaagtctttgaagccatcaaatcatgctaccatccagagtatagtgagagctgtgggggtcgttcctgggattcctgagccttgctgtgtaccagaaaagatgtcctcactcagtattttattctttgatgaaaataagaatgtagtgcttaaagtataccctaacatgacagtagagtcttgcgcttgcagataacctggcaaagaactcatttgaatgcttaattcaatcattagtttatttttatggacttcttcctgttttttttttttttttttttgcactgccaatgcattttgtttcaaaagattatttctatagtcagaggggaatgagcaaatagactgaagattgccaccaaggaaaagaactgtatttgtttctgaatgtaacttaaagcaagatttttagtaaatatggacatctatttctctttttgtaatcaaacacaacaacttatcaaactgtttttagaactgttagagaacacactggtttatttttgtaatgttctttgaaaacagaatggagaagcagcaatagcttgtcatttatctcatttaatgactaatgggaaatagagaacaatttcgcgttttgaattaggcttattgccttagaatcctgagaaagtgctaaataatcaactctgatgtttttcttaagttcttgagactcttgtttatccttgtttttcctccacaagtcattgtctaagtgtaatggaaagtttatgctgagcgttagtgtgtatgtatgtgcgtacatgcgccaggtgcctgtgccctctgtaggatggtttgcttaatatggttttataattcagtttacacaggattctttattttttttaattttgtattttggcaaacaccattcagttataagaactttgccaaatatgatagaataattcaagagcatatacagagagttaccacttgacccagctatttaattgcaaatacagttgttttcatttcatttcctaccagaaaaaggaatcagaaacctagtttttgaaaacacaagtgtaattcctcttttgtacttctttttcacaaatgcttttatttattctaaattgaatttaaaaatccttcctaaagccattaactctttaattctcctgatatgcctttacttcctatgaagttattggtagatgttgaggcccaaaaactggtagaatattgaagatcttcttaaatgaccaatttaaccataaccaaatattgaatatcattcttcagtcacatctaagtcaggcactttttcacatagatcagggcttttggctcagtcacgaaatctacaagttagcaaagcttacaaaacattattcgtcaggtatgggaatcaaatatagacacttgtttgtctttgctttccatttctatgtgtcacatacatatatgtgtcctcttataactttagtcttcaaaattatttcaatatccttcttctcactatatttatttgtgtgatggaaatgctttcaggccgtagatcattgttggtgttaatctgtggttaatcctcattttagttccgtcttatctgatacttagaaatatctcagccattttggaggctgtgcagtatcagaagacgtggagtttgttctgtctctgcctgtagctaattatggtggttcagtcatttaataaatatgttttgagcatctattttgtgaaaggcactgtgttacctgtgtgtctttagtgtcctcactggtaaaatgaagaggctggccatgagctggaagggttaagtttataattccagctatttcacacccgtcttccttgaaggaatgatagtgatagatataaaaacactgtaagtccctcttttaataaactaaatgaaagaacatcctatacttcgctgtttgtaaattagtatggcattcgctttggtttaagtggtattttattgcaaacccattaaaagaataactcatgaaaagaagctctttgacaccttggggtacacaaatgttggtgtgggtgtgtgttaattctgtgagtgagacacaccagttctaaaaaaaatgagtgaagttctggtgcctgagttaccatgctttcttctagttcttacagtagcataaaattaaagattcaaagtgagatggaggataaaattactttttaatacatgttctcaaacatttgaaaataaaagtatatgatagaagggggccagagtgtggccaccatcctgatcgtactgtttttcaataaagaaaactttttcattggtagatttggtgaaattctaaatttaggtttttttctagagctgtatcaaccaaaacttctggcaattcccagtatcacttcttagccttcttatatccaaatgcctgtttattacctttcttaatttgaatcaatgcctagttattacagattgcaccccacaatggccaaaaacccactacataataaaatttacaggtactaactagttaagattatattttaagtagcaattgatataaaattacaacacaatgaaagaacttgggtaatctcttagcaatggaaataggttttaaccagcagtttttctgggtgctttgtaactatcattttactaatgaattgaggatgtattatggtttaaattggaagagttttattcccaaagaataaagcaagattatctttcagtagtagagattgaagtaaatgtattaatattttaattaatacagatttactaagagtagttagaaaatttagtaagtgcctgttttacaaattgttaggtactagtttctgtataattcctacacagaagctttagaaatctcctgatattaaattattaaattggcattcatgaaaagagaagctacaattataaactccatttgctaaatcatgcataatactctctctctctcttcccccacaagtaatctctctaccccatgcagtgtgcacacacacacacacacagtcagttactgaaaaaaataattctttttctttttttttttaaatggagtttcactcttgtcgcccaggctggagtgcagtggcgtgatctcggcccactgcaacctccacctcccaggttcaagcagttctcctgcctcagcctcctgagtagctgggattacaggtgtccgccaccatgcctggctaatttttttatttgataaaaagaattctttttctcaataactgttctcttgaattcaaattaagggactgccaaagtcaattagaatattttaaaaatactttgttgtaacctgtgtaaataatatacaatttacaggatttgggattgtagaacttaaactggaagactggattcctcagatctcaggactataacattccagataaatttttacattccctttgctgtatattaactgatgatcatttatatgttaagattttttaccttaatatttctgaataaaactcttattgcccatttaatattttcataggcaatcaaatgtgagtaatactgctaagagtctgatttattaaaaatatttgtataattcattcagtttagtttttcagtttagtctttctgctttcacttttctctgtgctaacaagtaactaatgtctgggcattgacttcttattgaatcaaagttgggttaggcatagctatgcacacctgatgtgtaagattaaagaagagattaaataagaaatcttgggtaagttggacttttctgtatagctcttttttcctctgagttgtattttaatgtagtttataagtgataaaatgatccttgttttctaaaagccagtccttcccttcagctttccacagtttctgtaaatgtttaatacttgtacagtcaatggcaattttaaatatatatatatatataatatatgtatatggaaaaggttcaaagatgcttttaatttatttaatgactattgccttcctataataataattttcatccttaattatgataatacttttagcaagaaaaattcctttttactacagtttttagatgcaaaatgcagtttggttctttagtcaaatccacttagagggtatattgcagtgaaactgtgaaggatacttcactaccaatgtataagctttgttgaatttgtatcattttctttcagtaatgaaaagctattcattatacagtatggaaataaaaattgcttcattga

SEQ ID NO: 3614 - DNA, 238 bp, Homo sapiens
  source 1..238: mol_type = unassigned DNA
tgttttttctattacctaaagtctttgaagccatcaaatcatgctaccatccagagtatagtgagagctgtgggggtcgttcctgggattcctgagccttgctgtgtaccagaaaagatgtcctcactcagtattttattctttgatgaaaataagaatgtagtgcttaaagtataccctaacatgacagtagagtcttgcgcttgcagataacctggcaaagaactcatttgaatgc

SEQ ID NO: 3615 - DNA, 1917 bp, Homo sapiens
  source 1..1917: mol_type = unassigned DNA
ggcagaggaggagggagggagggaaggagcgcggagcccggcccggaagctaggtgagtgtggcatccgagctgagggacgcgagcctgagacgccgctgctgctccggctgagtatctagcttgtctccccgatgggattcccgtccaagctatctcgagcctgcagcgccacagtccccggccctcgcccaggttcactgcaaccgttcagaggtccccaggagctgctgctggcgagcccgctactgcagggacctatggagccattccgtagtgccatcccgagcaacgcactgctgcagcttccctgagcctttccagcaagtttgttcaagattggctgtcaagaatcatggactgttattatatgccttgttttctgtcaagacaccatgattcctggtaaccgaatgctgatggtcgttttattatgccaagtcctgctaggaggcgcgagccatgctagtttgatacctgagacggggaagaaaaaagtcgccgagattcagggccacgcgggaggacgccgctcagggcagagccatgagctcctgcgggacttcgaggcgacacttctgcagatgtttgggctgcgccgccgcccgcagcctagcaagagtgccgtcattccggactacatgcgggatctttaccggcttcagtctggggaggaggaggaagagcagatccacagcactggtcttgagtatcctgagcgcccggccagccgggccaacaccgtgaggagcttccaccacgaagaacatctggagaacatcccagggaccagtgaaaactctgcttttcgtttcctctttaacctcagcagcatccctgagaacgaggtgatctcctctgcagagcttcggctcttccgggagcaggtggaccagggccctgattgggaaaggggcttccaccgtataaacatttatgaggttatgaagcccccagcagaagtggtgcctgggcacctcatcacacgactactggacacgagactggtccaccacaatgtgacacggtgggaaacttttgatgtgagccctgcggtccttcgctggacccgggagaagcagccaaactatgggctagccattgaggtgactcacctccatcagactcggacccaccagggccagcatgtcaggattagccgatcgttacctcaagggagtgggaattgggcccagctccggcccctcctggtcacctttggccatgatggccggggccatgccttgacccgacgccggagggccaagcgtagccctaagcatcactcacagcgggccaggaagaagaataagaactgccggcgccactcgctctatgtggacttcagcgatgtgggctggaatgactggattgtggccccaccaggctaccaggccttctactgccatggggactgcccctttccactggctgaccacctcaactcaaccaaccatgccattgtgcagaccctggtcaattctgtcaattccagtatccccaaagcctgttgtgtgcccactgaactgagtgccatctccatgctgtacctggatgagtatgataaggtggtactgaaaaattatcaggagatggtagtagagggatgtgggtgccgctgagatcaggcagtccttgaggatagacagatatacacaccacacacacacaccacatacaccacacacacacgttcccatccactcacccacacactacacagactgcttccttatagctggacttttatttaaaaaaaaaaaaaaaaaaggaaaaaatccctaaacattcaccttgaccttatttatgactttacgtgcaaatgttttgaccatattgatcatatattttgacaaaatatatttataactacgtattaaaagaaaaaaataaaatgagtcattattttaaaggtaaa

SEQ ID NO: 3616 - DNA, 1784 bp, Homo sapiens
  source 1..1784: mol_type = unassigned DNA
gaaggaagtggcgggggaaggagtgtggtggtggtttaaaaaataagggaagccgaggcgagagagacgcagacgcagaggtcgagcgcaggccgaaagctgttcaccgttttctcgactccggggaacatggagccattccgtagtgccatcccgagcaacgcactgctgcagcttccctgagcctttccagcaagtttgttcaagattggctgtcaagaatcatggactgttattatatgccttgttttctgtcaagacaccatgattcctggtaaccgaatgctgatggtcgttttattatgccaagtcctgctaggaggcgcgagccatgctagtttgatacctgagacggggaagaaaaaagtcgccgagattcagggccacgcgggaggacgccgctcagggcagagccatgagctcctgcgggacttcgaggcgacacttctgcagatgtttgggctgcgccgccgcccgcagcctagcaagagtgccgtcattccggactacatgcgggatctttaccggcttcagtctggggaggaggaggaagagcagatccacagcactggtcttgagtatcctgagcgcccggccagccgggccaacaccgtgaggagcttccaccacgaagaacatctggagaacatcccagggaccagtgaaaactctgcttttcgtttcctctttaacctcagcagcatccctgagaacgaggtgatctcctctgcagagcttcggctcttccgggagcaggtggaccagggccctgattgggaaaggggcttccaccgtataaacatttatgaggttatgaagcccccagcagaagtggtgcctgggcacctcatcacacgactactggacacgagactggtccaccacaatgtgacacggtgggaaacttttgatgtgagccctgcggtccttcgctggacccgggagaagcagccaaactatgggctagccattgaggtgactcacctccatcagactcggacccaccagggccagcatgtcaggattagccgatcgttacctcaagggagtgggaattgggcccagctccggcccctcctggtcacctttggccatgatggccggggccatgccttgacccgacgccggagggccaagcgtagccctaagcatcactcacagcgggccaggaagaagaataagaactgccggcgccactcgctctatgtggacttcagcgatgtgggctggaatgactggattgtggccccaccaggctaccaggccttctactgccatggggactgcccctttccactggctgaccacctcaactcaaccaaccatgccattgtgcagaccctggtcaattctgtcaattccagtatccccaaagcctgttgtgtgcccactgaactgagtgccatctccatgctgtacctggatgagtatgataaggtggtactgaaaaattatcaggagatggtagtagagggatgtgggtgccgctgagatcaggcagtccttgaggatagacagatatacacaccacacacacacaccacatacaccacacacacacgttcccatccactcacccacacactacacagactgcttccttatagctggacttttatttaaaaaaaaaaaaaaaaaaggaaaaaatccctaaacattcaccttgaccttatttatgactttacgtgcaaatgttttgaccatattgatcatatattttgacaaaatatatttataactacgtattaaaagaaaaaaataaaatgagtcattattttaaaggt

SEQ ID NO: 3617 - DNA, 1705 bp, Homo sapiens
  source 1..1705: mol_type = unassigned DNA
gaaaaacagagcctgtctgcggtggagtctcattatattcaaatattccttttaggagccattccgtagtgccatcccgagcaacgcactgctgcagcttccctgagcctttccagcaagtttgttcaagattggctgtcaagaatcatggactgttattatatgccttgttttctgtcaagacaccatgattcctggtaaccgaatgctgatggtcgttttattatgccaagtcctgctaggaggcgcgagccatgctagtttgatacctgagacggggaagaaaaaagtcgccgagattcagggccacgcgggaggacgccgctcagggcagagccatgagctcctgcgggacttcgaggcgacacttctgcagatgtttgggctgcgccgccgcccgcagcctagcaagagtgccgtcattccggactacatgcgggatctttaccggcttcagtctggggaggaggaggaagagcagatccacagcactggtcttgagtatcctgagcgcccggccagccgggccaacaccgtgaggagcttccaccacgaagaacatctggagaacatcccagggaccagtgaaaactctgcttttcgtttcctctttaacctcagcagcatccctgagaacgaggtgatctcctctgcagagcttcggctcttccgggagcaggtggaccagggccctgattgggaaaggggcttccaccgtataaacatttatgaggttatgaagcccccagcagaagtggtgcctgggcacctcatcacacgactactggacacgagactggtccaccacaatgtgacacggtgggaaacttttgatgtgagccctgcggtccttcgctggacccgggagaagcagccaaactatgggctagccattgaggtgactcacctccatcagactcggacccaccagggccagcatgtcaggattagccgatcgttacctcaagggagtgggaattgggcccagctccggcccctcctggtcacctttggccatgatggccggggccatgccttgacccgacgccggagggccaagcgtagccctaagcatcactcacagcgggccaggaagaagaataagaactgccggcgccactcgctctatgtggacttcagcgatgtgggctggaatgactggattgtggccccaccaggctaccaggccttctactgccatggggactgcccctttccactggctgaccacctcaactcaaccaaccatgccattgtgcagaccctggtcaattctgtcaattccagtatccccaaagcctgttgtgtgcccactgaactgagtgccatctccatgctgtacctggatgagtatgataaggtggtactgaaaaattatcaggagatggtagtagagggatgtgggtgccgctgagatcaggcagtccttgaggatagacagatatacacaccacacacacacaccacatacaccacacacacacgttcccatccactcacccacacactacacagactgcttccttatagctggacttttatttaaaaaaaaaaaaaaaaaaggaaaaaatccctaaacattcaccttgaccttatttatgactttacgtgcaaatgttttgaccatattgatcatatattttgacaaaatatatttataactacgtattaaaagaaaaaaataaaatgagtcattattttaaag

SEQ ID NO: 3618 - DNA, 1708 bp, Homo sapiens
  source 1..1708: mol_type = unassigned DNA
ggcagaggaggagggagggagggaaggagcgcggagcccggcccggaagctaggagccattccgtagtgccatcccgagcaacgcactgctgcagcttccctgagcctttccagcaagtttgttcaagattggctgtcaagaatcatggactgttattatatgccttgttttctgtcaagacaccatgattcctggtaaccgaatgctgatggtcgttttattatgccaagtcctgctaggaggcgcgagccatgctagtttgatacctgagacggggaagaaaaaagtcgccgagattcagggccacgcgggaggacgccgctcagggcagagccatgagctcctgcgggacttcgaggcgacacttctgcagatgtttgggctgcgccgccgcccgcagcctagcaagagtgccgtcattccggactacatgcgggatctttaccggcttcagtctggggaggaggaggaagagcagatccacagcactggtcttgagtatcctgagcgcccggccagccgggccaacaccgtgaggagcttccaccacgaagaacatctggagaacatcccagggaccagtgaaaactctgcttttcgtttcctctttaacctcagcagcatccctgagaacgaggtgatctcctctgcagagcttcggctcttccgggagcaggtggaccagggccctgattgggaaaggggcttccaccgtataaacatttatgaggttatgaagcccccagcagaagtggtgcctgggcacctcatcacacgactactggacacgagactggtccaccacaatgtgacacggtgggaaacttttgatgtgagccctgcggtccttcgctggacccgggagaagcagccaaactatgggctagccattgaggtgactcacctccatcagactcggacccaccagggccagcatgtcaggattagccgatcgttacctcaagggagtgggaattgggcccagctccggcccctcctggtcacctttggccatgatggccggggccatgccttgacccgacgccggagggccaagcgtagccctaagcatcactcacagcgggccaggaagaagaataagaactgccggcgccactcgctctatgtggacttcagcgatgtgggctggaatgactggattgtggccccaccaggctaccaggccttctactgccatggggactgcccctttccactggctgaccacctcaactcaaccaaccatgccattgtgcagaccctggtcaattctgtcaattccagtatccccaaagcctgttgtgtgcccactgaactgagtgccatctccatgctgtacctggatgagtatgataaggtggtactgaaaaattatcaggagatggtagtagagggatgtgggtgccgctgagatcaggcagtccttgaggatagacagatatacacaccacacacacacaccacatacaccacacacacacgttcccatccactcacccacacactacacagactgcttccttatagctggacttttatttaaaaaaaaaaaaaaaaaaggaaaaaatccctaaacattcaccttgaccttatttatgactttacgtgcaaatgttttgaccatattgatcatatattttgacaaaatatatttataactacgtattaaaagaaaaaaataaaatgagtcattattttaaaggtaaa

SEQ ID NO: 3619 - DNA, 505 bp, Homo sapiens
  source 1..505: mol_type = unassigned DNA
gctaaaggagcacaatgcctgatgctgcaggagaaacattaggagccattccgtagtgccatcccgagcaacgcactgctgcagcttccctgagcctttccagcaagtttgttcaagattggctgtcaagaatcatggactgttattatatgccttgttttctgtcaagacaccatgattcctggtaaccgaatgctgatggtcgttttattatgccaagtcctgctaggaggcgcgagccatgctagtttgatacctgagacggggaagaaaaaagtcgccgagattcagggccacgcgggaggacgccgctcagggcagagccatgagctcctgcgggacttcgaggcgacacttctgcagatgtttgggctgcgccgccgcccgcagcctagcaagagtgccgtcattccggactacatgcgggatctttaccggcttcagtctggggaggaggaggaagagcagatccacagcactggtcttgagtatcctgagcgcccgg

SEQ ID NO: 3620 - DNA, 3952 bp, Homo sapiens
  source 1..3952: mol_type = unassigned DNA
ctggtatatttgtgcctgctggaggtggaattaacagtaagaaggagaaagggattgaatggacttacaggaaggatttcaagtaaattcagggaaacacatttacttgaatagtacaacctagagtattattttacactaagacgacacaaaagatgttaaagttatcaccaagctgccggacagatatatattccaacaccaaggtgcagatcagcatagatctgtgattcagaaatcaggatttgttttggaaagagctcaagggttgagaagaactcaaaagcaagtgaagattactttgggaactacagtttatcagaagatcaacttttgctaattcaaataccaaaggcctgattatcataaattcatataggaatgcataggtcatctgatcaaataatattagccgtcttctgctacatcaatgcagcaaaaactcttaacaactgtggataattggaaatctgagtttcagctttcttagaaataactactcttgacatattccaaaatatttaaaataggacaggaaaatcggtgaggatgttgtgctcagaaatgtcactgtcatgaaaaataggtaaatttgttttttcagctactgggaaactgtacctcctagaaccttaggttttttttttttttaagaggacaagaaggactaaaaatatcaacttttgcttttggacaaaaatgcatctgactgtatttttacttaagggtattgtgggtttcctctggagctgctgggttctagtgggttatgcaaaaggaggtttgggagacaatcatgttcactccagttttatttatagaagactacggaaccacgaaagacgggaaatacaaagggaaattctctctatcttgggtttgcctcacagacccagaccattttcacctggaaaacaagcgtcctctgcacctctctttatgctggatctctacaatgccatgaccaatgaagaaaatcctgaagagtcggagtactcagtaagggcatccttggcagaagagaccagaggggcaagaaagggatacccagcctctcccaatgggtatcctcgtcgcatacagttatctcggacgactcctctgaccacccagagtcctcctctagccagcctccatgataccaactttctgaatgatgctgacatggtcatgagctttgtcaacttagttgaaagagacaaggatttttctcaccagcgaaggcattacaaagaatttcgatttgatcttacccaaattcctcatggagaggcagtgacagcagctgaattccggatatacaaggaccggagcaacaaccgatttgaaaatgaaacaattaagattagcatatatcaaatcatcaaggaatacacaaatagggatgcagatctgttcttgttagacacaagaaaggcccaagctttagatgtgggttggcttgtctttgatatcactgtgaccagcaatcattgggtgattaatccccagaataatttgggcttacagctctgtgcagaaacaggggatggacgcagtatcaacgtaaaatctgctggtcttgtgggaagacagggacctcagtcaaaacaaccattcatggtggccttcttcaaggcgagtgaggtacttcttcgatccgtgagagcagccaacaaacgaaaaaatcaaaaccgcaataaatccagctctcatcaggactcctccagaatgtccagtgttggagattataacacaagtgagcaaaaacaagcctgtaagaagcacgaactctatgtgagcttccgggatctgggatggcaggactggattatagcaccagaaggatacgctgcattttattgtgatggagaatgttcttttccacttaacgcccatatgaatgccaccaaccacgctatagttcagactctggttcatctgatgtttcctgaccacgtaccaaagccttgttgtgctccaaccaaattaaatgccatctctgttctgtactttgatgacagctccaatgtcattttgaaaaaatatagaaatatggtagtacgctcatgtggctgccactaatattaaataatattgataataacaaaaagatctgtattaaggtttatggctgcaataaaaagcatactttcagacaaacggggaatttcctaaaattagtctggctcattttgactcttttcctatgtacaatatcatgtatatagtcatttttatttatttaaacgtatatattctcttctgtggaggctttatcaataaaatctatttcataggccactacattatacaatagatcatctagtataattttcaatgggttatgctgagtccattcaattccatttcaacatttttttctaatacaattttacataattttctgagattagacagaactcctttgactgtttaatattgtggaaggaaattgaataatttagttatattgtgccaatgaaaaccatgatagaatatttatttagaaataagacttaaaaaaataacaacccaaacaaaaattcttggataaacacaatttctcttttagagttcctgcttcattagataaagtgaaatgttgaactggatttgaataaataaacggtaggcagaacatagaagctgaaagattgcacagaattgttttaactgtttgctttaacagaagtggtgtaactgtaggagcatgttcctttttggcttgtggattgtagattttgcaaagagctcaaagcttcaggagacaggcttgagcctgtgtccatagctttccaagttaacactaattgtagtacaaccttcttacctcaaataaatcatgtctgcctattatctagaacactactgctgcagaatttttttttcagatttaaaaacctagtccaaaataaagaaacatttacatgtgctccactttcctccccacaggcaagagtcactgcatgcgtaaaatgtacaagagcagaagatgccgaaagaaccattttctttagctctcctttataactgagtttgctgattgatgtgatgcaagggattttatttagaagtaaaagcactgaaactaaactggaggaaattaccaaaagtcccagaatggctttgacagaattgccatttctaaagaacagctgaaattcatttttcatatctttgagagtgagctcaatgaaaaccttattttgtaaaggcattttgtaaaccttcttccaagcacaaataattccaaacaggaaggttctgttgtgtgtgtgtgtgtgtgtgtgtctgtgtgtgcatgtgtgttcttccctctaaaattaatttattttctctatctattagaatgccctctaaggcctttctttaacacacactgactttttgaagaatgatctttagattgataacttgctatttatggtgactctgtggttaggcttatttaccgttaatctaaagtattcataaagcaccatttattaatcatccttttggatctttcaaaccaaacgtataccaaaaatgtcttcaaaaatgttatggctttgtttgtaattcgggtatattaaaatgttgttttgaaatacagtttatcttaaagaaaatttgacagtaactatattaaggggtacattaagtaatatatttttaattaatggtgtaccattgagagaataagaaatggaagtctattgttttattctttaaatgtgctgtttaaatatatttccatattttaaaatatattaaacagatgctaatttctgctgttcttgatttggttctttatttaaaaggaatacaaaatgtaagtatatcataaattgagacaataagaatatttatcaaatgtaaactgtttgtggatcacatgattctttatgttgttcttaattgccaaaattgttttttgtgttgttaataattatctcactattaaatgtgcaaagcaacaatccatgaa

SEQ ID NO: 3621 - DNA, 1874 bp, Homo sapiens
  source 1..1874: mol_type = unassigned DNA
gcttttggacaaaaatgcatctgactgtatttttacttaagggtattgtgggtttcctctggagctgctgggttctagtgggttatgcaaaaggaggtttgggagacaatcatgttcactccagttttatttatagaagactacggaaccacgaaagacgggaaatacaaagggaaattctctctatcttgggtttgcctcacagacccagaccattttcacctggaaaacaagcgtcctctgcacctctctttatgctggatctctacaatgccatgaccaatgaagaaaatcctgaagagtcggagtactcagtaagggcatccttggcagaagagaccagaggggcaagaaagggatacccagcctctcccaatgggtatcctcgtcgcatacagttatctcggacgactcctctgaccacccagagtcctcctctagccagcctccatgataccaactttctgaatgatgctgacatggtcatgagctttgtcaacttagttgaaagagacaaggatttttctcaccagcgaaggcattacaaagaatttcgatttgatcttacccaaattcctcatggagaggcagtgacagcagctgaattccggatatacaaggaccggagcaacaaccgatttgaaaatgaaacaattaagattagcatatatcaaatcatcaaggaatacacaaatagggatgcagatctgttcttgttagacacaagaaaggcccaagctttagatgtgggttggcttgtctttgatatcactgtgaccagcaatcattgggtgattaatccccagaataatttgggcttacagctctgtgcagaaacaggggatggacgcagtatcaacgtaaaatctgctggtcttgtgggaagacagggacctcagtcaaaacaaccattcatggtggccttcttcaaggcgagtgaggtacttcttcgatccgtgagagcagccaacaaacgaaaaaatcaaaaccgcaataaatccagctctcatcaggactcctccagaatgtccagtgttggagattataacacaagtgagcaaaaacaagcctgtaagaagcacgaactctatgtgagcttccgggatctgggatggcaggttcatctgatgtttcctgaccacgtaccaaagccttgttgtgctccaaccaaattaaatgccatctctgttctgtactttgatgacagctccaatgtcattttgaaaaaatatagaaatatggtagtacgctcatgtggctgccactaatattaaataatattgataataacaaaaagatctgtattaaggtttatggctgcaataaaaagcatactttcagacaaacggggaatttcctaaaattagtctggctcattttgactcttttcctatgtacaatatcatgtatatagtcatttttatttatttaaacgtatatattctcttctgtggaggctttatcaataaaatctatttcataggccactacattatacaatagatcatctagtataattttcaatgggttatgctgagtccattcaattccatttcaacatttttttctaatacaattttacataattttctgagattagacagaactcctttgactgtttaatattgtggaaggaaattgaataatttagttatattgtgccaatgaaaaccatgatagaatatttatttagaaataagacttaaaaaaataacaacccaaacaaaaattcttggataaacacaatttctcttttagagttcctgcttcattagataaagtgaaatgttgaactggatttgaataaataaacggtaggcagaacatagaagctgaaagattgcacagaattgttttaactgtttgctttaaca

SEQ ID NO: 3622 - DNA, 2780 bp, Homo sapiens
  source 1..2780: mol_type = unassigned DNA
cgaccatgagagataaggactgagggccaggaaggggaagcgagcccgccgagaggtggcggggactgctcacgccaagggccacagcggccgcgctccggcctcgctccgccgctccacgcctcgcgggatccgcgggggcagcccggccgggcggggatgccggggctggggcggagggcgcagtggctgtgctggtggtgggggctgctgtgcagctgctgcgggcccccgccgctgcggccgcccttgcccgctgccgcggccgccgccgccggggggcagctgctgggggacggcgggagccccggccgcacggagcagccgccgccgtcgccgcagtcctcctcgggcttcctgtaccggcggctcaagacgcaggagaagcgggagatgcagaaggagatcttgtcggtgctggggctcccgcaccggccccggcccctgcacggcctccaacagccgcagcccccggcgctccggcagcaggaggagcagcagcagcagcagcagctgcctcgcggagagccccctcccgggcgactgaagtccgcgcccctcttcatgctggatctgtacaacgccctgtccgccgacaacgacgaggacggggcgtcggagggggagaggcagcagtcctggccccacgaagcagccagctcgtcccagcgtcggcagccgcccccgggcgccgcgcacccgctcaaccgcaagagccttctggcccccggatctggcagcggcggcgcgtccccactgaccagcgcgcaggacagcgccttcctcaacgacgcggacatggtcatgagctttgtgaacctggtggagtacgacaaggagttctcccctcgtcagcgacaccacaaagagttcaagttcaacttatcccagattcctgagggtgaggtggtgacggctgcagaattccgcatctacaaggactgtgttatggggagttttaaaaaccaaacttttcttatcagcatttatcaagtcttacaggagcatcagcacagagactctgacctgtttttgttggacacccgtgtagtatgggcctcagaagaaggctggctggaatttgacatcacggccactagcaatctgtgggttgtgactccacagcataacatggggcttcagctgagcgtggtgacaagggatggagtccacgtccacccccgagccgcaggcctggtgggcagagacggcccttacgacaagcagcccttcatggtggctttcttcaaagtgagtgaggtgcacgtgcgcaccaccaggtcagcctccagccggcgccgacaacagagtcgtaatcgctctacccagtcccaggacgtggcgcgggtctccagtgcttcagattacaacagcagtgaattgaaaacagcctgcaggaagcatgagctgtatgtgagtttccaagacctgggatggcaggactggatcattgcacccaagggctatgctgccaattactgtgatggagaatgctccttcccactcaacgcacacatgaatgcaaccaaccacgcgattgtgcagaccttggttcaccttatgaaccccgagtatgtccccaaaccgtgctgtgcgccaactaagctaaatgccatctcggttctttactttgatgacaactccaatgtcattctgaaaaaatacaggaatatggttgtaagagcttgtggatgccactaactcgaaaccagatgctggggacacacattctgccttggattcctagattacatctgccttaaaaaaacacggaagcacagttggaggtgggacgatgagactttgaaactatctcatgccagtgccttattacccaggaagattttaaaggacctcattaataatttgctcacttggtaaatgacgtgagtagttgttggtctgtagcaagctgagtttggatgtctgtagcataaggtctggtaactgcagaaacataaccgtgaagctcttcctaccctcctcccccaaaaacccaccaaaattagttttagctgtagatcaagctatttggggtgtttgttagtaaatagggaaaataatctcaaaggagttaaatgtattcttggctaaaggatcagctggttcagtactgtctatcaaaggtagattttacagagaacagaaatcggggaagtggggggaacgcctctgttcagttcattcccagaagtccacaggacgcacagcccaggccacagccagggctccacggggcgcccttgtctcagtcattgctgttgtatgttcgtgctggagttttgttggtgtgaaaatacacttatttcagccaaaacataccatttctacacctcaatcctccatttgctgtactctttgctagtaccaaaagtagactgattacactgaggtgaggctacaaggggtgtgtaaccgtgtaacacgtgaaggcaatgctcacctcttctttaccagaacggttctttgaccagcacattaacttctggactgccggctctagtaccttttcagtaaagtggttctctgcctttttactatacagcataccacgccacagggttagaaccaacgaagaaaataaaatgagggtgcccagcttataagaatggtgttagggggatgagcatgctgtttatgaacggaaatcatgatttcccttgtagaaagtgaggctcagattaaattttagaatattttctaaatgtctttttcacaatcatgtactgggaaggcaatttcatactaaactgattaaataatacatttataatctacaa

SEQ ID NO: 3623 - DNA, 1844 bp, Homo sapiens
  source 1..1844: mol_type = unassigned DNA
agaaagcccacgttggccgctgcggggagcgcggcgtggagaggcgggagaccgaattccggcgccgccgccgcggccgctgctcggtgcactagcccccttccttcccatcctttctgcgagcgggtttgctgggcagccgggcgaccgccgaacggaaagcaagatcctcgccgcctccgcttgaggaggcgtgcggcgcgcggagattttgagtgggagcgacggtgcccgagagctcaggggcgcggagttcgtgagcgagaaggaagttaaacctcgcggaatagactggcatttcgggacgccttgtcgccgcagtcctcctcgggcttcctgtaccggcggctcaagacgcaggagaagcgggagatgcagaaggagatcttgtcggtgctggggctcccgcaccggccccggcccctgcacggcctccaacagccgcagcccccggcgctccggcagcaggaggagcagcagcagcagcagcagctgcctcgcggagagccccctcccgggcgactgaagtccgcgcccctcttcatgctggatctgtacaacgccctgtccgccgacaacgacgaggacggggcgtcggagggggagaggcagcagtcctggccccacgaagcagccagctcgtcccagcgtcggcagccgcccccgggcgccgcgcacccgctcaaccgcaagagccttctggcccccggatctggcagcggcggcgcgtccccactgaccagcgcgcaggacagcgccttcctcaacgacgcggacatggtcatgagctttgtgaacctggtggagtacgacaaggagttctcccctcgtcagcgacaccacaaagagttcaagttcaacttatcccagattcctgagggtgaggtggtgacggctgcagaattccgcatctacaaggactgtgttatggggagttttaaaaaccaaacttttcttatcagcatttatcaagtcttacaggagcatcagcacagagactctgacctgtttttgttggacacccgtgtagtatgggcctcagaagaaggctggctggaatttgacatcacggccactagcaatctgtgggttgtgactccacagcataacatggggcttcagctgagcgtggtgacaagggatggagtccacgtccacccccgagccgcaggcctggtgggcagagacggcccttacgacaagcagcccttcatggtggctttcttcaaagtgagtgaggtgcacgtgcgcaccaccaggtcagcctccagccggcgccgacaacagagtcgtaatcgctctacccagtcccaggacgtggcgcgggtctccagtgcttcagattacaacagcagtgaattgaaaacagcctgcaggaagcatgagctgtatgtgagtttccaagacctgggatggcaggactggatcattgcacccaagggctatgctgccaattactgtgatggagaatgctccttcccactcaacgcacacatgaatgcaaccaaccacgcgattgtgcagaccttggttcaccttatgaaccccgagtatgtccccaaaccgtgctgtgcgccaactaagctaaatgccatctcggttctttactttgatgacaactccaatgtcattctgaaaaaatacaggaatatggttgtaagagcttgtggatgccactaactcgaaaccagatgctggggacacacattctgccttggattcctagattacatctgccttaaaaaaacacggaagcacagttggaggtgggacgatgagactttgaaactatctcatgccagtgccttattacccaggaagattttaaaggacctcattaataa

SEQ ID NO: 3624 - DNA, 1543 bp, Homo sapiens
  source 1..1543: mol_type = unassigned DNA
ggactgctcacgccaagggccgccgccggggggcagctgctgggggacggcgggagccccggccgcacggagcagccgccgccgtcgccgcagtcctcctcgggcttcctgtaccggcggctcaagacgcaggagaagcgggagatgcagaaggagatcttgtcggtgctggggctcccgcaccggccccggcccctgcacggcctccaacagccgcagcccccggcgctccggcagcaggaggagcagcagcagcagcagcagctgcctcgcggagagccccctcccgggcgactgaagtccgcgcccctcttcatgctggatctgtacaacgccctgtccgccgacaacgacgaggacggggcgtcggagggggagaggcagcagtcctggccccacgaagcagccagctcgtcccagcgtcggcagccgcccccgggcgccgcgcacccgctcaaccgcaagagccttctggcccccggatctggcagcggcggcgcgtccccactgaccagcgcgcaggacagcgccttcctcaacgacgcggacatggtcatgagctttgtgaacctggtggagtacgacaaggagttctcccctcgtcagcgacaccacaaagagttcaagttcaacttatcccagattcctgagggtgaggtggtgacggctgcagaattccgcatctacaaggactgtgttatggggagttttaaaaaccaaacttttcttatcagcatttatcaagtcttacaggagcatcagcacagagactctgacctgtttttgttggacacccgtgtagtatgggcctcagaagaaggctggctggaatttgacatcacggccactagcaatctgtgggttgtgactccacagcataacatggggcttcagctgagcgtggtgacaagggatggagtccacgtccacccccgagccgcaggcctggtgggcagagacggcccttacgacaagcagcccttcatggtggctttcttcaaagtgagtgaggtgcacgtgcgcaccaccaggtcagcctccagccggcgccgacaacagagtcgtaatcgctctacccagtcccaggacgtggcgcgggtctccagtgcttcagattacaacagcagtgaattgaaaacagcctgcaggaagcatgagctgtatgtgagtttccaagacctgggatggcaggactggatcattgcacccaagggctatgctgccaattactgtgatggagaatgctccttcccactcaacgcacacatgaatgcaaccaaccacgcgattgtgcagaccttggttcaccttatgaaccccgagtatgtccccaaaccgtgctgtgcgccaactaagctaaatgccatctcggttctttactttgatgacaactccaatgtcattctgaaaaaatacaggaatatggttgtaagagcttgtggatgccactaactcgaaaccagatgctggggacacacattctgccttggattcctagattacatctgccttaaaaaaacacggaagcacagttggaggtggg

SEQ ID NO: 3625 - DNA, 3613 bp, Homo sapiens
  source 1..3613: mol_type = unassigned DNA
gcggccgctgcagagattggaatccgcctgccgggcttggcgaaggagaagggaggaggcaggagcgaggagggaggagggccaagggcgggcaggaaggcttaggctcggcgcgtccgtccgcgcgcggcgaagatcgcacggcccgatcgaggggcgaccgggtcggggccgctgcacgccaagggcgaaggccgattcgggccccacttcgccccggcggctcgccgcgcccacccgctccgcgccgagggctggaggatgcgttccctggggtccggacttatgaaaatatgcatcagtttaatactgtcttggaattcatgagatggaagcataggtcaaagctgtttggagaaaatcagaagtacagttttatctagccacatcttggaggagtcgtaagaaagcagtgggagttgaagtcattgtcaagtgcttgcgatcttttacaagaaaatctcactgaatgatagtcatttaaattggtgaagtagcaagaccaattattaaaggtgacagtacacaggaaacattacaattgaacaatgcctcagctatacatttacatcagattattgggagcctatttgttcatcatttctcgtgttcaaggacagaatctggatagtatgcttcatggcactgggatgaaatcagactccgaccagaaaaagtcagaaaatggagtaaccttagcaccagaggataccttgccttttttaaagtgctattgctcagggcactgtccagatgatgctattaataacacatgcataactaatggacattgctttgccatcatagaagaagatgaccagggagaaaccacattagcttcagggtgtatgaaatatgaaggatctgattttcagtgcaaagattctccaaaagcccagctacgccggacaatagaatgttgtcggaccaatttatgtaaccagtatttgcaacccacactgccccctgttgtcataggtccgttttttgatggcagcattcgatggctggttttgctcatttctatggctgtctgcataattgctatgatcatcttctccagctgcttttgttacaaacattattgcaagagcatctcaagcagacgtcgttacaatcgtgatttggaacaggatgaagcatttattccagttggagaatcactaaaagaccttattgaccagtcacaaagttctggtagtgggtctggactacctttattggttcagcgaactattgccaaacagattcagatggtccggcaagttggtaaaggccgatatggagaagtatggatgggcaaatggcgtggcgaaaaagtggcggtgaaagtattctttaccactgaagaagccagctggtttcgagaaacagaaatctaccaaactgtgctaatgcgccatgaaaacatacttggtttcatagcggcagacattaaaggtacaggttcctggactcagctctatttgattactgattaccatgaaaatggatctctctatgacttcctgaaatgtgctacactggacaccagagccctgcttaaattggcttattcagctgcctgtggtctgtgccacctgcacacagaaatttatggcacccaaggaaagcccgcaattgctcatcgagacctaaagagcaaaaacatcctcatcaagaaaaatgggagttgctgcattgctgacctgggccttgctgttaaattcaacagtgacacaaatgaagttgatgtgcccttgaataccagggtgggcaccaaacgctacatggctcccgaagtgctggacgaaagcctgaacaaaaaccacttccagccctacatcatggctgacatctacagcttcggcctaatcatttgggagatggctcgtcgttgtatcacaggagggatcgtggaagaataccaattgccatattacaacatggtaccgagtgatccgtcatacgaagatatgcgtgaggttgtgtgtgtcaaacgtttgcggccaattgtgtctaatcggtggaacagtgatgaatgtctacgagcagttttgaagctaatgtcagaatgctgggcccacaatccagcctccagactcacagcattgagaattaagaagacgcttgccaagatggttgaatcccaagatgtaaaaatctgatggttaaaccatcggaggagaaactctagactgcaagaactgtttttacccatggcatgggtggaattagagtggaataaggatgttaacttggttctcagactctttcttcactacgtgttcacaggctgctaatattaaacctttcagtactcttattaggatacaagctgggaacttctaaacacttcattctttatatatggacagctttattttaaatgtggtttttgatgcctttttttaagtgggtttttatgaactgcatcaagacttcaatcctgattagtgtctccagtcaagctctgggtactgaattgcctgttcataaaacggtgctttctgtgaaagccttaagaagataaatgagcgcagcagagatggagaaatagactttgccttttacctgagactttcagttcgtttgtattctacctttgtaaaacagcctatagatgatgatgtgtttgggatactgcttattttatgatagtttgtcctgtgtccttagtgatgtgtgtgtgtctccatgcacatgcacgccgggattcctctgctgccatttgaattagaagaaaataatttatatgcatgcacaggaagatattggtggccggtggttttgtgctttaaaaatgcaatatctgaccaagattcgccaatctcatacaagccatttactttgcaagtgagatagcttccccaccagctttattttttaacatgaaagctgatgccaaggccaaaagaagtttaaagcatctgtaaatttggactgttttccttcaaccaccattttttttgtggttattatttttgtcacggaaagcatcctctccaaagttggagcttctattgccatgaaccatgcttacaaagaaagcacttcttattgaagtgaattcctgcatttgatagcaatgtaagtgcctataaccatgttctatattctttattctcagtaacttttaaaagggaagttatttatattttgtgtataatgtgctttatttgcaaatcacccactcctttacaaccatactttatatatgtacatacattcatactgtagaaaccagctcatgtgtacctcatatcccatccttaagagaagaaatgttataaagtagaactaaatataaattttcagaattaatgcattcaaagtaatatatcaaatccaggactttgttaacttcaggtaaaaacttcattagggtaatatcatctcaattttttcaaatgaaaggattctctaattagaaatttatatgtcagagctgttataaatttatcaactgtcaaatatgttctggacagctaaatcatttgagatttttggttttttgatttctattccctaacttgtgaagacaatgaaaaatcaggcagaaatatttagtatctagtcagtatctgtagctacactgtataactgttcttcaataaaatggttcatattttat

SEQ ID NO: 3626 - DNA, 3613 bp, Homo sapiens
  source 1..3613: mol_type = unassigned DNA
agagattggaatccgcctgccgggcttggcgaaggagaagggaggaggcaggagcgaggagggaggagggccaagggcgggcaggaaggcttaggctcggcgcgtccgtccgcgcgcggcgaagatcgcacggcccgatcgaggggcgaccgggtcggggccgctgcacgccaagggcgaaggccgattcgggccccacttcgccccggcggctcgccgcgcccacccgctccgcgccgagggctggaggatgcgttccctggggtccggacttatgaaaatatgcatcagtttaatactgtcttggaattcatgagatggaagcataggtcaaagctgtttggagaaaatcagaagtacagttttatctagccacatcttggagtctttcaggagtcgtaagaaagcagtgggagttgaagtcattgtcaagtgcttgcgatcttttacaagaaaatctcactgaatgatagtcatttaaattggtgaagtagcaagaccaattattaaaggtgacagtacacaggaaacattacaattgaacaatgcctcagctatacatttacatcagattattgggagcctatttgttcatcatttctcgtgttcaaggacagaatctggatagtatgcttcatggcactgggatgaaatcagactccgaccagaaaaagtcagaaaatggagtaaccttagcaccagaggataccttgccttttttaaagtgctattgctcagggcactgtccagatgatgctattaataacacatgcataactaatggacattgctttgccatcatagaagaagatgaccagggagaaaccacattagcttcagggtgtatgaaatatgaaggatctgattttcagtgcaaagattctccaaaagcccagctacgccggacaatagaatgttgtcggaccaatttatgtaaccagtatttgcaacccacactgccccctgttgtcataggtccgttttttgatggcagcattcgatggctggttttgctcatttctatggctgtctgcataattgctatgatcatcttctccagctgcttttgttacaaacattattgcaagagcatctcaagcagacgtcgttacaatcgtgatttggaacaggatgaagcatttattccagttggagaatcactaaaagaccttattgaccagtcacaaagttctggtagtgggtctggactacctttattggttcagcgaactattgccaaacagattcagatggtccggcaagttggtaaaggccgatatggagaagtatggatgggcaaatggcgtggcgaaaaagtggcggtgaaagtattctttaccactgaagaagccagctggtttcgagaaacagaaatctaccaaactgtgctaatgcgccatgaaaacatacttggtttcatagcggcagacattaaaggtacaggttcctggactcagctctatttgattactgattaccatgaaaatggatctctctatgacttcctgaaatgtgctacactggacaccagagccctgcttaaattggcttattcagctgcctgtggtctgtgccacctgcacacagaaatttatggcacccaaggaaagcccgcaattgctcatcgagacctaaagagcaaaaacatcctcatcaagaaaaatgggagttgctgcattgctgacctgggccttgctgttaaattcaacagtgacacaaatgaagttgatgtgcccttgaataccagggtgggcaccaaacgctacatggctcccgaagtgctggacgaaagcctgaacaaaaaccacttccagccctacatcatggctgacatctacagcttcggcctaatcatttgggagatggctcgtcgttgtatcacaggagggatcgtggaagaataccaattgccatattacaacatggtaccgagtgatccgtcatacgaagatatgcgtgaggttgtgtgtgtcaaacgtttgcggccaattgtgtctaatcggtggaacagtgatgaatgtctacgagcagttttgaagctaatgtcagaatgctgggcccacaatccagcctccagactcacagcattgagaattaagaagacgcttgccaagatggttgaatcccaagatgtaaaaatctgatggttaaaccatcggaggagaaactctagactgcaagaactgtttttacccatggcatgggtggaattagagtggaataaggatgttaacttggttctcagactctttcttcactacgtgttcacaggctgctaatattaaacctttcagtactcttattaggatacaagctgggaacttctaaacacttcattctttatatatggacagctttattttaaatgtggtttttgatgcctttttttaagtgggtttttatgaactgcatcaagacttcaatcctgattagtgtctccagtcaagctctgggtactgaattgcctgttcataaaacggtgctttctgtgaaagccttaagaagataaatgagcgcagcagagatggagaaatagactttgccttttacctgagactttcagttcgtttgtattctacctttgtaaaacagcctatagatgatgatgtgtttgggatactgcttattttatgatagtttgtcctgtgtccttagtgatgtgtgtgtgtctccatgcacatgcacgccgggattcctctgctgccatttgaattagaagaaaataatttatatgcatgcacaggaagatattggtggccggtggttttgtgctttaaaaatgcaatatctgaccaagattcgccaatctcatacaagccatttactttgcaagtgagatagcttccccaccagctttattttttaacatgaaagctgatgccaaggccaaaagaagtttaaagcatctgtaaatttggactgttttccttcaaccaccattttttttgtggttattatttttgtcacggaaagcatcctctccaaagttggagcttctattgccatgaaccatgcttacaaagaaagcacttcttattgaagtgaattcctgcatttgatagcaatgtaagtgcctataaccatgttctatattctttattctcagtaacttttaaaagggaagttatttatattttgtgtataatgtgctttatttgcaaatcacccactcctttacaaccatactttatatatgtacatacattcatactgtagaaaccagctcatgtgtacctcatatcccatccttaagagaagaaatgttataaagtagaactaaatataaattttcagaattaatgcattcaaagtaatatatcaaatccaggactttgttaacttcaggtaaaaacttcattagggtaatatcatctcaattttttcaaatgaaaggattctctaattagaaatttatatgtcagagctgttataaatttatcaactgtcaaatatgttctggacagctaaatcatttgagatttttggttttttgatttctattccctaacttgtgaagacaatgaaaaatcaggcagaaatatttagtatctagtcagtatctgtagctacactgtataactgttcttcaataaaatggttcatattttataga

SEQ ID NO: 3627 - DNA, 11461 bp, Homo sapiens
  source 1..11461: mol_type = unassigned DNA
ggaagcaccgaagcgaaacttaaggaatcctgccttcccggagccgcgggcgatgcgactagggctgccgggcgccgccgccgcccgtccggcttcgtccttcccggcagtcgggaactagttctgaccctcgccccccgaccccggatcgaatccccgccctccgcaccctggatatgttttctcccagacctggatatttttttgatatcgtgaaactacgagggaaataatttgggggatttcttcttggctccctgctttccccacagacatgccttccgtttggagggccgcggcaccccgtccgaggcgaaggaacccccccagccgcgagggagagaaatgaagggaatttctgcagcggcatgaaagctctgcagctaggtcctctcatcagccatttgtcctttcaaactgtattgtgatacgggcaggatcagtccacgggagagaagacgagcctcccggctgtttctccgccggtctacttcccatatttcttttctttgccctcctgattcttggctggcccagggatgacttcctcgctgcagcggccctggcgggtgccctggctaccatggaccatcctgctggtcagcactgcggctgcttcgcagaatcaagaacggctatgtgcgtttaaagatccgtatcagcaagaccttgggataggtgagagtagaatctctcatgaaaatgggacaatattatgctcgaaaggtagcacctgctatggcctttgggagaaatcaaaaggggacataaatcttgtaaaacaaggatgttggtctcacattggagatccccaagagtgtcactatgaagaatgtgtagtaactaccactcctccctcaattcagaatggaacataccgtttctgctgttgtagcacagatttatgtaatgtcaactttactgagaattttccacctcctgacacaacaccactcagtccacctcattcatttaaccgagatgagacaataatcattgctttggcatcagtctctgtattagctgttttgatagttgccttatgctttggatacagaatgttgacaggagaccgtaaacaaggtcttcacagtatgaacatgatggaggcagcagcatccgaaccctctcttgatctagataatctgaaactgttggagctgattggccgaggtcgatatggagcagtatataaaggctccttggatgagcgtccagttgctgtaaaagtgttttcctttgcaaaccgtcagaattttatcaacgaaaagaacatttacagagtgcctttgatggaacatgacaacattgcccgctttatagttggagatgagagagtcactgcagatggacgcatggaatatttgcttgtgatggagtactatcccaatggatctttatgcaagtatttaagtctccacacaagtgactgggtaagctcttgccgtcttgctcattctgttactagaggactggcttatcttcacacagaattaccacgaggagatcattataaacctgcaatttcccatcgagatttaaacagcagaaatgtcctagtgaaaaatgatggaacctgtgttattagtgactttggactgtccatgaggctgactggaaatagactggtgcgcccaggggaggaagataatgcagccataagcgaggttggcactatcagatatatggcaccagaagtgctagaaggagctgtgaacttgagggactgtgaatcagctttgaaacaagtagacatgtatgctcttggactaatctattgggagatatttatgagatgtacagacctcttcccaggggaatccgtaccagagtaccagatggcttttcagacagaggttggaaaccatcccacttttgaggatatgcaggttctcgtgtctagggaaaaacagagacccaagttcccagaagcctggaaagaaaatagcctggcagtgaggtcactcaaggagacaatcgaagactgttgggaccaggatgcagaggctcggcttactgcacagtgtgctgaggaaaggatggctgaacttatgatgatttgggaaagaaacaaatctgtgagcccaacagtcaatccaatgtctactgctatgcagaatgaacgcaacctgtcacataataggcgtgtgccaaaaattggtccttatccagattattcttcctcctcatacattgaagactctatccatcatactgacagcatcgtgaagaatatttcctctgagcattctatgtccagcacacctttgactataggggaaaaaaaccgaaattcaattaactatgaacgacagcaagcacaagctcgaatccccagccctgaaacaagtgtcaccagcctctccaccaacacaacaaccacaaacaccacaggactcacgccaagtactggcatgactactatatctgagatgccatacccagatgaaacaaatctgcataccacaaatgttgcacagtcaattgggccaacccctgtctgcttacagctgacagaagaagacttggaaaccaacaagctagacccaaaagaagttgataagaacctcaaggaaagctctgatgagaatctcatggagcactctcttaaacagttcagtggcccagacccactgagcagtactagttctagcttgctttacccactcataaaacttgcagtagaagcaactggacagcaggacttcacacagactgcaaatggccaagcatgtttgattcctgatgttctgcctactcagatctatcctctccccaagcagcagaaccttcccaagagacctactagtttgcctttgaacaccaaaaattcaacaaaagagccccggctaaaatttggcagcaagcacaaatcaaacttgaaacaagtcgaaactggagttgccaagatgaatacaatcaatgcagcagaacctcatgtggtgacagtcaccatgaatggtgtggcaggtagaaaccacagtgttaactcccatgctgccacaacccaatatgccaatgggacagtactatctggccaaacaaccaacatagtgacacatagggcccaagaaatgttgcagaatcagtttattggtgaggacacccggctgaatattaattccagtcctgatgagcatgagcctttactgagacgagagcaacaagctggccatgatgaaggtgttctggatcgtcttgtggacaggagggaacggccactagaaggtggccgaactaattccaataacaacaacagcaatccatgttcagaacaagatgttcttgcacagggtgttccaagcacagcagcagatcctgggccatcaaagcccagaagagcacagaggcctaattctctggatctttcagccacaaatgtcctggatggcagcagtatacagataggtgagtcaacacaagatggcaaatcaggatcaggtgaaaagatcaagaaacgtgtgaaaactccctattctcttaagcggtggcgcccctccacctgggtcatctccactgaatcgctggactgtgaagtcaacaataatggcagtaacagggcagttcattccaaatccagcactgctgtttaccttgcagaaggaggcactgctacaaccatggtgtctaaagatataggaatgaactgtctgtgaaatgttttcaagcctatggagtgaaattattttttgcatcatttaaacatgcagaagatgtttaaaaataaaaaaaaaactgctttatcctcctgtcagcaccccctcccacccctgcaacaaagacttgctttaaatagatttcagctatgcagaaaaatttagcttatgcttccatatttttaaattttgttttttaagttttgcacttttgtttagtctcgctaaagttatatttgtctgttatgaccacagagttatatgtgtgtgtatcaaaagtggtctcaaaatatttttttaagaaaaaaagcaaaaacaatgtattgctgataatcagtttggaccagtttcttaaggtcattaaaacagaagcaaattaagacaggtttgactgcagtggtgtctggtatccatgttttatttctgggcacaagctagtttttatgttgatacgttcctgaacatattatcttgttggacatcttttctcttgtgttttgtttgaatgtgcaatagtttataggccacaaataagctttcttgtaagctctcttcctaacagggcacatattcttccataatataaacacttttctgccccatctcccatacttttgaaggtcagttctatgacagtgaattttgcacaggagaagcagctacctgatttcttactttctctctccttatcatggagaatacagaaacattgtctgaaagggctctaaagaaggaactaccaaaacctgacttgaaatgccatttcttttaaccttccaaatcctaaatgtttccttcaaggcatcttaataaacttatttgcttctggttttgggagttcataagagagaatagaacaaaatacaggacatcaaatattagccatttcccattttattttatttttctatgtaggttcatgttccatgttcatttatttaagaaatacatttttattggtaagcttatagagctacacttatggaatttttaagtaggtaaataaatggttaagacaaaatagtgttatagccttcattctctgaataggccatctttgactcataaaattacccttactgtttattataacttcagaagtaatttatagttctgaacctatagtatcttttaccctgttcccaagcaaagactggtgactttatctgaaaatgattcctcttcccatgacctaaaacactgtgaggaaaaatcattcaagtggcatgccaagtccctatgaaggaagggctgctatcaaacctaccttttttgagcaaactgagactaaacttctctcttttcaaaattgtgttatcttccttaatcctattttcataatttttccttttgccagtttttcacattatctttgatatgtgagcaacatttattatttacattagagtataccttttagtaataaaatgacttgaaatcatattatttttaaaagccctttgcttctttcattacttataatctcctctaaaacaacctctgcatgttttttttaaataaagcactttctgtcaaataatggacttttttctaaacagaaattattttctattaatttgcaaactgatgatttcacttttttttacttttttttcgattatcagagtacttagtaaatgttatatagtttagttctaagatagttccagggattaaaaggttaagaggaaaacacaaatcaccaaatttctgatttatgtttttatctcctgaacaatattttctcactcatattcctctatcttatcacttagctaaagacagcctaaatttcccaattttctgtccaaaatatttgtgatttacttgtatataagccttctcatttgccatgtgctgtgatcttacaagttagatgttactatacctaccatttattcagctggattgctgaacacagttctggattcatagaattaagaatatcttgttagtgcccaggatttccacgttttgtgttttattggcccttttctttattcagccccttaatctattttcagtcttctggcacgtaatttttttcacagttattattcttctattaacaaattatttttatctttcctagtacattttcacttagttctcttgcccttaaatatctttcacatgcattttaggatattcttttcaaatatttgtaggacaactttgaatcaaaataaattatgttccttctccaatttgaagcattgaggataaatgaccatttgaggtctaactgatcttttcctgccagaagagttatcttacgttctgctatatttgtatttgggccagttgattgtaggttgtccaacattttttaatattgggaaaattatgataaaatgctttaaaaattaatatgccagattaaaataactgaatagtttactatttcattcaagcatgtttaaaacaaataatttcctttcaccagtttttcttagtaaactcctgaaaaagtaggaaaggtggaaagtatatatcatttttataaattttaaattgtacatcagacttttaaaatctgtaatatacaagcaagcaaaattattttaaatgacttaattgtatgctaatactcatctgataataaatgcttcttaaagttgacatttaactgctatcacaaagttttatatgtagaaaagtggggtccttttgaataaaagatcattcaactaaaaatattaaaatttatttcactggatggtaatgtaaccttaaaagcatcataataggtaaagtctaatattagttcccttaacaaaatcctaactgtataccagaattaggtcactgaaagaacttgatttgaattacgtttagacaaaaatgatttaattgtaaattcttaaaactttctaaatgcataattggcaaaaaaaaaaacccactgttaccagtgtaggaagttacaagaaggcacatactgaatgctgaagtatacatatgctatttctcttaaacctcagagcaaccatatgagcattgtaattaatattcccattttacagatgaggaaactgaagctaagagaagctaagtaatatgcccaaggtccacatctagtaacagacaaagctgggatttcagtctatgtctgcctctctccacatctctttcatccataccacactgcctacatgccatatgacaggatgtgtaatgggctaacgtttatttaaaaagttcaggccaggtgcagtggcttatgcctataatccccgcactttgggaggccgagccgggtggatcatgaggtcagacgttcaacaccagcctggccaagatggtgaaaccccgtctctattaaaaatattttttaaaaattaactgagcgtggtggtgggcgcctgtagtcccagctactcaggaggctaaggcaggagaatctcttgaacccgagaggtggaggttgcagtgagctgagatcgcgccactgcactgcagcctaggcgacagagcaagactgcctcaaaaaaaaaacataaaaattcagtcactatactctggcacaattttcatttgtatatgagccaaaccacataccttaatgatttgggaagttaggcaaatatgagatatgtagacatatctatgctgattgttgcttgagaaataattactaattctagacaaaactcaatcctgtatcttccatcatgaatcttaaaatcatttcacttcactcctaacatttcttacattgcagaactaatggtaaagtaaattttacggaaaaagttaagatagctttgggaacagagacctttccctaaattgattccatagcagatttgggggaattaacaaagaatttcagtctcatcaatcctttgaatccatcttcaaaacttctgcttttaataactttagaaaatttactaatctatagaactaattgagtaggatataggaaggatacaaggatataatgtcctttttataaaagtttagtatagcttctttacatgtatccacttgttccagaaaatgtgcattggttctgaatgtgaaaatatttaaagagagaaaggaacactcaagtaagtgtgggcttcagtgggaattatcacaaaacattggcaagtatttttatttaaattattttcaaatttgacttctacagccaagtggaattggtaggctgtagctgttacactgaaatttctagtctttgtaagtgcctcctgaaagtcatttaaaatggaaaaatatttcaatgagcttttccttttttcatatttatggacatgaatattttattggagatcattaactcctagaatttgagattatatttccatacaacattttataaagttatgttgaacttactacctgttatgtgcaggttattatgtaactattcacagattgcttcatatattgctttatcttcccatctaacttcttaaagttaaaatccggacacacatgttgattatctagaccagtcattctggaaattgtaacactcccacataaaccccaggagactttttcagaatgcaatgtttctaaatgtactgttactggcagtttactctccagcatataaggttgcattttaacttttagattatgaactgtgcaaactttacccaaaactatcttgcatgattccctcctaaatatattccttgattaagtaaatctggcaaatcactgtttgagctagttacataaaatttgttatcaagagaaggcttttctacaagtttccagattaacataaagaaaagagggaatcacagggcatttaagtgcaccttcccattactttccttaaatcacctcatagttaggctgggcgcggtggctcacgcctgtaatcccagcactttgggaggccgagacggtggatcacgaggtcaggggactgagatcatcctggctaacacgatgaaacctcatctctactaaaaatacaaataattagccaggcatggtggcacgcgcctgtagtcccagctactcgggaggcagagacaggagaatcgtttgcacccgggaggcggaggttgttgcagtgagccgagatcgcgccaatgcactccagcctgggctacagagtgagactccatctcaaaaaaaaacaaaaaaaatcacctcatagtttatgtctgacttactccaaacctcagttatctgatttgtagtctgtgtcaggaaagttttcttcatatctattctgtctccctcctctttgattttaaatttttttcttttacccagtaggacaaaaaagagcagttggtcatcatccccaatattcttagtcttcagtatgcttcaggcctctcaatgaacacttaagtctcaattcttcagacaaaattgcttaagctcttctcctcagtcctattttaatgactttatatttaagaatatagaattatattttcttttatattcaaattcattactccagttaagtaatagtttgatagtttgatagaatcgagagttaagatgtttctatttgaaagtggattcaaccatcagaccaccagcaaatcggcacttaatttttgtgttatctaacattttctattgtggaattttatgattttatattctcattagttataactaaaaagccatgcacacagaattgtatatcattttgccattaaaattttttaacatattgcagcaagcttagttttatgattgagccacaaccttttacatattttttgtatgaaatattaaacactaaatgcaagattaactttcaaaagcaaaccctacattaatcaggtattatctatggacatttttgtagaccacttttgaaatacttattattttgcaacatagactggactatacaactttcatttaacttttaggtgactgatttaagttgagtgtgcatatagagaaaaacctagaaatttatctcatggcagatacatttgaaagtacttcagaagaatttatgctgtatattaaaactaggctcaaaataaatctatcgtatctttaaaagtccaattctgttattactgtgatgtttgtagtgttactattaaacattgtgaacatacacatttttaaaacaacttgaaacccattttaaaatctgggtaagagagaaggaatcttcagaacaaaatcacatcattagggtgtccagtttatgattgaatttttaagcaaattactgtatttgaaactacaacttgatttggttttcagttttaaaaggcaacatgtgggttttatccattttatttatacctttagatttcagaaacatcttcatgttttagatgcattctacagacatcatgttacttaaaaactcagggcccctttcatccctttgtacactgaaaaagttcaattgttagcaagtaagcaattagatccagttgaatatttaaagtgtttgttgcacagttcatttaatgtttcatcttatttgactttttcacatagatataatatcagatttcattaattataaaaagttgcccagttctgtaattactgaacagagggaatgactcaactaattggctacatgttgcaacaaatttaggcctttagagttgaagcactgacttaaaacgacttacatttctgttctttggtcaaatgaccatacatgatatgggacaaattgtttcattttgtttgttttttaataagggaacttggtaaagtagttcctgtcagataggattttctcaagagacaatttaacgttataaagccttctaaaagtgaactaaatattttataactttagtaatagcttggatggttttgagaaaataacctgtatttatcacattgtcaaacagaatttttctttgaatcagacaagttcaagctctaaattgatgtgctatatacttaaaatcctaggaagttatctgtaaccagtctcttgtctcaggctcttcaccttgttaccaatcctcgtaagtatgtaaaggaaacatatttttaaagaagcttaacagtaagaaaaaattactaaaagatgcaattcaaagataggtcccagtttaacactgaattgcttgacttctgtggcttttctttttctggccacatttatttatttaagcaatttttgtatgccttgttatttcatttccatagagattatattgtatcagtgtttatgtaagctggaatcatcctcagttttttgctgataatttttcaaataaagatacatggataattgtaaaatacactaactcttagggtgttgtagtagctgaaacatggagatgcgtagctgtcatgctttttctgaatggacaggagaaacataagctacggagtattcacttctgaggatgcttttccggaaaaagaaaggctagaaaatactcgcacttcctcagaaccctctttcttgttaacgggtatcttttgttggtgtgttttgctcttacattacagatagactatcatatatgactttatgaataatttcagttattttgcttttgtataagctgtctgaagccttgctatgctgtataagttgtgtttgatggatcagtgtgagtataaaataaagcaaatcacttttcttttgtattatctatggatgccactatgaaagctgacattaagccactaaagagttttctatgaataagtgtaagtaaatgctttgatatatataaacctaaataaaaagattgtattgatacagagacattggagaaggagattttaaggcagttctttaggtttaaaaaggcttgctgtaaaatggtgcgttattccgtttattaaagatcatattaatgacaata

SEQ ID NO: 3628 - DNA, 3079 bp, Homo sapiens
  source 1..3079: mol_type = unassigned DNA
gggggccggccagaaacgggctggggagggggggccccgcagcccccctgggccatgctgactcccggggcctgacccccccgggccagccccccctcccccagctccgcggcccgccgactggggggggccagcccagccccctggggacccccggagaggtggggggcagccgggggggccgggacggagcggtcgccggcccccaccggagagacggggcgacggccgcagggggggcggccgggggaccggtcgggccgggaccaagggcaccatgtcgtccggggccaaggagggaggtgggggctctcccgcctaccacctcccccacccccacccccacccaccccagcacgcccaatatgtgggcccctatcggctggagaagacgctgggcaaaggacagacagggctggttaaactcggggtccactgcatcacgggtcagaaggtcgccatcaagatcgtgaaccgggagaagctgtcggagtcggtgctgatgaaggtggagcgggagatcgccatcctgaagctcatcgaacacccacatgtcctcaagctccacgacgtctacgagaacaagaaatatttgtacctggttctggagcacgtctcggggggtgagctattcgactacctggtaaagaaggggagactgacgcccaaggaggcccgaaagttcttccgccagattgtgtctgcgctggacttctgccacagctactccatctgccacagagacctaaagcccgagaacctgcttttggatgagaaaaacaacatccgcattgcagacttcggcatggcgtccctgcaggtgggggacagcctcctggagaccagctgcgggtccccccattatgcgtgtccagaggtgattaagggggaaaaatatgatggccgccgggcagacatgtggagctgtggagtcatcctcttcgccctgctcgtgggggctctgccctttgatgacgacaacctccgccagctgctggagaaggtgaaacggggcgtcttccacatgccccacttcattcctccagattgccagagcctcctgaggggaatgatcgaagtggagcccgaaaaaaggctcagtctggagcaaattcagaaacatccttggtacctaggcgggaaacacgagccagacccgtgcctggagccagcccctggccgccgggtagccatgcggagcctgccatccaacggagagctggaccccgacgtcctagagagcatggcatcactgggctgcttcagggaccgcgagaggctgcatcgcgagctgcgcagtgaggaggagaaccaagaaaagatgatatattatctgcttttggatcggaaggagcggtatcccagctgtgaggaccaggacctgcctccccggaatgatgttgaccccccccggaagcgtgtggattctcccatgctgagccgtcacgggaagcggcgaccagagcggaagtccatggaagtcctgagcatcaccgatgccgggggtggtggctcccctgtacccacccgacgggccttggagatggcccagcacagccagagatcccgtagcgtcagtggagcctccacgggtctgtcctccagccctctaagcagcccaaggagtccggtcttttccttttcaccggagccgggggctggagatgaggctcgaggcgggggctccccgacttccaaaacgcagacgctgccttctcggggccccaggggtgggggcgccggggagcagcccccgccccccagtgcccgctccacacccctgcccggccccccaggctccccgcgctcctctggcgggacccccttgcactcgcctctgcacacgccccgggccagtcccaccgggaccccggggacaacaccaccccccagccccggcggtggcgtcgggggagccgcctggaggagtcgtctcaactccatccgcaacagcttcctgggctcccctcgctttcaccggcgcaagatgcaggtccctaccgctgaggagatgtccagcttgacgccagagtcctccccggagctggcaaaacgctcctggttcgggaacttcatctccttggacaaagaagaacaaatattcctcgtgctaaaggacaaacctctcagcagcatcaaagcagacatcgtccatgcctttctgtcgatccccagcctgagtcacagtgtgctgtcacagaccagcttcagggccgagtacaaggccagtggcggcccctccgtcttccaaaagcccgtccgcttccaggtggacatcagctcctctgagggtccagagccctccccgcgacgggacggcagcggaggtggtggcatctactccgtcaccttcactctcatctcgggtcccagccgtcggttcaagcgagtggtggagaccatccaggcacagctcctgagcactcatgaccagccctccgtgcaggccctggcagacgagaagaacggggcccagacccggcctgctggtgccccaccccgaagcctgcagcccccacccggccgcccagacccagagctgagcagctctccccgccgaggcccccccaaggacaagaagctcctggccaccaacgggacccctctgccctgaccccacggggccggggagggaggggacccccctccaccccccttccgtgccccccaactgtgaatctgtaaataaggcccaaggaacatgtcgggaggggggtggacacaaaaaccggccttgccctgcagggatggggctccacaggccgtgcccaactgggggtggttctaggggaacagggggcgggggagctgtttctattttatttattgattaatttattattttatttattgatcaatctctctgcggggtggggtgggggagggacgggagctggttggggtggcttagcagatccggacagggccctctgtccctgtgtcgtccccaaccccctcttcccgggcccctcctcccctggtcctccccccacgaccttctgtacggatttgctctccggaaggaattctggtttcgcgtgatcctgcctgcgtccgtgtctctgattccgccggcggc

SEQ ID NO: 3629 - DNA, 2095 bp, Homo sapiens
  source 1..2095: mol_type = unassigned DNA
agcggctgggaggggtgggatgccagggttcctgagaggcaacgggctagggactcggacttatgggtcctgggggaagaggacacagctagagaaggagtctaggggtcagaggcaggaggggctaagctaggagtccaggactcccagaggcgggaaacacgagccagacccgtgcctggagccagcccctggccgccgggtagccatgcggagcctgccatccaacggagagctggaccccgacgtcctagagagcatggcatcactgggctgcttcagggaccgcgagaggctgcatcgcgagctgcgcagtgaggaggagaaccaagaaaagatgatatattatctgcttttggatcggaaggagcggtatcccagctgtgaggaccaggacctgcctccccggaatgatgttgaccccccccggaagcgtgtggattctcccatgctgagccgtcacgggaagcggcgaccagagcggaagtccatggaagtcctgagcatcaccgatgccgggggtggtggctcccctgtacccacccgacgggccttggagatggcccagcacagccagagatcccgtagcgtcagtggagcctccacgggtctgtcctccagccctctaagcagcccaaggagtccggtcttttccttttcaccggagccgggggctggagatgaggctcgaggcgggggctccccgacttccaaaacgcagacgctgccttctcggggccccaggggtgggggcgccggggagcagcccccgccccccagtgcccgctccacacccctgcccggccccccaggctccccgcgctcctctggcgggacccccttgcactcgcctctgcacacgccccgggccagtcccaccgggaccccggggacaacaccaccccccagccccggcggtggcgtcgggggagccgcctggaggagtcgtctcaactccatccgcaacagcttcctgggctcccctcgctttcaccggcgcaagatgcaggtccctaccgctgaggagatgtccagcttgacgccagagtcctccccggagctggcaaaacgctcctggttcgggaacttcatctccttggacaaagaagaacaaatattcctcgtgctaaaggacaaacctctcagcagcatcaaagcagacatcgtccatgcctttctgtcgatccccagcctgagtcacagtgtgctgtcacagaccagcttcagggccgagtacaaggccagtggcggcccctccgtcttccaaaagcccgtccgcttccaggtggacatcagctcctctgagggtccagagccctccccgcgacgggacggcagcggaggtggtggcatctactccgtcaccttcactctcatctcgggtcccagccgtcggttcaagcgagtggtggagaccatccaggcacagctcctgagcactcatgaccagccctccgtgcaggccctggcagacgagaagaacggggcccagacccggcctgctggtgccccaccccgaagcctgcagcccccacccggccgcccagacccagagctgagcagctctccccgccgaggcccccccaaggacaagaagctcctggccaccaacgggacccctctgccctgaccccacggggccggggagggaggggacccccctccaccccccttccgtgccccccaactgtgaatctgtaaataaggcccaaggaacatgtcgggaggggggtggacacaaaaaccggccttgccctgcagggatggggctccacaggccgtgcccaactgggggtggttctaggggaacagggggcgggggagctgtttctattttatttattgattaatttattattttatttattgatcaatctctctgcggggtggggtgggggagggacgggagctggttggggtggcttagcagatccggacagggccctctgtccctgtgtcgtccccaaccccctcttcccgggcccctcctcccctggtcctccccccacgaccttctgtacggatttgctctccggaaggaattctggtttcgcgtgatcctgcctgcgtccgtgtctctgattccgccggcggc

SEQ ID NO: 3630 - DNA, 1902 bp, Homo sapiens
  source 1..1902: mol_type = unassigned DNA
agtctttcattgcgcgcctacatgtgcctacgacctcacttctgcttctctacgactcaccaccctcacagctggagcaaattcagaaacatccttggtacctaggcgggaaacacgagccagacccgtgcctggagccagcccctggccgccgggtagccatgcggagcctgccatccaacggagagctggaccccgacgtcctagagagcatggcatcactgggctgcttcagggaccgcgagaggctgcatcgcgagctgcgcagtgaggaggagaaccaagaaaagatgatatattatctgcttttggatcggaaggagcggtatcccagctgtgaggaccaggacctgcctccccggaatgatgttgaccccccccggaagcgtgtggattctcccatgctgagccgtcacgggaagcggcgaccagagcggaagtccatggaagtcctgagcatcaccgatgccgggggtggtggctcccctgtacccacccgacgggccttggagatggcccagcacagccagagatcccgtagcgtcagtggagcctccacgggtctgtcctccagccctctaagcagcccaaggagtccggtcttttccttttcaccggagccgggggctggagatgaggctcgaggcgggggctccccgacttccaaaacgcagacgctgccttctcggggccccaggggtgggggcgccggggagcagcccccgccccccagtgcccgctccacacccctgcccggccccccaggctccccgcgctcctctggcgggacccccttgcactcgcctctgcacacgccccgggccagtcccaccgggaccccggggacaacaccaccccccagccccggcggtggcgtcgggggagccgcctggaggagtcgtctcaactccatccgcaacagcttcctgggctcccctcgctttcaccggcgcaagatgcaggtccctaccgctgaggagatgtccagcttgacgccagagtcctccccggagctggcaaaacgctcctggttcgggaacttcatctccttggacaaagaagaacaaatattcctcgtgctaaaggacaaacctctcagcagcatcaaagcagacatcgtccatgcctttctgtcgatccccagcctgagtcacagtgtgctgtcacagaccagcttcagggccgagtacaaggccagtggcggcccctccgtcttccaaaagcccgtccgcttccaggtggacatcagctcctctgagggtccagagccctccccgcgacgggacggcagcggaggtggtggcatctactccgtcaccttcactctcatctcgggtcccagccgtcggttcaagcgagtggtggagaccatccaggcacagctcctgagcactcatgaccagccctccgtgcaggccctggcagacgagaagaacggggcccagacccggcctgctggtgccccaccccgaagcctgcagcccccacccggccgcccagacccagagctgagcagctctccccgccgaggcccccccaaggacaagaagctcctggccaccaacgggacccctctgccctgaccccacggggccggggagggaggggacccccctccaccccccttccgtgccccccaactgtgaatctgtaaataaggcccaaggaacatgtcgggaggggggtggacacaaaaaccggccttgccctgcagggatggggctccacaggccgtgcccaactgggggtggttctaggggaacagggggcgggggagctgtttctattttatttattgattaatttattattttatttattgatcaatctctcctcccctggtcctccccccacgaccttctgtacggatttgctctccggaaggaattctggtttcgcgtg

SEQ ID NO: 3631 - DNA, 1687 bp, Homo sapiens
  source 1..1687: mol_type = unassigned DNA
attcgaagtggctcccacaaaagctgctgcagagccccagacattcagaagccaatagtgaaggggccaaaagccatccctcaatgttcactgacactttgcgagccttggggcaagttggcgatgtcaaaacatgtttttagggcgtgtttgccaacatacaggtcttgggcaggattgcagacctctgcagatggtaccaaagtaaagggggagatggtagctgaataatctcttatcatccctaaagtgcaaagtgaaatgagagtggatttttccttccaaatccacttggagtgagtcccgaaagactcacttttgcggcaatccccacaatgacatcactggagcggaggttatataatttaaagcaaccacatctccacagcacttcccagaagagaaaactcctccaaaagcagctctcactatcagaaaacccaactacagttgtgaacgccttcattttctgcctgaggtctcagtccgtcggcccagactgaagtgcagtggcacaatcatagctcgctgcagcctcgaccttccaggcttaaacgattctcccacctcagcctctcgagttgctgggaccacaggtcactgtgcatggcatcatcctggccccctctagagctccaatcctccaaccagagccagctcttccctcaaaatgctacggcctgtgacaatgctccagaagcctgggacctgctgcacagagtgctgccaacatttatcatctccatctgtttcttcggcctcctagggaacctttttgtcctgttggtcttcctcctgccccggcggcaactgaacgtggcagaaatctacctggccaacctggcagcctctgatctggtgtttgtcttgggcttgcccttctgggcagagaatatctggaaccagtttaactggcctttcggagccctcctctgccgtgtcatcaacggggtcatcaaggccaatttgttcatcagcatcttcctggtggtggccatcagccaggaccgctaccgcgtgctggtgcaccctatggccagccggaggcagcagcggcggaggcaggcccgggtcacctgcgtgctcatctgggttgtggggggcctcttgagcatccccacattcctgctgcgatccatccaagccgtcccagatctgaacatcaccgcctgcatcctgctcctcccccatgaggcctggcactttgcaaggattgtggagttaaatattctgggtttcctcctaccactggctgcgatcgtcttcttcaactaccacatcctggcctccctgcgaacgcgggaggaggtcagcaggacaaggtgcgggggccgcaaggatagcaagaccacagcgctgatcctcacgctcgtggttgccttcctggtctgctgggccccttaccacttctttgccttcctggaattcttattccaggtgcaagcagtccgaggctgcttttgggaggacttcattgacctgggcctgcaattggccaacttctttgccttcactaacagctccctgaatccagtaatttatgtctttgtgggccggctcttcaggaccaaggtctgggaactttataaacaatgcacccctaaaagtcttgctccaatatcttcatcccataggaaagaaatcttccaacttttctggcggaattaaaacagcattgaaccaagaa

SEQ ID NO: 3632 - DNA, 4197 bp, Homo sapiens
  source 1..4197: mol_type = unassigned DNA
atcactacccagcccttgaaagatgagctgttcccgccgccactccagctctggcttctgggctccgaggaggggtggggacggtggggacggtggggacatcaggctgccccgcagtaccagggagcgactgaagtgcccatgccgcttgctccggagaaggtgtggcctcactcacatcccactctgagtccaaatgttctctccctggaagatatcaatgtttctgtctgttcgtgaggactccgtgcccaccacggcctctttcagcgccgacatgctcaatgtcaccttgcaagggcccactcttaacgggacctttgcccagagcaaatgcccccaagtggagtggctgggctggctcaacaccatccagccccccttcctctgggtgctgttcgtgctggccaccctagagaacatctttgtcctcagcgtcttctgcctgcacaagagcagctgcacggtggcagagatctacctggggaacctggccgcagcagacctgatcctggcctgcgggctgcccttctgggccatcaccatctccaacaacttcgactggctctttggggagacgctctgccgcgtggtgaatgccattatctccatgaacctgtacagcagcatctgtttcctgatgctggtgagcatcgaccgctacctggccctggtgaaaaccatgtccatgggccggatgcgcggcgtgcgctgggccaagctctacagcttggtgatctgggggtgtacgctgctcctgagctcacccatgctggtgttccggaccatgaaggagtacagcgatgagggccacaacgtcaccgcttgtgtcatcagctacccatccctcatctgggaagtgttcaccaacatgctcctgaatgtcgtgggcttcctgctgcccctgagtgtcatcaccttctgcacgatgcagatcatgcaggtgctgcggaacaacgagatgcagaagttcaaggagatccagacagagaggagggccacggtgctagtcctggttgtgctgctgctattcatcatctgctggctgcccttccagatcagcaccttcctggatacgctgcatcgcctcggcatcctctccagctgccaggacgagcgcatcatcgatgtaatcacacagatcgcctccttcatggcctacagcaacagctgcctcaacccactggtgtacgtgatcgtgggcaagcgcttccgaaagaagtcttgggaggtgtaccagggagtgtgccagaaagggggctgcaggtcagaacccattcagatggagaactccatgggcacactgcggacctccatctccgtggaacgccagattcacaaactgcaggactgggcagggagcagacagtgagcaaacgccagcagggctgctgtgaatttgtgtaaggattgagggacagttgcttttcagcatgggcccaggaatgccaaggagacatctatgcacgaccttgggaaatgagttgatgtctccggtaaaacaccggagactaattcctgccctgcccaattttgcagggagcatggctgtgaggatggggtgaactcacgcacagccaaggactccaaaatcacaacagcattactgttcttatttgctgccacacctgagccagcctgctccttcccaggagtggaggaggcctgggggcagggagaggagtgactgagcttccctcccgtgtgttctccgtccctgccccagcaagacaacttagatctccaggagaactgccatccagctttggtgcaatggctgagtgcacaagtgagttgttgccctgggtttctttaatctattcagctagaactttgaaggacaatttcttgcattaataaaggttaagccctgaggggtccctgataacaacctggagaccaggattttatggctcccctcactgatggacaaggaggtctgtgccaaagaagaatccaataagcacatattgagcacttgctgtatatgcagtattgagcactgtaggcaagagggaagaaagagaaggagccatctccatcttgaaggaactcaaagactcaagtgggaacgactgggcactgccaccaccagaaagctgttcgacgagacggtcgagcagggtgctgtgggtgatatggacagcagaagggggagaccaaggttccagctcaaccaataactattgcacaaccatctgtccctgcctcagttccctcttctgtaacatgaagtcgttgtgagggttaaaggcagtaacaggtataaagtacttagaaaagcaaagggtgctacgtacatgtgaggcatcattacgcagacgtaactgggatatgtttactataaggaaaagacactgaggtctagaaatagctccgtggagcagaatcagtattgggagccggtggcggtgtgaagcaccagtgtctggcacacagtaggtgctcattggctcccttccacctgtcattcccaccaccctgaggccccaaccgccacacacacaggagcatttggagagaaggccatgtcttcaaagtctgatttgtgatgaggcagaggaagatatttctaatcggtcttgcccagaggatcacagtgctgagaccccccaccaccagccggtacctgggaagggggagagtgcaggcctgctcagggactgttcctgtctcagcaaccaagggattgttcctgtcaatcaatggtttattggaaggtggcccagtatgagccctagaagagtgtgaaaaggaatggcaatggtgttcaccatcggcagtgccagggcagcactcattcacttgataaatgaatatttattagctggttggagagctagaacctggagagctagaacctggagaactagaacctggagggctagaactggagaggctagaaccaagaagggctagaacctggaggggctagaacctagagaagctaaaacctgagctagaagctggaggactagaacctggagggctggaatctggagagctagaacctggagggctagaacctggagggctagaatctggagagctagaacctggagggctagaatctggagagctagaacctggagggctagaacctggagagctagaacctagaagggctagaacctggagggctggaatctggagagctagaacctggagggctagaacctggagggctagaacctagaagggctagaacctggagggctggaatctggagagctagaacctggagggctagaacctggagggctagaacctagaagggctagaacctggagggctagaacctggcaggttagaacctagaagggctagaacctggagagccagaacctggagggctagaacctggaagggctagaacctgtagagctagaacatggagagctagaacccggcaggctagaacctggcaagctagaacctggagggaatgaacctggagggctagaacctggagaatgagaaaaatttacatggcaaagagcccataaatcctgaccaatccaactctgaattttaaagcaaaagcgtcaaaaaaaagattccctccttacccccaacccactcttttttcccaccacccactctcctctgcctcagtaagtatctggaggaagaaaacaggtgaaagaagaagtaaaaaccatttagtattagtattagaatgaagtcaaactgtgccacacatggtgaatgaaaaaaaaaaaaagaggctgtgttttgtcacacagggcagtcattcagcaccagagcacgtgatggtctgagactctcttaggagcagagctctgccgcaatggccatgtggggatccacacctggtctgaggggcaactgagtctgcgggagaagagcggccctatgcatggtgtagatgccctgataaagaacatctgtcctgtgaaagactcaatgagctgttatgttgtaaacaggaagcatttcacatccaaacgagaaaatcatgtaaacatgtgtcttttctgtagagcataataaatggatgaggtttttgcatagctctagcatttgttacaactcccgaaacccccgagtttggtccctggggtaccgccttgcacactcagaagcctttgggaaggggtgctattcatttctgctcaatctgttaacaggcttctggcatgtagatcagtggtctccaagcttttgtgattgtat

SEQ ID NO: 3633 - DNA, 1600 bp, Homo sapiens
  source 1..1600: mol_type = unassigned DNA
actccagctctggcttctgggctccgaggaggggtggggacggtggggacggtggggacatcaggctgccccgcagtaccagggagcgactgaagtgcccatgccgcttgctccggagaaggtgtggcctcactcacatcccactctgagtccaaatgttctctccctggaagatatcaatgtttctgtctgttcgtgaggactccgtgcccaccacggcctctttcaggtgaggtcattgtggttcaaggacgttaagtaacttccccagcgtcacacggcttataagtaaggcagccaggatgtgaacccagtaggactatctggctgcaaagtccccaccctccctcgccatctgtatcctccaatcatcttcagtgctttgctgatagaagcgccgacatgctcaatgtcaccttgcaagggcccactcttaacgggacctttgcccagagcaaatgcccccaagtggagtggctgggctggctcaacaccatccagccccccttcctctgggtgctgttcgtgctggccaccctagagaacatctttgtcctcagcgtcttctgcctgcacaagagcagctgcacggtggcagagatctacctggggaacctggccgcagcagacctgatcctggcctgcgggctgcccttctgggccatcaccatctccaacaacttcgactggctctttggggagacgctctgccgcgtggtgaatgccattatctccatgaacctgtacagcagcatctgtttcctgatgctggtgagcatcgaccgctacctggccctggtgaaaaccatgtccatgggccggatgcgcggcgtgcgctgggccaagctctacagcttggtgatctgggggtgtacgctgctcctgagctcacccatgctggtgttccggaccatgaaggagtacagcgatgagggccacaacgtcaccgcttgtgtcatcagctacccatccctcatctgggaagtgttcaccaacatgctcctgaatgtcgtgggcttcctgctgcccctgagtgtcatcaccttctgcacgatgcagatcatgcaggtgctgcggaacaacgagatgcagaagttcaaggagatccagacagagaggagggccacggtgctagtcctggttgtgctgctgctattcatcatctgctggctgcccttccagatcagcaccttcctggatacgctgcatcgcctcggcatcctctccagctgccaggacgagcgcatcatcgatgtaatcacacagatcgcctccttcatggcctacagcaacagctgcctcaacccactggtgtacgtgatcgtgggcaagcgcttccgaaagaagtcttgggaggtgtaccagggagtgtgccagaaagggggctgcaggtcagaacccattcagatggagaactccatgggcacactgcggacctccatctccgtggaacgccagattcacaaactgcaggactgggcagggagcagacagtgagcaaacgccagcagggctgctgtgaatttgtgtaaggattgagggacagttgcttttcagcatgggcccaggaatgccaaggagacatctatgcacgaccttg

SEQ ID NO: 3634 - DNA, 6845 bp, Homo sapiens
  source 1..6845: mol_type = unassigned DNA
agagcggagagcgaaggtggccgcagccttcccggccccacagccagcctggctccagctgggcaggagtgcagagctcagctggaggcggagggggaagtgcccaggaggctgatgacatcactacccagcccttgaaagatgagctgttcccgccgccactccagctctggcttctgggctccgaggaggggtggggacggtggggacggtggggacatcaggctgccccgcagtaccagggagcgactgaagtgcccatgccgcttgctccggagaagcccaggtgtggcctcactcacatcccactctgagtccaaatgttctctccctggaagatatcaatgtttctgtctgttcgtgaggactccgtgcccaccacggcctctttcaggtgctgcctatgatgaagatgagcagatggccatctcagctggggccacagtgcactggacctatagtttccaattccgcactcagcaggcatctttctgatgatccgatggcttctcagagccagggatgggccaggatccatccccttggctactgtcttgctgagaaattaataagcagcatctggtgctatactttggtctctagtgagttagctcatgaaagatgacagactctccaagccaggggtatgcaggaaatgggttttctgtagctacagaaatggggttgagggttggaccaaggggactacccaggggaagtcttaccttcagaggactctggaaaggaggctgcaagttttcatgggtcaagaattcagagcccagtagagacagcttatctctgttccaagatgtctggggccttggttggaagattcaaaggctaggaaaccaggagccaccaaaagcgtaactggggccagaggatccactttcaaggtggcaagttggttccccccatgtggctgcttgagtatcctcacatggcggctcacatccttccaagtaagcaatgcaaaaggccaagaaagatgctgcaaagcatgttatgacctagcctcagaaatcacacaccatccctgccaccattagtaagaagtccagcccacgtccaggagaagaggaagcagattcctccttttgaaatgaagaatatcaagtaattcggggggcatatgaaagccaccacacaccacagggatctttttagagcatacttcttataccatcactgtagttccttaagactcaggggcaaagcctcacttccttagcacccagtgaagaccacgcttactccctcactcaacctcttgctacttcccacctctcctgtccaacatctagtgtcactttccagaacataccaacagcttccccagttctgtgcctctgctcaggctgttccccctgcctggtccacttgtcctccttcttgtcccgtcaaaatgcttcttatccttcaagacccagctctagagtcacctccaaccccttacccaccagccccctctccaagtctgtgtcccacaacccccctgctccctccagggcaccctccaccctctgggccacagttgtcaggagtcaggcagggcaggggccgggtggtgtcttctttgtgttcttgcactcagggcagagctcagcacagagcagacgctcaaaaaacatttaaaggatagaagcattgatttgtgggtcccccagtctggctccaggatgccagccagctgctcctagaagcaaacggacttttcctgggaaatcccagaggtgatgatcagtatctctcccgtgactcgtagttcagctcttcctccatgagcctgactatcagtggaccttccagaaagagccccttttccttctctcacccacagcacagggcactgggaaaatgcccaatgagtcctgccctctgggttgtgctttggacttttcagtgtgtcttcgcatccactcttcagcttgaatgttgcaacagccatgaaaaaagaaatgcaaagcgattcaggatgagagcaataccctactccaaagaaggcaaaatagaagctcagagaggtcaagcattttgcccaagaccacacagctaggagtggaactcatggctgtccaagccccacgcctctgctgaaggtagagatgaattacagcaacaagtctagaaaggtgcctgccctatggtctgtgagtcttgcctaagaatgaaagaggagccagtgggttaaagatgaggtcaccaacaaacggtggtgttggagtttaccactggttattttaatgggtttgcaagaattgttaattactaatgtttattgagcctagtgcagtgcttggggcattttgcacattgtctctgatccctatcacaaccctgagaggtagtttttttaactcccattttacaggtgaggtcattgtggttcaaggacgttaagtaacttccccagcgtcacacggcttataagtaaggcagccaggatgtgaacccagtaggactatctggctgcaaagtccccaccctccctcgccatctgtatcctccaatcatcttcagtgctttgctgatagaaggtacggaaatacgatgccacagactgtccaggaagacagaaactaggcagatgggctggccatggtctccaagccagactggaatctccaggtctggaatgatatcatttttctcttttaataaattaactcacccaccacacggctttgagaggctcaaaggtgaccaactcccttgggagggccccggttgataaggaaggaatgtgaatcctcccatcacggaagcttcaaggaggtcaagggtccaacacttgagattgttagtgctgttggtggatactggccaaggaaatatcccagtggagcctcgagatgaagaacatgaggcccccgtttagatccaaggatcagagggggctctgtaagacccaggggagtcaggtgcactggagcgcgggctgcagaaaacagcctgagctccacctcggcttctccttgccctggctggttgtccttaacccctgtctccttctggaccagtttttgtccttcccttgtgaccctgaggggtaacagcctcttttccactttctttcagcgccgacatgctcaatgtcaccttgcaagggcccactcttaacgggacctttgcccagagcaaatgcccccaagtggagtggctgggctggctcaacaccatccagccccccttcctctgggtgctgttcgtgctggccaccctagagaacatctttgtcctcagcgtcttctgcctgcacaagagcagctgcacggtggcagagatctacctggggaacctggccgcagcagacctgatcctggcctgcgggctgcccttctgggccatcaccatctccaacaacttcgactggctctttggggagacgctctgccgcgtggtgaatgccattatctccatgaacctgtacagcagcatctgtttcctgatgctggtgagcatcgaccgctacctggccctggtgaaaaccatgtccatgggccggatgcgcggcgtgcgctgggccaagctctacagcttggtgatctgggggtgtacgctgctcctgagctcacccatgctggtgttccggaccatgaaggagtacagcgatgagggccacaacgtcaccgcttgtgtcatcagctacccatccctcatctgggaagtgttcaccaacatgctcctgaatgtcgtgggcttcctgctgcccctgagtgtcatcaccttctgcacgatgcagatcatgcaggtgctgcggaacaacgagatgcagaagttcaaggagatccagacagagaggagggccacggtgctagtcctggttgtgctgctgctattcatcatctgctggctgcccttccagatcagcaccttcctggatacgctgcatcgcctcggcatcctctccagctgccaggacgagcgcatcatcgatgtaatcacacagatcgcctccttcatggcctacagcaacagctgcctcaacccactggtgtacgtgatcgtgggcaagcgcttccgaaagaagtcttgggaggtgtaccagggagtgtgccagaaagggggctgcaggtcagaacccattcagatggagaactccatgggcacactgcggacctccatctccgtggaacgccagattcacaaactgcaggactgggcagggagcagacagtgagcaaacgccagcagggctgctgtgaatttgtgtaaggattgagggacagttgcttttcagcatgggcccaggaatgccaaggagacatctatgcacgaccttgggaaatgagttgatgtctccggtaaaacaccggagactaattcctgccctgcccaattttgcagggagcatggctgtgaggatggggtgaactcacgcacagccaaggactccaaaatcacaacagcattactgttcttatttgctgccacacctgagccagcctgctccttcccaggagtggaggaggcctgggggcagggagaggagtgactgagcttccctcccgtgtgttctccgtccctgccccagcaagacaacttagatctccaggagaactgccatccagctttggtgcaatggctgagtgcacaagtgagttgttgccctgggtttctttaatctattcagctagaactttgaaggacaatttcttgcattaataaaggttaagccctgaggggtccctgataacaacctggagaccaggattttatggctcccctcactgatggacaaggaggtctgtgccaaagaagaatccaataagcacatattgagcacttgctgtatatgcagtattgagcactgtaggcaagagggaagaaagagaaggagccatctccatcttgaaggaactcaaagactcaagtgggaacgactgggcactgccaccaccagaaagctgttcgacgagacggtcgagcagggtgctgtgggtgatatggacagcagaagggggagaccaaggttccagctcaaccaataactattgcacaaccatctgtccctgcctcagttccctcttctgtaacatgaagtcgttgtgagggttaaaggcagtaacaggtataaagtacttagaaaagcaaagggtgctacgtacatgtgaggcatcattacgcagacgtaactgggatatgtttactataaggaaaagacactgaggtctagaaatagctccgtggagcagaatcagtattgggagccggtggcggtgtgaagcaccagtgtctggcacacagtaggtgctcattggctcccttccacctgtcattcccaccaccctgaggccccaaccgccacacacacaggagcatttggagagaaggccatgtcttcaaagtctgatttgtgatgaggcagaggaagatatttctaatcggtcttgcccagaggatcacagtgctgagaccccccaccaccagccggtacctgggaagggggagagtgcaggcctgctcagggactgttcctgtctcagcaaccaagggattgttcctgtcaatcaatggtttattggaaggtggcccagtatgagccctagaagagtgtgaaaaggaatggcaatggtgttcaccatcggcagtgccagggcagcactcattcacttgataaatgaatatttattagctggttggagagctagaacctggagagctagaacctggagaactagaacctggagggctagaactggagaggctagaaccaagaagggctagaacctggaggggctagaacctagagaagctaaaacctgagctagaagctggaggactagaacctggagggctggaatctggagagctagaacctggagggctagaacctggagggctagaatctggagagctagaacctggagggctagaatctggagagctagaacctggagggctagaacctggagagctagaacctagaagggctagaacctggagggctggaatctggagagctagaacctggagggctagaacctggagggctagaacctagaagggctagaacctggagggctggaatctggagagctagaacctggagggctagaacctggagggctagaacctagaagggctagaacctggagggctagaacctggcaggttagaacctagaagggctagaacctggagagccagaacctggagggctagaacctggaagggctagaacctgtagagctagaacatggagagctagaacccggcaggctagaacctggcaagctagaacctggagggaatgaacctggagggctagaacctggagaatgagaaaaatttacatggcaaagagcccataaatcctgaccaatccaactctgaattttaaagcaaaagcgtcaaaaaaaagattccctccttacccccaacccactcttttttcccaccacccactctcctctgcctcagtaagtatctggaggaagaaaacaggtgaaagaagaagtaaaaaccatttagtattagtattagaatgaagtcaaactgtgccacacatggtgaatgaaaaaaaaaaaaagaggctgtgttttgtcacacagggcagtcattcagcaccagagcacgtgatggtctgagactctcttaggagcagagctctgccgcaatggccatgtggggatccacacctggtctgaggggcaactgagtctgcgggagaagagcggccctatgcatggtgtagatgccctgataaagaacatctgtcctgtgaaagactcaatgagctgttatgttgtaaacaggaagcatttcacatccaaacgagaaaatcatgtaaacatgtgtcttttctgtagagcataataaatggatgaggtttttgcata

SEQ ID NO: 3635 - DNA, 4040 bp, Homo sapiens
  source 1..4040: mol_type = unassigned DNA
gacatcactacccagcccttgaaagatgagctgttcccgccgccactccagctctggcttctgggctccgaggaggggtggggacggtggggacggtggggacatcaggctgccccgcagtaccagggagcgactgaagtgcccatgccgcttgctccggagaagcccaggtgtggcctcactcacatcccactctgagtccaaatgttctctccctggaagatatcaatgtttctgtctgttcgtgaggactccgtgcccaccacggcctctttcagcgccgacatgctcaatgtcaccttgcaagggcccactcttaacgggacctttgcccagagcaaatgcccccaagtggagtggctgggctggctcaacaccatccagccccccttcctctgggtgctgttcgtgctggccaccctagagaacatctttgtcctcagcgtcttctgcctgcacaagagcagctgcacggtggcagagatctacctggggaacctggccgcagcagacctgatcctggcctgcgggctgcccttctgggccatcaccatctccaacaacttcgactggctctttggggagacgctctgccgcgtggtgaatgccattatctccatgaacctgtacagcagcatctgtttcctgatgctggtgagcatcgaccgctacctggccctggtgaaaaccatgtccatgggccggatgcgcggcgtgcgctgggccaagctctacagcttggtgatctgggggtgtacgctgctcctgagctcacccatgctggtgttccggaccatgaaggagtacagcgatgagggccacaacgtcaccgcttgtgtcatcagctacccatccctcatctgggaagtgttcaccaacatgctcctgaatgtcgtgggcttcctgctgcccctgagtgtcatcaccttctgcacgatgcagatcatgcaggtgctgcggaacaacgagatgcagaagttcaaggagatccagacagagaggagggccacggtgctagtcctggttgtgctgctgctattcatcatctgctggctgcccttccagatcagcaccttcctggatacgctgcatcgcctcggcatcctctccagctgccaggacgagcgcatcatcgatgtaatcacacagatcgcctccttcatggcctacagcaacagctgcctcaacccactggtgtacgtgatcgtgggcaagcgcttccgaaagaagtcttgggaggtgtaccagggagtgtgccagaaagggggctgcaggtcagaacccattcagatggagaactccatgggcacactgcggacctccatctccgtggaacgccagattcacaaactgcaggactgggcagggagcagacagtgagcaaacgccagcagggctgctgtgaatttgtgtaaggattgagggacagttgcttttcagcatgggcccaggaatgccaaggagacatctatgcacgaccttgggaaatgagttgatgtctccggtaaaacaccggagactaattcctgccctgcccaattttgcagggagcatggctgtgaggatggggtgaactcacgcacagccaaggactccaaaatcacaacagcattactgttcttatttgctgccacacctgagccagcctgctccttcccaggagtggaggaggcctgggggcagggagaggagtgactgagcttccctcccgtgtgttctccgtccctgccccagcaagacaacttagatctccaggagaactgccatccagctttggtgcaatggctgagtgcacaagtgagttgttgccctgggtttctttaatctattcagctagaactttgaaggacaatttcttgcattaataaaggttaagccctgaggggtccctgataacaacctggagaccaggattttatggctcccctcactgatggacaaggaggtctgtgccaaagaagaatccaataagcacatattgagcacttgctgtatatgcagtattgagcactgtaggcaagagggaagaaagagaaggagccatctccatcttgaaggaactcaaagactcaagtgggaacgactgggcactgccaccaccagaaagctgttcgacgagacggtcgagcagggtgctgtgggtgatatggacagcagaagggggagaccaaggttccagctcaaccaataactattgcacaaccatctgtccctgcctcagttccctcttctgtaacatgaagtcgttgtgagggttaaaggcagtaacaggtataaagtacttagaaaagcaaagggtgctacgtacatgtgaggcatcattacgcagacgtaactgggatatgtttactataaggaaaagacactgaggtctagaaatagctccgtggagcagaatcagtattgggagccggtggcggtgtgaagcaccagtgtctggcacacagtaggtgctcattggctcccttccacctgtcattcccaccaccctgaggccccaaccgccacacacacaggagcatttggagagaaggccatgtcttcaaagtctgatttgtgatgaggcagaggaagatatttctaatcggtcttgcccagaggatcacagtgctgagaccccccaccaccagccggtacctgggaagggggagagtgcaggcctgctcagggactgttcctgtctcagcaaccaagggattgttcctgtcaatcaatggtttattggaaggtggcccagtatgagccctagaagagtgtgaaaaggaatggcaatggtgttcaccatcggcagtgccagggcagcactcattcacttgataaatgaatatttattagctggttggagagctagaacctggagagctagaacctggagaactagaacctggagggctagaactggagaggctagaaccaagaagggctagaacctggaggggctagaacctagagaagctaaaacctgagctagaagctggaggactagaacctggagggctggaatctggagagctagaacctggagggctagaacctggagggctagaatctggagagctagaacctggagggctagaatctggagagctagaacctggagggctagaacctggagagctagaacctagaagggctagaacctggagggctggaatctggagagctagaacctggagggctagaacctggagggctagaacctagaagggctagaacctggagggctggaatctggagagctagaacctggagggctagaacctggagggctagaacctagaagggctagaacctggagggctagaacctggcaggttagaacctagaagggctagaacctggagagccagaacctggagggctagaacctggaagggctagaacctgtagagctagaacatggagagctagaacccggcaggctagaacctggcaagctagaacctggagggaatgaacctggagggctagaacctggagaatgagaaaaatttacatggcaaagagcccataaatcctgaccaatccaactctgaattttaaagcaaaagcgtcaaaaaaaagattccctccttacccccaacccactcttttttcccaccacccactctcctctgcctcagtaagtatctggaggaagaaaacaggtgaaagaagaagtaaaaaccatttagtattagtattagaatgaagtcaaactgtgccacacatggtgaatgaaaaaaaaaaaaagaggctgtgttttgtcacacagggcagtcattcagcaccagagcacgtgatggtctgagactctcttaggagcagagctctgccgcaatggccatgtggggatccacacctggtctgaggggcaactgagtctgcgggagaagagcggccctatgcatggtgtagatgccctgataaagaacatctgtcctgtgaaagactcaatgagctgttatgttgtaaacaggaagcatttcacatccaaacgagaaaatcatgtaaacatgtgtcttttctgtagagcataataaatggatgaggtttttgca

SEQ ID NO: 3636 - DNA, 1878 bp, Homo sapiens
  source 1..1878: mol_type = unassigned DNA
gggcactgggcaggaaggggagggggagcgagcgcgagaaatgcagaggctgcagcggcggcggcggcggcagtagcggcagcggcgacgacggcggcggcagcgctccaactggctcctcgctccgggctccgccgtcgagccgggagagagcctccgccagcggccaggcaccagccagacgacgccagcgaccccggcctctcggcggcaccgcgctaactcaggggctgcataggcacccagagccgaactccaagatgggaggcaagctcagcaagaagaagaagggctacaatgtgaacgacgagaaagccaaggagaaagacaagaaggccgagggcgcggcgacggaagaggaggggaccccgaaggagagtgagccccaggcggccgcagagcccgccgaggccaaggagggcaaggagaagcccgaccaggacgccgagggcaaggccgaggagaaggagggcgagaaggacgcggcggctgccaaggaggaggccccgaaggcggagcccgagaagacggagggcgcggcagaggccaaggctgagcccccgaaggcgcccgagcaggagcaggcggcccccggccccgctgcgggcggcgaggcccccaaagctgctgaggccgccgcggccccggccgagagcgcggcccctgccgccggggaggagcccagcaaggaggaaggggaacccaaaaagactgaggcgcccgcagctcctgccgcccaggagaccaaaagtgacggggccccagcttcagactcaaaacccggcagctcggaggctgccccctcttccaaggagacccccgcagccacggaagcgcctagttccacacccaaggcccagggccccgcagcctctgcagaagagcccaagccggtggaggccccggcagctaattccgaccaaaccgtaaccgtgaaagagtgacaaggacagcctataggaaaaacaataccacttaaaacaatctcctctctctctctctctctctctctctatctctctctctatctcctctctctctctcctctcctatctctcctctctctctctcctatactaacttgtttcaaattggaagtaatgatatgtattgcccaaggaaaaatacaggatgttgtcccatcaagggagggagggggtgggagaatccaaatagtatttttgtggggaaatatctaatataccttcagtcaactttaccaagaagtcctggatttccaagatccgcgtctgaaagtgcagtacatcgtttgtacctgaaactgccgccacatgcactcctccaccgctgagagttgaatagcttttcttctgcaatgggagttgggagtgatgcgtttgattctgcccacagggcctgtgccaaggcaatcagatctttatgagagcagtattttctgtgttttctttttaatttacagcctttcttattttgatatttttttaatgttgtggatgaatgccagctttcagacagagcccacttagcttgtccacatggatctcaatgccaatcctccattcttcctctccagatatttttgggagtgacaaacattctctcatcctacttagcctacctagatttctcatgacgagttaatgcatgtccgtggttgggtgcacctgtagttctgtttattggtcagtggaaatgaaaaaaaaaaaaaaaaaaagtctgcgttcattgcagttccagtttctcttccattctgtgtcacagacaccaacacaccactcattggaaaatggaaaaaaaaaacaaaaaaaaaacaaaaaaatgtacaatggatgcattgaaattatatgtaattgtataaatggtgcaacagtaataaagttaaacaattaaaaagaa

SEQ ID NO: 3637 - DNA, 738 bp, Homo sapiens
  source 1..738: mol_type = unassigned DNA
agaggctgcagcggcggcggcggcggcagtagcggcagcggcgacgacggcggcggcagcgctccaactggctcctcgctccgggctccgccgtcgagccgggagagagcctccgccagcggccaggcaccagccagacgacgccagcgaccccggcctctcggcggcaccgcgctaactcaggggctgcataggcacccagagccgaactccaagatgggaggcaagctcagcaagaagaagaagggctacaatgtgaacgacgagaaagccaaggagaaagacaagaaggccgagggcgcggcgacggaagaggaggggaccccgaaggagagtgagccccaggcggccgcagagcccgccgaggccaaggagggcaaggagaagcccgaccaggacgccgagggcaaggccgaggagaaggagggcgagaaggacgcggcggctgccaaggaggaggccccgaaggcggagcccgacaaggaggaaggggaacccaaaaagactgaggcgcccgcagctcctgccgcccaggagaccaaaagtgacggggccccagcttcagactcaaaacccggcagctcggaggctgccccctcttccaaggagacccccgcagccacggaagcgcctagttccacacccaaggcccagggccccgcagcctctgcagaagagcccaagccggtggaggccccggcagctaattccgaccaaaccgtaaccgtgaaagagtga

SEQ ID NO: 3638 - DNA, 801 bp, Homo sapiens
  source 1..801: mol_type = unassigned DNA
gcggctgcagcgcgggcgggagcggggacgcgatgtcgccgccgccgcctccttgcgggccggggctgcgcctccggggctgagccgccgccagagccgacagccgagcagccgctgggcgctcccgcggcgcaggaggatgggctgcggcgggagccgggcggatgccatcgagccccgctactacgagagctggacccgggagacagaatccacctggctcacctacaccgactcggacgcgccgcccagcgccgccgccccggacagcggccccgaagcgggcggcctgcactcggttctggaggctgagaagtccaagatcaaggcaccaacagattcagtgtctgatgaaggcttgttctctgcttcaaagatggcacctcttgctgtgttctcacatggcatgctggaagatggactgccctccaatggtgtgccccgatctacagccccaggtggaatacccaacccagagaagaagacgaactgtgagacccagtgcccaaatccccagagcctcagctcaggccctctgacccagaaacagaatggccttcagaccacagaggctaaaagagatgctaagagaatgcctgcaaaagaagtcaccattaatgtaacagatagcatccaacagatggacagaagtcgaagaatcacaaagaactgtgtcaactagcagagagtccaagcagaagggcagatggacttcttcagtgtccttcacggcactggatcccatcaaagaaccttgaagaagtggctgccccttgctggacctgaattctactgagtccc

SEQ ID NO: 3639 - DNA, 2831 bp, Homo sapiens
  source 1..2831: mol_type = unassigned DNA
gctgggagagggcccggactaggggcggcgggcaccgcaggagctccgcgcggctgcagcgcgggcgggagcggggacgcgatgtcgccgccgccgcctccttgcgggccggggctgcgcctccggggctgagccgccgccagagccgacagccgagcagccgctgggcgctcccgcggcgcaggaggatgggctgcggcgggagccgggcggatgccatcgagccccgctactacgagagctggacccgggagacagaatccacctggctcacctacaccgactcggacgcgccgcccagcgccgccgccccggacagcggccccgaagcgggcggcctgcactcgggcatgctggaagatggactgccctccaatggtgtgccccgatctacagccccaggtggaatacccaacccagagaagaagacgaactgtgagacccagtgcccaaatccccagagcctcagctcaggccctctgacccagaaacagaatggccttcagaccacagaggctaaaagagatgctaagagaatgcctgcaaaagaagtcaccattaatgtaacagatagcatccaacagatggacagaagtcgaagaatcacaaagaactgtgtcaactagcagagagtccaagcagaagggcagatggacttcttcagtgtccttcacggcactggatcccatcaaagaaccttgaagaagtggctgccccttgctggacctgaattctactgagtccctggcaagactgtcttacctggcagcaaactgctgcctgatttgttgggaccttctgagccttctacttatcatgtaaatgtattggcacagtgcttacatatgttaataaactgcaaatgtgcagttcagtttgtctctttgcaactcctgtaatacggtctggtgtaaaagtagtgagttaaagctacaggtcagtttatgaaacagaaaagtaggaatgcattttctgggtgaaagagtcacaccttagtgctataactctcctgcccatgatagtgtattctgtttcaggcaagcttattctttccttctttcattttaaatattgtcattacaaatcttaccaggttcacttaaaagctggctttcatccaactctaaacccacatattgaaaaaatcaaggtacaggaaaactccttgttatccttgtttccttagcttggtatgagacagatcggatccagtttcccatgcaccaacccactgcccatggcatgtctttgggaggtgtctgtgaagcagtcatacctgctcctcatctgcctggaaagtcctcctattccagtgtccatgttggcctccagtccttaatgtcaccatgcttgtggccaatgcatccaaataaggatacccctcagggctcagctagacattgcaattttgcatagctttccagttccctttgcttgtcttcttgactgtcttccctctctatcggggtcacttgcaattgttaatcaaagattgaacactgcgtaggagagggagatgatccagagacatgtggcagcaggcatggcttccccttggcctctctgtacactgccccaggactgtcattttggcatctgcaaaggaatcactttagaaagccagcacctggttgatgtgtattcatactgacattagattgatgtgcactgcattagaaatgaggtagctgacacagaaaaaggatgttttgataggaataattttctagtatgtcttgaaacatgttcatctggaagtattttcctccaaagtaatgtagcatgatttttcaaggattgttaacatgcctgggattgggaaagataggactaaagttgtgccaaactatatcaataaattccatgtttagcagaaataggcagcctattggtgttatgtttatgtaacatagtccagagaactgacatgcaggtcaaaagtcagatacgcaacctccttatctgctaactctgttattcttcaaacacaagtgggtagtgtcatttttccttccttccttccattggcagattgtatatttattcacaaaacattaaatgtccatcctgtgccaggtactatgcagatgttgagggatttggggtctggttagtcgtgactatctatcctgaatctaacagtgacttcataactaggagactgaattagacccttaaggtatagtgtgtgttgcaaatcactctgcaatggaaacttttatattcagggtaggtttgtgtcttaaactaggtgttctaatcaatgtacaagactttaccatacacgcaactatagtttttctaaaccttcatcattttgtgattctttgagaaagggcttttaggaactttatgttctaaaaaatgtttttaacaataataagataaaagaaaaacctgtgattcatatgtccccactggcattactcagcaggagcccccagctgccaaaggttggcagtgatcctgcaagttcaagggctctttctccctggggatgtgctttgtggcttctctttacagctttgtttctgcatcagttcactgctgcatgttgtttggaatttatcaccttaagaaagtgtctctgttttatatagaaacactttctcacttacaggggagaaggaaatgcagggcacatgatctggccctccccagaacaatctggatttcacggagacagcaaccagaagttaaaccatgtgactaaaaatgcatctggctactttttcatgtatgtatgagacagaaactaatccttactatcctattaggataccacttttcattgcaaagtttgtgtcaataaagtcattaattttaaacat

SEQ ID NO: 3640 - DNA, 2662 bp, Homo sapiens
  source 1..2662: mol_type = unassigned DNA
gggagagggcccggactaggggcggcgggcaccgcaggagctccgcgcggctgcagcgcgggcgggagcggggacgcgatgtcgccgccgccgcctccttgcgggccggggctgcgcctccggggctgagccgccgccagagccgacagccgagcagccgctgggcgctcccgcggcgcaggaggatgggctgcggcgggagccgggcggatgccatcgagccccgctactacgagagctggacccgggagacagaatccacctggctcacctacaccgactcggacgcgccgcccagcgccgccgccccggacagcggccccgaagcgggcggcctgcactcgggctaaaagagatgctaagagaatgcctgcaaaagaagtcaccattaatgtaacagatagcatccaacagatggacagaagtcgaagaatcacaaagaactgtgtcaactagcagagagtccaagcagaagggcagatggacttcttcagtgtccttcacggcactggatcccatcaaagaaccttgaagaagtggctgccccttgctggacctgaattctactgagtccctggcaagactgtcttacctggcagcaaactgctgcctgatttgttgggaccttctgagccttctacttatcatgtaaatgtattggcacagtgcttacatatgttaataaactgcaaatgtgcagttcagtttgtctctttgcaactcctgtaatacggtctggtgtaaaagtagtgagttaaagctacaggtcagtttatgaaacagaaaagtaggaatgcattttctgggtgaaagagtcacaccttagtgctataactctcctgcccatgatagtgtattctgtttcaggcaagcttattctttccttctttcattttaaatattgtcattacaaatcttaccaggttcacttaaaagctggctttcatccaactctaaacccacatattgaaaaaatcaaggtacaggaaaactccttgttatccttgtttccttagcttggtatgagacagatcggatccagtttcccatgcaccaacccactgcccatggcatgtctttgggaggtgtctgtgaagcagtcatacctgctcctcatctgcctggaaagtcctcctattccagtgtccatgttggcctccagtccttaatgtcaccatgcttgtggccaatgcatccaaataaggatacccctcagggctcagctagacattgcaattttgcatagctttccagttccctttgcttgtcttcttgactgtcttccctctctatcggggtcacttgcaattgttaatcaaagattgaacactgcgtaggagagggagatgatccagagacatgtggcagcaggcatggcttccccttggcctctctgtacactgccccaggactgtcattttggcatctgcaaaggaatcactttagaaagccagcacctggttgatgtgtattcatactgacattagattgatgtgcactgcattagaaatgaggtagctgacacagaaaaaggatgttttgataggaataattttctagtatgtcttgaaacatgttcatctggaagtattttcctccaaagtaatgtagcatgatttttcaaggattgttaacatgcctgggattgggaaagataggactaaagttgtgccaaactatatcaataaattccatgtttagcagaaataggcagcctattggtgttatgtttatgtaacatagtccagagaactgacatgcaggtcaaaagtcagatacgcaacctccttatctgctaactctgttattcttcaaacacaagtgggtagtgtcatttttccttccttccttccattggcagattgtatatttattcacaaaacattaaatgtccatcctgtgccaggtactatgcagatgttgagggatttggggtctggttagtcgtgactatctatcctgaatctaacagtgacttcataactaggagactgaattagacccttaaggtatagtgtgtgttgcaaatcactctgcaatggaaacttttatattcagggtaggtttgtgtcttaaactaggtgttctaatcaatgtacaagactttaccatacacgcaactatagtttttctaaaccttcatcattttgtgattctttgagaaagggcttttaggaactttatgttctaaaaaatgtttttaacaataataagataaaagaaaaacctgtgattcatatgtccccactggcattactcagcaggagcccccagctgccaaaggttggcagtgatcctgcaagttcaagggctctttctccctggggatgtgctttgtggcttctctttacagctttgtttctgcatcagttcactgctgcatgttgtttggaatttatcaccttaagaaagtgtctctgttttatatagaaacactttctcacttacaggggagaaggaaatgcagggcacatgatctggccctccccagaacaatctggatttcacggagacagcaaccagaagttaaaccatgtgactaaaaatgcatctggctactttttcatgtatgtatgagacagaaactaatccttactatcctattaggataccacttttcattgcaaagtttgtgtcaataaagtcattaattttaaacata

SEQ ID NO: 3641 - DNA, 668 bp, Homo sapiens
  source 1..668: mol_type = unassigned DNA
cgtgatcggccaacactgagtcttacctcgttgtggcgtcagaaccgccgtcgctcgctcccttctcggcagtggtacctgttcccggtgtccctgaggacgtgcgggccaggtttgcggggccaagtgttgcggcgacgcacctcacgtcgagaatcgggaggaggagactgcaaggataggcccaggagtaatggagtccaaagaggaacgagcgttaaacaatctcatcgtggaaaatgtcaaccaggaaaatgatgaaaaagatgaaaaggagcaagttgctaataaaggggagcccttggccctacctttgaatgttagtgaatactgtgtgcctagaggaaaccgtaggcggttccgcgttaggcagcccatcctgcagtatagatgggacataatgcataggcttggagagccacaggcaaggatgagagaggagaatatggaaaggattggggaggaggtgagacagctgatggaaaagctgagggaaaagcagttgagtcatagtttgcgggcagtcagcactgatccccctcaccatgaccatcacgatgagttttgccttatgccctgaatcctgatggtttccctgaagttaatagggagacccctgcttcctaaacttacacatttgtggtgtacctttgtcgtaaacgttttga

SEQ ID NO: 3642 - DNA, 899 bp, Homo sapiens
  source 1..899: mol_type = unassigned DNA
gggacgggggcggagcctctggcgatgacaacagccacacgtgatcggccaacactgagtcttacctcgttgtggcgtcagaaccgccgtcgctcgctcccttctcggcagtggtacctgttcccggtgtccctgaggacgtgcgggccaggtacggccccgaaagtaggaagcggagggggagcaggtttgcggggccaagtgttgcggcgacgcacctcacgtcgagaatcgggaggaggagactgcaaggataggcccaggagtaatggagtccaaagaggaacgagcgttaaacaatctcatcgtggaaaatgtcaaccaggaaaatgatgaaaaagatgaaaaggagcaagttgctaataaaggggagcccttggccctacctttgaatgttagtgaatactgtgtgcctagaggaaaccgtaggcggttccgcgttaggcagcccatcctgcagtatagatgggacataatgcataggcttggagagccacaggcaaggatgagagaggagaatatggaaaggattggggaggaggtgagacagctgatggaaaagctgagggaaaagcagttgagtcatagtttgcgggcagtcagcactgatccccctcaccatgaccatcacgatgagttttgccttatgccctgaatcctgatggtttccctgaagttaatagggagacccctgcttcctaaacttacacatttgtggtgtacctttgtcgtaaacgttttgatgttacctatttcttgtgggtctcctattaccagcttctaaatgaatgttgtttttgacccagtttgtaagtttctgtcagcaggagagttttacctattgcatggaaagatgctcattatatattgtgaagttaataaaacagttttaaaaagca

SEQ ID NO: 3643 - DNA, 736 bp, Homo sapiens
  source 1..736: mol_type = unassigned DNA
tggtacctgttcccggtgtccctgaggacgtgcgggccaggtacggccccgaaagtaggaagcggagggggagcaggtaagggacccggagggggtccctggggttggtgtgggggagcagccccggcctgcggatgccccatccccgggcagcagcgcggagacgcagccggtccacgatgcagccccggggccccgccgcgggaccgcgagccttgtgtgagcggaggggtgcccggccccgcgggagccggcgatcctgaggctacgacctttcggaagcacctgcctccgtcaccagcgcaagcttttccaacacccctgctccgcccttcttgatgcagaaaatggtttgcggggccaagtgttgcggcgacgcacctcacgtcgagaatcgggaggaggagactgcaaggataggcccaggagtaatggagtccaaagaggaacgagcgttaaacaatctcatcgtggaaaatgtcaaccaggaaaatgatgaaaaagatgaaaaggagcaagttgctaataaaggggagcccttggccctacctttgaatgttagtgaatactgtgtgcctagaggaaaccgtaggcggttccgcgttaggcagcccatcctgcagtatagatgggacataatgcataggcttggagagccacaggcaaggatgagagaggagaatatggaaaggattggggaggaggtgagacagctgatggaaaagctgagggaaaa

SEQ ID NO: 3644 - DNA, 1077 bp, Homo sapiens
  source 1..1077: mol_type = unassigned DNA
gctcgctcccttctcggcagtggtacctgttcccggtgtccctgaggacgtgcgggccaggtacggccccgaaagtaggaagcggagggggagcaggtaagggacccggagggggtccctggggttggtgtgggggagcagccccggcctgcggatgccccatccccgggcagcagcgcggagacgcagccggtccacgatgcagccccggggccccgccgcgggaccgcgagccttgtgtgagcggaggggtgcccggccccgcgggagccggcgatcctgaggctacgacctttcggaagcacctgcctccgtcaccagcgcaagcttttccaacacccctgctccgcccttcttgatgcagaaaatggtggtttgcggggccaagtgttgcggcgacgcacctcacgtcgagaatcgggaggaggagactgcaaggataggcccaggagtaatggagtccaaagaggaacgagcgttaaacaatctcatcgtggaaaatgtcaaccaggaaaatgatgaaaaagatgaaaaggagcaagttgctaataaaggggagcccttggccctacctttgaatgttagtgaatactgtgtgcctagaggaaaccgtaggcggttccgcgttaggcagcccatcctgcagtatagatgggacataatgcataggcttggagagccacaggcaaggatgagagaggagaatatggaaaggattggggaggaggtgagacagctgatggaaaagctgagggaaaagcagttgagtcatagtttgcgggcagtcagcactgatccccctcaccatgaccatcacgatgagttttgccttatgccctgaatcctgatggtttccctgaagttaatagggagacccctgcttcctaaacttacacatttgtggtgtacctttgtcgtaaacgttttgatgttacctatttcttgtgggtctcctattaccagcttctaaatgaatgttgtttttgacccagtttgtaagtttctgtcagcaggagagttttacctattgcatggaaagatgctcattatatattgtgaagttaataaaacagtttt

SEQ ID NO: 3645 - DNA, 864 bp, Homo sapiens
  source 1..864: mol_type = unassigned DNA
cttggcggtgacgcacggccctcacgtgaccgggagctgcagagctacgcagccttcggtgcagtcgtcactcgtgtctcgctaccagctccccgctgccctgcgctcggcgggctggcatccggcccgggggaaagcggaccagcccttctgcaggtctgcggggccaagtgtcccggcggcgcacctcgtggcgagaatcgggagaaggaggagactacaaggataggcccaggagtaatggagtccaaagagaaacgagcagtaaacagtctcagcatggaaaatgccaaccaagaaaatgaagaaaaggagcaagttgctaataaaggggagcccttggccctccctttggatgctggtgaatactgtgtgcctagaggaaatcgtaggcggttccgcgttaggcagcccatcctgcagtatagatgggatatgatgcataggcttggagaaccacaggcaaggatgagagaagagaatatggaaaggattggggaggaggtgagacagctgatggaaaagctgagggaaaagcagttgagtcatagtctgcgggcagtcagcactgacccccctcaccatgaccatcatgatgagttttgccttatgccctgaatcctgatggtttccctaaagttattacggaaacagacccctgctttcgaatttacatgttcatgatgtgcccttgttgtaaacctttacctgtcacttgtttacgtgggtctcctattaccagcttctaattgaatattgtgtttttgaaccagtctgtaagatttttgttagcagaagaattttacctattgcatggaaagatgctcattatagtgaagttaataaagcacctttaaaaagcaa

SEQ ID NO: 3646 - DNA, 1066 bp, Homo sapiens
  source 1..1066: mol_type = unassigned DNA
tggcgtcagagccgtcgtggctcgttccattctcggcggtggtacctgctcccggtggccctgaggacgtgtgggccaggggcggccccgaaattaggaagcggagggggagcaggagtaatggagtccaaagaggaactagcggcaaacaatctcaacggggaaaatgcccaacaagaaaacgaaggaggggagcaggcccccacgcagaatgaagaagaatcccgccatttgggagggggtgaaggccagaagcctggaggaaatatcaggcgggggcgagttaggcgacttgtccctaattttcgatgggccatacctaataggcatattgagcacaatgaagcgagagatgatgtagaaaggtttgtagggcagatgatggaaatcaagagaaagactagggaacagcagatgaggcactatatgcgcttccaaactcctgaacctgacaaccattatgacttttgcctcataccttgaatcctaaaagttttcgctgaggttaatgtgaacactgctttacaagcttgtatttttgtgatttactttttctgtaagccttttggggtttacacttaccagtttctaatggaaattagaattctaattgaatattgttttgtctcagcctaaaagttacggtcagcatggcaattcacctattttaggaaaaatactcttttcataatatgaaatgcataaagcagttcaaaaagcagtctgtattccatcatcttcctttttcattccagtccttatttttgtaagtattacttttcctcctccggctacctggactcaaaatctcagttgtctttgacagtttttttcttgtccctgaccaaaaaagaatgatcatacccagaattcaatgtttgatattttaagaatgtatgttctagtgtttttcagagtgagtctaccatctgtataaaaacaccttgggggcaggcaggggcatttaaaaatgtaggacctatcgtccagactcacagagtggggctccagaatctccatttttaacaaactctcttaagtaattctgatgtgtaccaaaatcagt

SEQ ID NO: 3647 - DNA, 1328 bp, Homo sapiens
  source 1..1328: mol_type = unassigned DNA
gtgaccggccaacactgagtgttgtctcgctctggcgtcagagccgtcgtggctcgttccattctcggcggtggtacctgctcccggtggccctgaggacgtgtgggccaggggcggccccgaaattaggaagcggagggggagcagtctgcaggtctgcggggctaagtgtcgcggcggcgcacctcgcgtcaagaatccggaggaggagactgcaaggataggcccaggagtaatggagtccaaagaggaactagcggcaaacaatctcaacggggaaaatgcccaacaagaaaacgaaggaggggagcaggcccccacgcagaatgaagaagaatcccgccatttgggagggggtgaaggccagaagcctggaggaaatatcaggcgggggcgagttaggcgacttgtccctaattttcgatgggccatacctaataggcatattgagcacaatgaagcgagagatgatgtagaaaggtttgtagggcagatgatggaaatcaagagaaagactagggaacagcagatgaggcactatatgcgcttccaaactcctgaacctgacaaccattatgacttttgcctcataccttgaatcctaaaagttttcgctgaggttaatgtgaacactgctttacaagcttgtatttttgtgatttactttttctgtaagccttttggggtttacacttaccagtttctaatggaaattagaattctaattgaatattgttttgtctcagcctaaaagttacggtcagcatggcaattcacctattttaggaaaaatactcttttcataatatgaaatgcataaagcagttcaaaaagcagtctgtattccatcatcttcctttttcattccagtccttatttttgtaagtattacttttcctcctccggctacctggactcaaaatctcagttgtctttgacagtttttttcttgtccctgaccaaaaaagaatgatcatacccagaattcaatgtttgatattttaagaatgtatgttctagtgtttttcagagtgagtctaccatctgtataaaaacaccttgggggcaggcaggggcatttaaaaatgtaggacctatcgtccagactcacagagtggggctccagaatctccatttttaacaaactctcttaagtaattctgatgtgtaccaaaatcagtgccattggtgtgtgtgtacgtaactatatacatatgtgtgtgtgtgtatatatataatgtgtcataaccgtaaacaataaacaatatcaagataaatctgactttgatgggcaagtaattaaaaaagaaaagtatgagaccttaaaa

SEQ ID NO: 3648 - DNA, 857 bp, Homo sapiens
  source 1..857: mol_type = unassigned DNA
atggtaattggaaatctgagctcacagtgacgtgacccttaggagacccagagccaatgcgtggattagtccctcctcctagttgcagtctggtagttgtcgctggccgtgtgacggctcgctgttgccctgaaggcaggcgagccagctgcccaggaaaggtggaaagtggtagaagctgacccctgagccctggcaggtctttaagtgcgtttgtgcagccgatttcaaggctaagagagaaagactgcctctgatccctgaaggaagaaaaaaaaaaaaaaaacaggaaaaaaactcaacatggaaaatgtccccaaggaaaacaaagttgtggagaaggccccagtgcagaatgaagcccccgctttaggaggtggtgaataccaggagcctggaggaaatgttaaaggggtttgggctccacctgccccgggttttggagaggatgtgcccaataggcttgtcgataacattgatatgatagatggagatggagatgatatggaacggttcatggaggagatgagagagctaaggaggaaaattagggaacttcagttgaggtacagtctgcgcattcttataggggaccctcctcaccatgatcatcatgatgagttttgccttatgccttgaatcttgaggttaataatcataaaatccctgctttctaaattcgcatttttcctggtgtacctttaatgtgaaccttttggcattcttctgcaattttctgattggagattgcattttgacctagtctgtaagtttttctgtcagaagaggactttcatcaactttcatggaaagatgtttattgcatactgtaaagttaataaagcaatttaaaagca

SEQ ID NO: 3649 - DNA, 860 bp, Homo sapiens
  source 1..860: mol_type = unassigned DNA
caccctttccagatacacacccgtttagtgcgagaaatggagcggttggggagaggatctcccgagggggctggattgagaatgggtaccatttgagatctcctaggaggccggccatcgggcaatgtctgatggagtccagccggtggaggagactgaaaggaaacagcctgcttcctgcaggtccgcgggagggaggtctttaagtgcgtttgtgcagccgatttcaaggctaagagagaaagactgcctctgatccctgaaggaagaaaaaaaaaaaaaaaacaggaaaaaaactcaacatggaaaatgtccccaaggaaaacaaagttgtggagaaggccccagtgcagaatgaagcccccgctttaggaggtggtgaataccaggagcctggaggaaatgttaaaggggtttgggctccacctgccccgggttttggagaggatgtgcccaataggcttgtcgataacattgatatgatagatggagatggagatgatatggaacggttcatggaggagatgagagagctaaggaggaaaattagggaacttcagttgaggtacagtctgcgcattcttataggggaccctcctcaccatgatcatcatgatgagttttgccttatgccttgaatcttgaggttaataatcataaaatccctgctttctaaattcgcatttttcctggtgtacctttaatgtgaaccttttggcattcttctgcaattttctgattggagattgcattttgacctagtctgtaagtttttctgtcagaagaggactttcatcaactttcatggaaagatgtttattgcatactgtaaagttaataaagcaatttaaaagcagtct

SEQ ID NO: 3650 - DNA, 780 bp, Homo sapiens
  source 1..780: mol_type = unassigned DNA
gcgtctgcctcagaggggcccgagccacccggtccgccgcgtccccgccgccgccgccgcgtcccccgccggggccgaccgagccgagccgggccggagcggcgggcgcggccgggccgccatggaccacaagccgctgctgcaggagcggccgcccgcctacaacctggaggccggccagggcgactacgcgtgcggcccgcacggctacggcgccatccccgccgcgcccccgccgccgccctacccctacctcgtcacagggatacccacccaccatcccagggtctacaacatccacagccggaccgtcacccgctatcctgccaactctatcgtggtcgtaggaggctgtcctgtctgcagggttggggtgctggaggactgcttcaccttcctgggcatcttcctggccatcatcctcttcccctttgggttcatttgctgttttgccttgaggaagcgacgatgccccaactgtggagccaccttcgcttaaagggaacaccaggcccggctttcctacacccagctctctttttctaatgtaaatgttgtgtacaataattttatttgattaagcttcaggactgttttgtaaagcgaggtgggaccgatgtggcacacgccagctgcggtttcccggagcgtggagaggcagtgctgctgctcccgcccgaggctcatgacaactcaataaagcactgcttttattttttgcagtcttcaatttgagaaaggtgagaaataatgttttcaataaatgagattcataccatt

SEQ ID NO: 3651 - DNA, 699 bp, Homo sapiens
  source 1..699: mol_type = unassigned DNA
cccgccccgcgtctgcctcagaggggcccgagccacccggtccgccgcgtccccgccgccgccgccgcgtcccccgccggggccgaccgagccgagccgggccggagcggcgggcgcggccgggccgccatggaccacaagccgctgctgcaggagcggccgcccgcctacaacctggaggccggccagggcgactacgcgtgcggcccgcacggctacggcgccatccccgccgcgcccccgccgccgccctacccctacctcgtcacagggatacccacccaccatcccagggtctacaacatccacagccggaccgtcacccgctatcctgccaactctatcgtggtcgtaggaggctgtcctgtctgcaggcaccagaggtcatcctggctttacacgtatcctttgagagtctgtacctgattcaaacacggagaaaccaggaccccgagcagtttgagtgtactggtaatggatgcagctttggccaactagctgagtgagaacacaaggagccgtgactccgacgcccaggcctgtgtcctggatgggccgtgtgcagcgaatccgttggcgactcctaactaccaagaaaaggagctctcggaggagatttcgtcgagtgctacgtgtggctgtgataagggcaggcaaagcgtcttagcactctacagctctggcgtggttggagggagg

SEQ ID NO: 3652 - DNA, 3622 bp, Homo sapiens
  source 1..3622: mol_type = unassigned DNA
ctcctctgctcctcgaagaaggccagggcggcgctgccgcaagttttgacattttcgcagcggagacgcgcgcgggcactctcgggccgacggctgcggcggcggccgaccctccagagccccttagtcgcgccccggccctcccgctgcccggagtccggcggccacgaggcccagccgcgtcctcccgcgcttgctcgcccggcggccgcagccatgtcccgggggcccgaggaggtgaaccggctcacggagagcacctaccggaatgttatggaacagttcaatcctgggctgcgaaatttaataaacctggggaaaaattatgagaaagctgtaaacgctatgatcctggcaggaaaagcctactacgatggagtggccaagatcggtgagattgccactgggtcccccgtgtcaactgaactgggacatgtcctcatagagatttcaagtacccacaagaaactcaacgagagtcttgatgaaaattttaaaaaattccacaaagagattatccatgagctggagaagaagatagaacttgacgtgaaatatatgaacgcaactctaaaaagataccaaacagaacacaagaataaattagagtctttggagaaatcccaagctgagttgaagaagatcagaaggaaaagccaaggaagccgaaacgcactcaaatatgaacacaaagaaattgagtatgtggagaccgttacttctcgtcagagtgaaatccagaaattcattgcagatggttgcaaagaggctctgcttgaagagaagaggcgcttctgctttctggttgataagcactgtggctttgcaaaccacatacattattatcacttacagtctgcagaactactgaattccaagctgcctcggtggcaggagacctgtgttgatgccatcaaagtgccagagaaaatcatgaatatgatcgaagaaataaagaccccagcctctacccccgtgtctggaactcctcaggcttcacccatgatcgagagaagcaatgtggttaggaaagattacgacaccctttctaaatgctcaccaaagatgccccccgctccttcaggcagagcatataccagtcccttgatcgatatgtttaataacccagccacggctgccccgaattcacaaagggtaaataattcaacaggtacttccgaagatcccagtttacagcgatcagtttcggttgcaacgggactgaacatgatgaagaagcagaaagtgaagaccatcttcccgcacactgcgggctccaacaagaccttactcagctttgcacagggagatgtcatcacgctgctcatccccgaggagaaggatggctggctctatggagaacacgacgtgtccaaggcgaggggttggttcccgtcgtcgtacacgaagttgctggaagaaaatgagacagaagcagtgaccgtgcccacgccaagccccacaccagtgagaagcatcagcaccgtgaacttgtctgagaatagcagtgttgtcatccccccacccgactacttggaatgcttgtccatgggggcagctgccgacaggagagcagattcggccaggacgacatccacctttaaggccccagcgtccaagcccgagaccgcggctcctaacgatgccaacgggactgcaaagccgccttttctcagcggagaaaacccctttgccactgtgaaactccgcccgactgtgacgaatgatcgctcggcacccatcattcgatgagaggacagccaaggactctcccgggcctctccggttctcccttgcggaatgatgggcgcatcctgtctgccacgtgctgacggtcgggaagcttcagtggagaggcctaactctaatgtcgcctgcttaagcaaatcatgcttctctgtttcacgtagttgggttgacaagtttctgcctttaagataaatgagtaatagtctaatgaccagctcagccatttaaaatattttcttcctattctgttcaagaaacagtaaacttggtttcaatctttactgtattttttaaatgaattttttccttaataacagccagaataagggatagtctatgctttcaggactggctttctgcacctgatatgaatgagaccagttttattttataaagcatgtgctcttaatagcattatgtctaaagaagatatcacgtaagtttgcatcttagcatgcaaatcataattttaagcaatataaattatgaaaatactatataaatgtaatttaacttaaaatgtttaagtgtagagcttccagagatggagaaacccccaccctccctccaaccacgccagagctgtagagtgctaagacgctttgcctgcccttatcacagccacacgtagcactcgacgaaatctcctccgagagctccttttcttggtagttaggagtcgccaacggattcgctgcacacggcccatccaggacacaggcctgggcgtcggagtcacggctccttgtgttctcactcagctagttggccaaagctgcatccattaccagtacactcaaactgctcggggtcctggtttctccgtgtttgaatcaggtacagactctcaaaggatacgtgtaaagccaggatgacctctggtgcctggagaagggcgggtttttcagcctagcagccatgatgccctcggaacctggccctatggtatggatgtgaggactacgcactggctgccctgagcccggggctggaaatcatctttggctgccaaggatctggacctattttggagtggagagtcatggttaaaattcccagcccggcccaggtacgggaatcccagcattttgtgaggccgaggcagggggatcacctgaggtcaggagtctctactaaaaatacaaaaattagacaggtgtggtggtgggcgccactcaggaggctgaggcaggagaatcacttgaacccgggaggcagaggttgcagtgagccagatcatgctgctgcactccagcccggccgctcaccgtgtgtgttgctgggtgctggggctgtgacttatcccctctcctttagccttgccataagtgtagtatcctatgaggctgagattgggaaaggttacatgcaggtaagccagtggacgtggccgatgcttcaggctccttccagccaggtccagcagtgttaccatctgcttctcctgggaggacaaaccaggcacccccaccatgaaggggctgcaggcaccatgaactatgttaacaaccccagtctgtactacagaaagggctgcagccacatgagaattcagtccacacaagccccatggccgtgttccccacttcagccacagggctcagggagccccatctggcgctaaggggaactgctggggtgtgggtgacacctggcctttggcgttctgccttggggaggtttctggttttgttacggggtggaagaataggacctgggggtctcggatgcaacctgcagaccccgtggctcacccaaccccaggttctgcctcccagaccagaacgggcatggcctggtccttggcaccgaggtgcctgctctgtaaatatcaagggattacaactttaataataaagcagaacttgaaaac

SEQ ID NO: 3653 - DNA, 5312 bp, Homo sapiens
  source 1..5312: mol_type = unassigned DNA
ttttctgcacccgccgcccgggagagcgggagcctcggccctccgcgcggctgcagctacctaccctgcgcccggcccggtccccgacttagggatggcaaacttgcgccccgtggccgcccccgccagcgccggcccccgctcctgctgctgacggcgcccaggaaatccacagcagtgatacatgtgacgtccacactgacagtgccctcctgtgggcatggctcaggttgtgcgcagttcctggcacactggctgtaactccgcccctttctctccctctcagtaaagcaagattacgcggtgacatgcctcacagctgatcacgacacacggggatggagagcaagagttatggagaatacaggttggatgggcaagggacataggatgaccccagcctgtcccctcttactgtctgtgattctgtccctgcgcctggccaccgccttcgaccccgcccccagtgcctgctctgccctggcctcgggtgtgctctacggggccttctcgctgcaggacctctttcctaccatcgcctcgggctgctcctggaccctggagaaccctgaccccaccaagtactccctctacctgcgcttcaaccgccaggagcaggtgtgcgcacactttgccccccgcctgctgcccctggaccactacctggtcaactttacctgcctgcggcctagccccgaggaggcggtggcccaggcggagtcagaggtggggcggccagaagaggaggaggcagaggcggcagcggggttggagctgtgcagcggctcaggcccctttaccttcctgcacttcgacaagaacttcgtgcagctgtgcctgtcggctgagccctccgaggccccgcgcctgctggcgcccgctgccctagccttccgctttgtcgaggtcttgctcatcaacaacaacaactctagccaattcacctgtggtgtgctctgccgctggagtgaggagtgtggccgcgctgccggcagggcctgcggctttgctcagccaggctgcagctgccctggagaggcgggggccggctccaccaccaccacatctccaggccctcctgctgcccacaccctgtccaatgccctggtgcccgggggcccagccccacctgctgaggccgatttgcactcggggagcagcaatgatctgttcacaaccgagatgagatatggtgaggagccggaagaggaaccgaaagtgaaaacccagtggccgaggtctgcagatgagcctgggctatacatggcgcagacaggcgacccggcggctgaggagtggtccccgtggagcgtgtgttccctgacgtgtgggcagggtctgcaggtgcggacccgctcctgtgtgtcctccccctatgggaccctgtgcagcgggcccctgcgggagaccaggccctgcaacaattcagccacctgcccagtgcacggcgtgtgggaggagtgggggtcctggagcctgtgctcccgcagctgcgggcgggggtcccggagccggatgcggacctgcgtgcccccccagcacggcggcaaggcctgcgagggtcctgagctgcagactaagctctgcagtatggctgcctgcccggtggaaggccagtggttagaatggggtccctggggcccatgctccacgtcctgtgccaatgggacccaacagcgcagccggaagtgcagcgtggcgggcccagcctgggccacatgcacgggtgccctcactgacacccgggagtgcagcaacctcgagtgcccggccactgatagcaagtgggggccatggaatgcgtggagcctgtgctctaagacgtgtgacacaggctggcagcgccgcttccgcatgtgccaggccacgggcacgcagggctacccctgcgagggcaccggagaggaggtgaagccttgtagtgagaagaggtgtccagccttccatgagatgtgcagggatgagtacgtgatgctgatgacgtggaagaaggcagctgctggcgagatcatctacaacaagtgccccccgaatgcctcagggtctgccagccgccgctgtctcctcagtgcccaaggcgtggcgtactgggggctgcccagctttgctcgctgcatctcccatgagtaccgctacctgtatctgtcacttagggagcacctggccaaggggcagcgcatgctggcaggcgagggcatgtcgcaggtggtgcgcagcctgcaggagctactggcccggcgcacctactatagtggggacctgctcttctctgtggacattctgaggaatgtcactgacacctttaagagggccacctacgtgccctcggctgatgatgtgcagcgcttcttccaggtggtgagcttcatggtggatgcggaaaacaaggagaagtgggacgatgctcagcaggtgtcccctggctctgtgcacctgctccgtgtcgtggaggacttcattcacctggtgggcgatgctctcaaggccttccagagctctctgattgtcacagataatctagtgatcagcattcagcgagagcccgtctcagctgtgtccagtgacatcacgttccccatgcggggccgccggggcatgaaggactgggtgcggcactcagaggaccgcctcttcctgcccaaggaggtgctcagcctctcctccccagggaagccagccacatctggggcagcaggcagccctggcagggggaggggcccaggaacggtgcctcctggcccaggccactcccaccagcgcctcctcccagcagaccctgatgagtcctcctactttgtgatcggtgctgtactctaccgcacccttggcctcatcctgccgcctcccaggcccccgctggccgtcacatcccgggtgatgacagtgactgtgcgcccccctacccagcctccagctgagcccctcatcactgtggagctctcctacatcatcaatgggaccacggatccccattgcgccagctgggactactccagagcagatgccagctcaggagactgggacactgaaaattgccagaccctggagacccaggcagctcacacccgctgccagtgccagcacctgtccacctttgctgtactagcccagccgcccaaggacctgaccctggagctggcgggctccccctcggtccccctggtgatcggctgtgcagtgtcgtgcatggcgctgctcaccctgctcgccatctatgccgccttttggaggttcataaaatctgaacgctccatcatcttgctgaacttctgcctgtccatcttggcatccaacatcctgatcctcgtgggccagtcccgggtgctgagcaagggcgtgtgcaccatgacggctgccttcctgcacttcttctttctctcctccttttgctgggtgcttaccgaggcctggcagtcctacctggctgtcattgggcggatgcgcacccgcctcgttcgcaagcgcttcctctgcctgggctggggtctgcctgccctggtggtggccgtgtctgttggctttacccgaacgaaaggatacggtacatccagctactgctggctctccctggagggcggcctgctctacgcctttgtgggccctgcagccgtcattgtcctggtgaacatgctcatcggaatcatcgtcttcaacaagctcatggcacgtgatggcatctccgacaaatccaagaagcagagggccggggcctcactctggagctcctgcgtggtgctgcccctgctggcgctcacctggatgtctgccgtcctggctatgacagaccgccgttccgtcctcttccaggccctctttgctgtcttcaactccgcgcagggctttgtcatcactgctgtgcactgcttcctgcgccgagaggtccaggatgtggtgaagtgccagatgggggtgtgccgggctgatgagagcgaagactcccctgactcgtgtaagaacgggcagctgcagatcctgtcagactttgaaaaggatgtggatctggcttgtcaaacagtgctgttcaaggaggtcaacacttgcaacccgtccaccatcacgggcacactatcccgcctgtccctggatgaggatgaggagcccaagtcctgcctcgtgggccctgagggcagcctcagcttctcaccactgcctgggaatatcctggtgcccatggcagcctcaccagggctgggggagcctccgcccccacaggaggccaaccctgtttacatgtgtggggagggtggcctgcggcagctggacctcacatggctgcggcccactgagccaggctctgagggagactacatggtgctgccccggcggactttgagcctgcagcctggcggtgggggtggaggtggtgaggatgcccccagggcccggccggaggggaccccccggcgagctgccaagacagtggcccacactgaaggctaccccagcttcctgtccgtggaccactcgggcctggggctgggccctgcctatggatctctccagaatccctatggaatgaccttccaaccgccaccgccgacacccagcgcccgccaagtgcccgagccaggggagcgcagccggaccatgcctcgcaccgtgcccggctctaccatgaagatgggctccctggagcgaaagaaattacggtattcagacctggactttgaggtgatgcacacccggaaacggcattcagaactctaccacgagctcaaccagaagttccacactttcgaccgctaccgcagccagtccacggccaagagggagaagcggtggagtgtgtcctcgggtggggcagccgagcggagcgtgtgcaccgataagcccagccctggggagcgccccagcttgtcccaacatcggcgccatcagagctggagcaccttcaaatctatgacactgggctcgctgccccccaagccccgagaacggctgactctgcaccgggcagcagcctgggagcccacagaaccaccggatggtgacttccagacagaggtgtgagtgccacgctggactgcccactgcatataaatatatatatctctctattttcacactccactttggaactacccaggagccagcgccctctcccctctcccgagggctgggcagggaggcgccgtggactcagccaggctgggggagccggacatggcttggcctggggtcccagggcccttccttgtttctcagaggcccctcagccactggaaccccatcttcagcccagcctgtccgtccctgtcccgggctggggaggggggaggggaactttgttgggaataaacttcactctgtgg

SEQ ID NO: 3654 - DNA, 5400 bp, Homo sapiens
  source 1..5400: mol_type = unassigned DNA
gccgcccgggagagcgggagcctcggccctccgcgcggctgcagctacctaccctgcgcccggcccggtccccgacttagggatggcaaacttgcgccccgtggccgcccccgccagcgccggcccccgctcctgctgctgacggcgcccaggaaatccacagcagtgatacatgtgacgtccacactgacagtgccctcctgtgggcatggctcaggttgtgcgcagttcctggcacactggctgtaactccgcccctttctctccctctcagtaaagcaagattacgcggtgacatgcctcacagctgatcacgacacacggggatggagagcaagagttatggagaatacaggttggatgggcaagggacataggatgaccccagcctgtcccctcttactgtctgtgattctgtccctgcgcctggccaccgccttcgaccccgcccccagtgcctgctctgccctggcctcgggtgtgctctacggggccttctcgctgcaggacctctttcctaccatcgcctcgggctgctcctggaccctggagaaccctgaccccaccaagtactccctctacctgcgcttcaaccgccaggagcaggtgtgcgcacactttgccccccgcctgctgcccctggaccactacctggtcaactttacctgcctgcggcctagccccgaggaggcggtggcccaggcggagtcagaggtggggcggccagaagaggaggaggcagaggcggcagcggggttggagctgtgcagcggctcaggcccctttaccttcctgcacttcgacaagaacttcgtgcagctgtgcctgtcggctgagccctccgaggccccgcgcctgctggcgcccgctgccctagccttccgctttgtcgaggtcttgctcatcaacaacaacaactctagccaattcacctgtggtgtgctctgccgctggagtgaggagtgtggccgcgctgccggcagggcctgcggctttgctcagccaggctgcagctgccctggagaggcgggggccggctccaccaccaccacatctccaggccctcctgctgcccacaccctgtccaatgccctggtgcccgggggcccagccccacctgctgaggccgatttgcactcggggagcagcaatgatctgttcacaaccgagatgagatatggtgaggagccggaagaggaaccgaaagtgaaaacccagtggccgaggtctgcagatgagcctgggctatacatggcgcagacaggcgacccggcggctgaggagtggtccccgtggagcgtgtgttccctgacgtgtgggcagggtctgcaggtgcggacccgctcctgtgtgtcctccccctatgggaccctgtgcagcgggcccctgcgggagaccaggccctgcaacaattcagccacctgcccagtgcacggcgtgtgggaggagtgggggtcctggagcctgtgctcccgcagctgcgggcgggggtcccggagccggatgcggacctgcgtgcccccccagcacggcggcaaggcctgcgagggtcctgagctgcagactaagctctgcagtatggctgcctgcccggtggaaggccagtggttagaatggggtccctggggcccatgctccacgtcctgtgccaatgggacccaacagcgcagccggaagtgcagcgtggcgggcccagcctgggccacatgcacgggtgccctcactgacacccgggagtgcagcaacctcgagtgcccggccactgatagcaagtgggggccatggaatgcgtggagcctgtgctctaagacgtgtgacacaggctggcagcgccgcttccgcatgtgccaggccacgggcacgcagggctacccctgcgagggcaccggagaggaggtgaagccttgtagtgagaagaggtgtccagccttccatgagatgtgcagggatgagtacgtgatgctgatgacgtggaagaaggcagctgctggcgagatcatctacaacaagtgccccccgaatgcctcagggtctgccagccgccgctgtctcctcagtgcccaaggcgtggcgtactgggggctgcccagctttgctcgctgcatctcccatgagtaccgctacctgtatctgtcacttagggagcacctggccaaggggcagcgcatgctggcaggcgagggcatgtcgcaggtggtgcgcagcctgcaggagctactggcccggcgcacctactatagtggggacctgctcttctctgtggacattctgaggaatgtcactgacacctttaagagggccacctacgtgccctcggctgatgatgtgcagcgcttcttccaggtggtgagcttcatggtggatgcggaaaacaaggagaagtgggacgatgctcagcaggtgtcccctggctctgtgcacctgctccgtgtcgtggaggacttcattcacctggtgggcgatgctctcaaggccttccagagctctctgattgtcacagataatctagtgatcagcattcagcgagagcccgtctcagctgtgtccagtgacatcacgttccccatgcggggccgccggggcatgaaggactgggtgcggcactcagaggaccgcctcttcctgcccaaggaggtgctcagcctctcctccccagggaagccagccacatctggggcagcaggcagccctggcagggggaggggcccaggaacggtgcctcctggcccaggccactcccaccagcgcctcctcccagcagaccctgatgagtcctcctactttgtgatcggtgctgtactctaccgcacccttggcctcatcctgccgcctcccaggcccccgctggccgtcacatcccgggtgatgacagtgactgtgcgcccccctacccagcctccagctgagcccctcatcactgtggagctctcctacatcatcaatgggaccacggatccccattgcgccagctgggactactccagagcagatgccagctcaggagactgggacactgaaaattgccagaccctggagacccaggcagctcacacccgctgccagtgccagcacctgtccacctttgctgtactagcccagccgcccaaggacctgaccctggagctggcgggctccccctcggtccccctggtgatcggctgtgcagtgtcgtgcatggcgctgctcaccctgctcgccatctatgccgccttttggaggttcataaaatctgaacgctccatcatcttgctgaacttctgcctgtccatcttggcatccaacatcctgatcctcgtgggccagtcccgggtgctgagcaagggcgtgtgcaccatgacggctgccttcctgcacttcttctttctctcctccttttgctgggtgcttaccgaggcctggcagtcctacctggctgtcattgggcggatgcgcacccgcctcgttcgcaagcgcttcctctgcctgggctggggtctgcctgccctggtggtggccgtgtctgttggctttacccgaacgaaaggatacggtacatccagctactgctggctctccctggagggcggcctgctctacgcctttgtgggccctgcagccgtcattgtcctggtgaacatgctcatcggaatcatcgtcttcaacaagctcatggcacgtgatggcatctccgacaaatccaagaagcagagggccgggtcggagcggtgcccctgggccagcctgctcctcccctgctcagcgtgtggagcggtccccagccccctgctcagctcagcctcggccaggaacgccatggcctcactctggagctcctgcgtggtgctgcccctgctggcgctcacctggatgtctgccgtcctggctatgacagaccgccgttccgtcctcttccaggccctctttgctgtcttcaactccgcgcagggctttgtcatcactgctgtgcactgcttcctgcgccgagaggtccaggatgtggtgaagtgccagatgggggtgtgccgggctgatgagagcgaagactcccctgactcgtgtaagaacgggcagctgcagatcctgtcagactttgaaaaggatgtggatctggcttgtcaaacagtgctgttcaaggaggtcaacacttgcaacccgtccaccatcacgggcacactatcccgcctgtccctggatgaggatgaggagcccaagtcctgcctcgtgggccctgagggcagcctcagcttctcaccactgcctgggaatatcctggtgcccatggcagcctcaccagggctgggggagcctccgcccccacaggaggccaaccctgtttacatgtgtggggagggtggcctgcggcagctggacctcacatggctgcggcccactgagccaggctctgagggagactacatggtgctgccccggcggactttgagcctgcagcctggcggtgggggtggaggtggtgaggatgcccccagggcccggccggaggggaccccccggcgagctgccaagacagtggcccacactgaaggctaccccagcttcctgtccgtggaccactcgggcctggggctgggccctgcctatggatctctccagaatccctatggaatgaccttccaaccgccaccgccgacacccagcgcccgccaagtgcccgagccaggggagcgcagccggaccatgcctcgcaccgtgcccggctctaccatgaagatgggctccctggagcgaaagaaattacggtattcagacctggactttgaggtgatgcacacccggaaacggcattcagaactctaccacgagctcaaccagaagttccacactttcgaccgctaccgcagccagtccacggccaagagggagaagcggtggagtgtgtcctcgggtggggcagccgagcggagcgtgtgcaccgataagcccagccctggggagcgccccagcttgtcccaacatcggcgccatcagagctggagcaccttcaaatctatgacactgggctcgctgccccccaagccccgagaacggctgactctgcaccgggcagcagcctgggagcccacagaaccaccggatggtgacttccagacagaggtgtgagtgccacgctggactgcccactgcatataaatatatatatctctctattttcacactccactttggaactacccaggagccagcgccctctcccctctcccgagggctgggcagggaggcgccgtggactcagccaggctgggggagccggacatggcttggcctggggtcccagggcccttccttgtttctcagaggcccctcagccactggaaccccatcttcagcccagcctgtccgtccctgtcccgggctggggaggggggaggggaactttgttgggaataaacttcactctgtgga

SEQ ID NO: 3655 - DNA, 5403 bp, Homo sapiens
  source 1..5403: mol_type = unassigned DNA
gccgcccgggagagcgggagcctcggccctccgcgcggctgcagctacctaccctgcgcccggcccggtccccgacttagggatggcaaacttgcgccccgtggccgcccccgccagcgccggcccccgctcctgctgctgacggcgcccaggaaatccacagcagtgatacatgtgacgtccacactgacagtgccctcctgtgggcatggctcaggttgtgcgcagttcctggcacactggctgtaactccgcccctttctctccctctcagtaaagcaagattacgcggtgacatgcctcacagctgatcacgacacacggggatggagagcaagagttatggagaatacaggttggatgggcaagggacataggatgaccccagcctgtcccctcttactgtctgtgattctgtccctgcgcctggccaccgccttcgaccccgcccccagtgcctgctctgccctggcctcgggtgtgctctacggggccttctcgctgcaggacctctttcctaccatcgcctcgggctgctcctggaccctggagaaccctgaccccaccaagtactccctctacctgcgcttcaaccgccaggagcaggtgtgcgcacactttgccccccgcctgctgcccctggaccactacctggtcaactttacctgcctgcggcctagccccgaggaggcggtggcccaggcggagtcagaggtggggcggccagaagaggaggaggcagaggcggcagcggggttggagctgtgcagcggctcaggcccctttaccttcctgcacttcgacaagaacttcgtgcagctgtgcctgtcggctgagccctccgaggccccgcgcctgctggcgcccgctgccctagccttccgctttgtcgaggtcttgctcatcaacaacaacaactctagccaattcacctgtggtgtgctctgccgctggagtgaggagtgtggccgcgctgccggcagggcctgcggctttgctcagccaggctgcagctgccctggagaggcgggggccggctccaccaccaccacatctccaggccctcctgctgcccacaccctgtccaatgccctggtgcccgggggcccagccccacctgctgaggccgatttgcactcggggagcagcaatgatctgttcacaaccgagatgagatatggtgaggagccggaagaggaaccgaaagtgaaaacccagtggccgaggtctgcagatgagcctgggctatacatggcgcagacaggcgacccggcggctgaggagtggtccccgtggagcgtgtgttccctgacgtgtgggcagggtctgcaggtgcggacccgctcctgtgtgtcctccccctatgggaccctgtgcagcgggcccctgcgggagaccaggccctgcaacaattcagccacctgcccagtgcacggcgtgtgggaggagtgggggtcctggagcctgtgctcccgcagctgcgggcgggggtcccggagccggatgcggacctgcgtgcccccccagcacggcggcaaggcctgcgagggtcctgagctgcagactaagctctgcagtatggctgcctgcccggtggaaggccagtggttagaatggggtccctggggcccatgctccacgtcctgtgccaatgggacccaacagcgcagccggaagtgcagcgtggcgggcccagcctgggccacatgcacgggtgccctcactgacacccgggagtgcagcaacctcgagtgcccggccactgatagcaagtgggggccatggaatgcgtggagcctgtgctctaagacgtgtgacacaggctggcagcgccgcttccgcatgtgccaggccacgggcacgcagggctacccctgcgagggcaccggagaggaggtgaagccttgtagtgagaagaggtgtccagccttccatgagatgtgcagggatgagtacgtgatgctgatgacgtggaagaaggcagctgctggcgagatcatctacaacaagtgccccccgaatgcctcagggtctgccagccgccgctgtctcctcagtgcccaaggcgtggcgtactgggggctgcccagctttgctcgctgcatctcccatgagtaccgctacctgtatctgtcacttagggagcacctggccaaggggcagcgcatgctggcaggcgagggcatgtcgcaggtggtgcgcagcctgcaggagctactggcccggcgcacctactatagtggggacctgctcttctctgtggacattctgaggaatgtcactgacacctttaagagggccacctacgtgccctcggctgatgatgtgcagcgcttcttccaggtggtgagcttcatggtggatgcggaaaacaaggagaagtgggacgatgctcagcaggtgtcccctggctctgtgcacctgctccgtgtcgtggaggacttcattcacctggtgggcgatgctctcaaggccttccagagctctctgattgtcacagataatctagtgatcagcattcagcgagagcccgtctcagctgtgtccagtgacatcacgttccccatgcggggccgccggggcatgaaggactgggtgcggcactcagaggaccgcctcttcctgcccaaggaggtgctcagcctctcctccccagggaagccagccacatctggggcagcaggcagccctggcagggggaggggcccaggaacggtgcctcctggcccaggccactcccaccagcgcctcctcccagcagaccctgatgagtcctcctactttgtgatcggtgctgtactctaccgcacccttggcctcatcctgccgcctcccaggcccccgctggccgtcacatcccgggtgatgacagtgactgtgcgcccccctacccagcctccagctgagcccctcatcactgtggagctctcctacatcatcaatgggaccacggatccccattgcgccagctgggactactccagagcagatgccagctcaggagactgggacactgaaaattgccagaccctggagacccaggcagctcacacccgctgccagtgccagcacctgtccacctttgctgtactagcccagccgcccaaggacctgaccctggagctggcgggctccccctcggtccccctggtgatcggctgtgcagtgtcgtgcatggcgctgctcaccctgctcgccatctatgccgccttttggaggttcataaaatctgaacgctccatcatcttgctgaacttctgcctgtccatcttggcatccaacatcctgatcctcgtgggccagtcccgggtgctgagcaagggcgtgtgcaccatgacggctgccttcctgcacttcttctttctctcctccttttgctgggtgcttaccgaggcctggcagtcctacctggctgtcattgggcggatgcgcacccgcctcgttcgcaagcgcttcctctgcctgggctggggtctgcctgccctggtggtggccgtgtctgttggctttacccgaacgaaaggatacggtacatccagctactgctggctctccctggagggcggcctgctctacgcctttgtgggccctgcagccgtcattgtcctggtgaacatgctcatcggaatcatcgtcttcaacaagctcatggcacgtgatggcatctccgacaaatccaagaagcagagggccgggtcggagcggtgcccctgggccagcctgctcctcccctgctcagcgtgtggagcggtccccagccccctgctcagctcagcctcggccaggaacgccatggcctcactctggagctcctgcgtggtgctgcccctgctggcgctcacctggatgtctgccgtcctggctatgacagaccgccgttccgtcctcttccaggccctctttgctgtcttcaactccgcgcagggctttgtcatcactgctgtgcactgcttcctgcgccgagaggtccaggatgtggtgaagtgccagatgggggtgtgccgggctgatgagagcgaagactcccctgactcgtgtaagaacgggcagctgcagatcctgtcagactttgaaaaggatgtggatctggcttgtcaaacagtgctgttcaaggaggtcaacacttgcaacccgtccaccatcacgggcacactatcccgcctgtccctggatgaggatgaggagcccaagtcctgcctcgtgggccctgagggcagcctcagcttctcaccactgcctgggaatatcctggtgcccatggcagcctcaccagggctgggggagcctccgcccccacaggaggccaaccctgtttacatgtgtggggagggtggcctgcggcagctggacctcacatggctgcggcccactgagccaggctctgagggagactacatggtgctgccccggcggactttgagcctgcagcctggcggtgggggtggaggtggtgaggatgcccccagggcccggccggaggggaccccccggcgagctgccaagacagtggcccacactgaaggctaccccagcttcctgtccgtggaccactcgggcctggggctgggccctgcctatggatctctccagaatccctatggaatgaccttccaaccgccaccgccgacacccagcgcccgccaagtgcccgagccaggggagcgcagccggaccatgcctcgcaccgtgcccggctctaccatgaagatgggctccctggagcgaaagaaattacggtattcagacctggactttgagaaggtgatgcacacccggaaacggcattcagaactctaccacgagctcaaccagaagttccacactttcgaccgctaccgcagccagtccacggccaagagggagaagcggtggagtgtgtcctcgggtggggcagccgagcggagcgtgtgcaccgataagcccagccctggggagcgccccagcttgtcccaacatcggcgccatcagagctggagcaccttcaaatctatgacactgggctcgctgccccccaagccccgagaacggctgactctgcaccgggcagcagcctgggagcccacagaaccaccggatggtgacttccagacagaggtgtgagtgccacgctggactgcccactgcatataaatatatatatctctctattttcacactccactttggaactacccaggagccagcgccctctcccctctcccgagggctgggcagggaggcgccgtggactcagccaggctgggggagccggacatggcttggcctggggtcccagggcccttccttgtttctcagaggcccctcagccactggaaccccatcttcagcccagcctgtccgtccctgtcccgggctggggaggggggaggggaactttgttgggaataaacttcactctgtgga

SEQ ID NO: 3656 - DNA, 4675 bp, Homo sapiens
  source 1..4675: mol_type = unassigned DNA
gatgaccccagcctgtcccctcttactgtctgtgattctgtccctgcgcctggccaccgccttcgaccccgcccccagtgcctgctctgccctggcctcgggtgtgctctacggggccttctcgctgcaggacctctttcctaccatcgcctcgggctgctcctggaccctggagaaccctgaccccaccaagtactccctctacctgcgcttcaaccgccaggagcaggtgtgcgcacactttgccccccgcctgctgcccctggaccactacctggtcaactttacctgcctgcggcctagccccgaggaggcggtggcccaggcggagtcagaggtggggcggccagaagaggaggaggcagaggcggcagcggggttggagctgtgcagcggctcaggcccctttaccttcctgcacttcgacaagaacttcgtgcagctgtgcctgtcggctgagccctccgaggccccgcgcctgctggcgcccgctgccctagccttccgctttgtcgaggtcttgctcatcaacaacaacaactctagccaattcacctgtggtgtgctctgccgctggagtgaggagtgtggccgcgctgccggcagggcctgcggctttgctcagccaggctgcagctgccctggagaggcgggggccggctccaccaccaccacatctccaggccctcctgctgcccacaccctgtccaatgccctggtgcccgggggcccagccccacctgctgaggccgatttgcactcggggagcagcaatgatctgttcacaaccgagatgagatatggtgaggagccggaagaggaaccgaaagtgaaaacccagtggccgaggtctgcagatgagcctgggctatacatggcgcagacaggcgacccggcggctgaggagtggtccccgtggagcgtgtgttccctgacgtgtgggcagggtctgcaggtgcggacccgctcctgtgtgtcctccccctatgggaccctgtgcagcgggcccctgcgggagaccaggccctgcaacaattcagccacctgcccagtgcacggcgtgtgggaggagtgggggtcctggagcctgtgctcccgcagctgcgggcgggggtcccggagccggatgcggacctgcgtgcccccccagcacggcggcaaggcctgcgagggtcctgagctgcagactaagctctgcagtatggctgcctgcccggtggaaggccagtggttagaatggggtccctggggcccatgctccacgtcctgtgccaatgggacccaacagcgcagccggaagtgcagcgtggcgggcccagcctgggccacatgcacgggtgccctcactgacacccgggagtgcagcaacctcgagtgcccggccactgatagcaagtgggggccatggaatgcgtggagcctgtgctctaagacgtgtgacacaggctggcagcgccgcttccgcatgtgccaggccacgggcacgcagggctacccctgcgagggcaccggagaggaggtgaagccttgtagtgagaagaggtgtccagccttccatgagatgtgcagggatgagtacgtgatgctgatgacgtggaagaaggcagctgctggcgagatcatctacaacaagtgccccccgaatgcctcagggtctgccagccgccgctgtctcctcagtgcccaaggcgtggcgtactgggggctgcccagctttgctcgctgcatctcccatgagtaccgctacctgtatctgtcacttagggagcacctggccaaggggcagcgcatgctggcaggcgagggcatgtcgcaggtggtgcgcagcctgcaggagctactggcccggcgcacctactatagtggggacctgctcttctctgtggacattctgaggaatgtcactgacacctttaagagggccacctacgtgccctcggctgatgatgtgcagcgcttcttccaggtggtgagcttcatggtggatgcggaaaacaaggagaagtgggacgatgctcagcaggtgtcccctggctctgtgcacctgctccgtgtcgtggaggacttcattcacctggtgggcgatgctctcaaggccttccagagctctctgattgtcacagataatctagtgatcagcattcagcgagagcccgtctcagctgtgtccagtgacatcacgttccccatgcggggccgccggggcatgaaggactgggtgcggcactcagaggaccgcctcttcctgcccaaggaggtgctcagcctctcctccccagggaagccagccacatctggggcagcaggcagccctggcagggggaggggcccaggaacggtgcctcctggcccaggccactcccaccagcgcctcctcccagcagaccctgatgagtcctcctactttgtgatcggtgctgtactctaccgcacccttggcctcatcctgccgcctcccaggcccccgctggccgtcacatcccgggtgatgacagtgactgtgcgcccccctacccagcctccagctgagcccctcatcactgtggagctctcctacatcatcaatgggaccacggatccccattgcgccagctgggactactccagagcagatgccagctcaggagactgggacactgaaaattgccagaccctggagacccaggcagctcacacccgctgccagtgccagcacctgtccacctttgctgtactagcccagccgcccaaggacctgaccctggagctggcgggctccccctcggtccccctggtgatcggctgtgcagtgtcgtgcatggcgctgctcaccctgctcgccatctatgccgccttttggaggttcataaaatctgaacgctccatcatcttgctgaacttctgcctgtccatcttggcatccaacatcctgatcctcgtgggccagtcccgggtgctgagcaagggcgtgtgcaccatgacggctgccttcctgcacttcttctttctctcctccttttgctgggtgcttaccgaggcctggcagtcctacctggctgtcattgggcggatgcgcacccgcctcgttcgcaagcgcttcctctgcctgggctggggtctgcctgccctggtggtggccgtgtctgttggctttacccgaacgaaaggatacggtacatccagctactgctggctctccctggagggcggcctgctctacgcctttgtgggccctgcagccgtcattgtcctggtgaacatgctcatcggaatcatcgtcttcaacaagctcatggcacgtgatggcatctccgacaaatccaagaagcagagggccgggtcggagcggtgcccctgggccagcctgctcctcccctgctcagcgtgtggagcggtccccagccccctgctcagctcagcctcggccaggaacgccatggcctcactctggagctcctgcgtggtgctgcccctgctggcgctcacctggatgtctgccgtcctggctatgacagaccgccgttccgtcctcttccaggccctctttgctgtcttcaactccgcgcagggctttgtcatcactgctgtgcactgcttcctgcgccgagaggtccaggatgtggtgaagtgccagatgggggtgtgccgggctgatgagagcgaagactcccctgactcgtgtaagaacgggcagctgcagatcctgtcagactttgaaaaggatgtggatctggcttgtcaaacagtgctgttcaaggaggtcaacacttgcaacccgtccaccatcacgggcacactatcccgcctgtccctggatgaggatgaggagcccaagtcctgcctcgtgggccctgagggcagcctcagcttctcaccactgcctgggaatatcctggtgcccatggcagcctcaccagggctgggggagcctccgcccccacaggaggccaaccctgtttacatgtgtggggagggtggcctgcggcagctggacctcacatggctgcggcccactgagccaggctctgagggagactacatggtgctgccccggcggactttgagcctgcagcctggcggtgggggtggaggtggtgaggatgcccccagggcccggccggaggggaccccccggcgagctgccaagacagtggcccacactgaaggctaccccagcttcctgtccgtggaccactcgggcctggggctgggccctgcctatggatctctccagaatccctatggaatgaccttccaaccgccaccgccgacacccagcgcccgccaagtgcccgagccaggggagcgcagccggaccatgcctcgcaccgtgcccggctctaccatgaagatgggctccctggagcgaaagaaattacggtattcagacctggactttgagaaggtgatgcacacccggaaacggcattcagaactctaccacgagctcaaccagaagttccacactttcgaccgctaccgcagccagtccacggccaaggataagcccagccctggggagcgccccagcttgtcccaacatcggcgccatcagagctggagcaccttcaaatctatgacactgggctcgctgccccccaagccccgagaacggctgactctgcaccgggcagcagcctgggagcccacagaaccaccggatggtgacttccagacagaggtgtgagtgccacgc

SEQ ID NO: 3657 - DNA, 5176 bp, Homo sapiens
  source 1..5176: mol_type = unassigned DNA
actcggcccggcgcgcgctgcgggcagcggccggagcggccggaggaaccgggttcggcggcagcggcggcggcgctcagagaccgaagaggatgcggcaccggctctcagagcccggggctgcggccgccgcccgcaaataggaggcggcgcgcggcgcgggcggtgctcggggcgggggagcgggggagcggggggcggcgcggcaaggaggcggcggcggcggcggcggcaggagcccgcgcccggcccggcgccgcccgcccgcccgccccgcgctgctccgcggcgccttttctgcacccgccgcccgggagagcgggagcctcggccctccgcgcggctgcagctacctaccctgcgcccggcccggtccccgacttagggatggcaaacttgcgccccgtggccgcccccgccagcgccggcccccgctcctgctgctgacggcgcccagggcaagggacataggatgaccccagcctgtcccctcttactgtctgtgattctgtccctgcgcctggccaccgccttcgaccccgcccccagtgcctgctctgccctggcctcgggtgtgctctacggggccttctcgctgcaggacctctttcctaccatcgcctcgggctgctcctggaccctggagaaccctgaccccaccaagtactccctctacctgcgcttcaaccgccaggagcaggtgtgcgcacactttgccccccgcctgctgcccctggaccactacctggtcaactttacctgcctgcggcctagccccgaggaggcggtggcccaggcggagtcagaggtggggcggccagaagaggaggaggcagaggcggcagcggggttggagctgtgcagcggctcaggcccctttaccttcctgcacttcgacaagaacttcgtgcagctgtgcctgtcggctgagccctccgaggccccgcgcctgctggcgcccgctgccctagccttccgctttgtcgaggtcttgctcatcaacaacaacaactctagccaattcacctgtggtgtgctctgccgctggagtgaggagtgtggccgcgctgccggcagggcctgcggctttgctcagccaggctgcagctgccctggagaggcgggggccggctccaccaccaccacatctccaggccctcctgctgcccacaccctgtccaatgccctggtgcccgggggcccagccccacctgctgaggccgatttgcactcggggagcagcaatgatctgttcacaaccgagatgagatatggtgaggagccggaagaggaaccgaaagtgaaaacccagtggccgaggtctgcagatgagcctgggctatacatggcgcagacaggcgacccggcggctgaggagtggtccccgtggagcgtgtgttccctgacgtgtgggcagggtctgcaggtgcggacccgctcctgtgtgtcctccccctatgggaccctgtgcagcgggcccctgcgggagaccaggccctgcaacaattcagccacctgcccagtggaaggccagtggttagaatggggtccctggggcccatgctccacgtcctgtgccaatgggacccaacagcgcagccggaagtgcagcgtggcgggcccagcctgggccacatgcacgggtgccctcactgacacccgggagtgcagcaacctcgagtgcccggccactgatagcaagtgggggccatggaatgcgtggagcctgtgctctaagacgtgtgacacaggctggcagcgccgcttccgcatgtgccaggccacgggcacgcagggctacccctgcgagggcaccggagaggaggtgaagccttgtagtgagaagaggtgtccagccttccatgagatgtgcagggatgagtacgtgatgctgatgacgtggaagaaggcagctgctggcgagatcatctacaacaagtgccccccgaatgcctcagggtctgccagccgccgctgtctcctcagtgcccaaggcgtggcgtactgggggctgcccagctttgctcgctgcatctcccatgagtaccgctacctgtatctgtcacttagggagcacctggccaaggggcagcgcatgctggcaggcgagggcatgtcgcaggtggtgcgcagcctgcaggagctactggcccggcgcacctactatagtggggacctgctcttctctgtggacattctgaggaatgtcactgacacctttaagagggccacctacgtgccctcggctgatgatgtgcagcgcttcttccaggtggtgagcttcatggtggatgcggaaaacaaggagaagtgggacgatgctcagcaggtgtcccctggctctgtgcacctgctccgtgtcgtggaggacttcattcacctggtgggcgatgctctcaaggccttccagagctctctgattgtcacagataatctagtgatcagcattcagcgagagcccgtctcagctgtgtccagtgacatcacgttccccatgcggggccgccggggcatgaaggactgggtgcggcactcagaggaccgcctcttcctgcccaaggaggtgctcagcctctcctccccagggaagccagccacatctggggcagcaggcagccctggcagggggaggggcccaggaacggtgcctcctggcccaggccactcccaccagcgcctcctcccagcagaccctgatgagtcctcctactttgtgatcggtgctgtactctaccgcacccttggcctcatcctgccgcctcccaggcccccgctggccgtcacatcccgggtgatgacagtgactgtgcgcccccctacccagcctccagctgagcccctcatcactgtggagctctcctacatcatcaatgggaccacggatccccattgcgccagctgggactactccagagcagatgccagctcaggagactgggacactgaaaattgccagaccctggagacccaggcagctcacacccgctgccagtgccagcacctgtccacctttgctgtactagcccagccgcccaaggacctgaccctggagctggcgggctccccctcggtccccctggtgatcggctgtgcagtgtcgtgcatggcgctgctcaccctgctcgccatctatgccgccttttggaggttcataaaatctgaacgctccatcatcttgctgaacttctgcctgtccatcttggcatccaacatcctgatcctcgtgggccagtcccgggtgctgagcaagggcgtgtgcaccatgacggctgccttcctgcacttcttctttctctcctccttttgctgggtgcttaccgaggcctggcagtcctacctggctgtcattgggcggatgcgcacccgcctcgttcgcaagcgcttcctctgcctgggctggggtctgcctgccctggtggtggccgtgtctgttggctttacccgaacgaaaggatacggtacatccagctactgctggctctccctggagggcggcctgctctacgcctttgtgggccctgcagccgtcattgtcctggtgaacatgctcatcggaatcatcgtcttcaacaagctcatggcacgtgatggcatctccgacaaatccaagaagcagagggccggggcctcactctggagctcctgcgtggtgctgcccctgctggcgctcacctggatgtctgccgtcctggctatgacagaccgccgttccgtcctcttccaggccctctttgctgtcttcaactccgcgcagggctttgtcatcactgctgtgcactgcttcctgcgccgagaggtccaggatgtggtgaagtgccagatgggggtgtgccgggctgatgagagcgaagactcccctgactcgtgtaagaacgggcagctgcagatcctgtcagactttgaaaaggatgtggatctggcttgtcaaacagtgctgttcaaggaggtcaacacttgcaacccgtccaccatcacgggcacactatcccgcctgtccctggatgaggatgaggagcccaagtcctgcctcgtgggccctgagggcagcctcagcttctcaccactgcctgggaatatcctggtgcccatggcagcctcaccagggctgggggagcctccgcccccacaggaggccaaccctgtttacatgtgtggggagggtggcctgcggcagctggacctcacatggctgcggcccactgagccaggctctgagggagactacatggtgctgccccggcggactttgagcctgcagcctggcggtgggggtggaggtggtgaggatgcccccagggcccggccggaggggaccccccggcgagctgccaagacagtggcccacactgaaggctaccccagcttcctgtccgtggaccactcgggcctggggctgggccctgcctatggatctctccagaatccctatggaatgaccttccaaccgccaccgccgacacccagcgcccgccaagtgcccgagccaggggagcgcagccggaccatgcctcgcaccgtgcccggctctaccatgaagatgggctccctggagcgaaagaaattacggtattcagacctggactttgagaaggtgatgcacacccggaaacggcattcagaactctaccacgagctcaaccagaagttccacactttcgaccgctaccgcagccagtccacggccaaggataagcccagccctggggagcgccccagcttgtcccaacatcggcgccatcagagctggagcaccttcaaatctatgacactgggctcgctgccccccaagccccgagaacggctgactctgcaccgggcagcagcctgggagcccacagaaccaccggatggtgacttccagacagaggtgtgagtgccacgctggactgcccactgcatataaatatatatatctctctattttcacactccactttggaactacccaggagccagcgccctctcccctctcccgagggctgggcagggaggcgccgtggactcagccaggctgggggagccggacatggcttggcctggggtcccagggcccttccttgtttctcagaggcccctcagccactggaaccccatcttcagcccagcctgtccgtccctgtcccgggctggggaggggggaggggaactttgttgggaataaacttcactctgtgga

SEQ ID NO: 3658 - DNA, 4857 bp, Homo sapiens
  source 1..4857: mol_type = unassigned DNA
ccagcgccggcccccgctcctgctgctgacggcgcccagggcaagggacataggatgaccccagcctgtcccctcttactgtctgtgattctgtccctgcgcctggccaccgccttcgaccccgcccccagtgcctgctctgccctggcctcgggtgtgctctacggggccttctcgctgcaggacctctttcctaccatcgcctcgggctgctcctggaccctggagaaccctgaccccaccaagtactccctctacctgcgcttcaaccgccaggagcaggtgtgcgcacactttgccccccgcctgctgcccctggaccactacctggtcaactttacctgcctgcggcctagccccgaggaggcggtggcccaggcggagtcagaggtggggcggccagaagaggaggaggcagaggcggcagcggggttggagctgtgcagcggctcaggcccctttaccttcctgcacttcgacaagaacttcgtgcagctgtgcctgtcggctgagccctccgaggccccgcgcctgctggcgcccgctgccctagccttccgctttgtcgaggtcttgctcatcaacaacaacaactctagccaattcacctgtggtgtgctctgccgctggagtgaggagtgtggccgcgctgccggcagggcctgcggctttgctcagccaggctgcagctgccctggagaggcgggggccggctccaccaccaccacatctccaggccctcctgctgcccacaccctgtccaatgccctggtgcccgggggcccagccccacctgctgaggccgatttgcactcggggagcagcaatgatctgttcacaaccgagatgagatatggtgaggagccggaagaggaaccgaaagtgaaaacccagtggccgaggtctgcagatgagcctgggctatacatggcgcagacagtgcacggcgtgtgggaggagtgggggtcctggagcctgtgctcccgcagctgcgggcgggggtcccggagccggatgcggacctgcgtgcccccccagcacggcggcaaggcctgcgagggtcctgagctgcagactaagctctgcagtatggctgcctgcccggtggaaggccagtggttagaatggggtccctggggcccatgctccacgtcctgtgccaatgggacccaacagcgcagccggaagtgcagcgtggcgggcccagcctgggccacatgcacgggtgccctcactgacacccgggagtgcagcaacctcgagtgcccggccactgatagcaagtgggggccatggaatgcgtggagcctgtgctctaagacgtgtgacacaggctggcagcgccgcttccgcatgtgccaggccacgggcacgcagggctacccctgcgagggcaccggagaggaggtgaagccttgtagtgagaagaggtgtccagccttccatgagatgtgcagggatgagtacgtgatgctgatgacgtggaagaaggcagctgctggcgagatcatctacaacaagtgccccccgaatgcctcagggtctgccagccgccgctgtctcctcagtgcccaaggcgtggcgtactgggggctgcccagctttgctcgctgcatctcccatgagtaccgctacctgtatctgtcacttagggagcacctggccaaggggcagcgcatgctggcaggcgagggcatgtcgcaggtggtgcgcagcctgcaggagctactggcccggcgcacctactatagtggggacctgctcttctctgtggacattctgaggaatgtcactgacacctttaagagggccacctacgtgccctcggctgatgatgtgcagcgcttcttccaggtggtgagcttcatggtggatgcggaaaacaaggagaagtgggacgatgctcagcaggtgtcccctggctctgtgcacctgctccgtgtcgtggaggacttcattcacctggtgggcgatgctctcaaggccttccagagctctctgattgtcacagataatctagtgatcagcattcagcgagagcccgtctcagctgtgtccagtgacatcacgttccccatgcggggccgccggggcatgaaggactgggtgcggcactcagaggaccgcctcttcctgcccaaggaggtgctcagcctctcctccccagggaagccagccacatctggggcagcaggcagccctggcagggggaggggcccaggaacggtgcctcctggcccaggccactcccaccagcgcctcctcccagcagaccctgatgagtcctcctactttgtgatcggtgctgtactctaccgcacccttggcctcatcctgccgcctcccaggcccccgctggccgtcacatcccgggtgatgacagtgactgtgcgcccccctacccagcctccagctgagcccctcatcactgtggagctctcctacatcatcaatgggaccacggatccccattgcgccagctgggactactccagagcagatgccagctcaggagactgggacactgaaaattgccagaccctggagacccaggcagctcacacccgctgccagtgccagcacctgtccacctttgctgtactagcccagccgcccaaggacctgaccctggagctggcgggctccccctcggtccccctggtgatcggctgtgcagtgtcgtgcatggcgctgctcaccctgctcgccatctatgccgccttttggaggttcataaaatctgaacgctccatcatcttgctgaacttctgcctgtccatcttggcatccaacatcctgatcctcgtgggccagtcccgggtgctgagcaagggcgtgtgcaccatgacggctgccttcctgcacttcttctttctctcctccttttgctgggtgcttaccgaggcctggcagtcctacctggctgtcattgggcggatgcgcacccgcctcgttcgcaagcgcttcctctgcctgggctggggtctgcctgccctggtggtggccgtgtctgttggctttacccgaacgaaaggatacggtacatccagctactgctggctctccctggagggcggcctgctctacgcctttgtgggccctgcagccgtcattgtcctggtgaacatgctcatcggaatcatcgtcttcaacaagctcatggcacgtgatggcatctccgacaaatccaagaagcagagggccgggtcggagcggtgcccctgggccagcctgctcctcccctgctcagcgtgtggagcggtccccagccccctgctcagctcagcctcggccaggaacgccatggcctcactctggagctcctgcgtggtgctgcccctgctggcgctcacctggatgtctgccgtcctggctatgacagaccgccgttccgtcctcttccaggccctctttgctgtcttcaactccgcgcagggctttgtcatcactgctgtgcactgcttcctgcgccgagaggtccaggatgtggtgaagtgccagatgggggtgtgccgggctgatgagagcgaagactcccctgactcgtgtaagaacgggcagctgcagatcctgtcagactttgaaaaggatgtggatctggcttgtcaaacagtgctgttcaaggaggtcaacacttgcaacccgtccaccatcacgggcacactatcccgcctgtccctggatgaggatgaggagcccaagtcctgcctcgtgggccctgagggcagcctcagcttctcaccactgcctgggaatatcctggtgcccatggcagcctcaccagggctgggggagcctccgcccccacaggaggccaaccctgtttacatgtgtggggagggtggcctgcggcagctggacctcacatggctgcggcccactgagccaggctctgagggagactacatggtgctgccccggcggactttgagcctgcagcctggcggtgggggtggaggtggtgaggatgcccccagggcccggccggaggggaccccccggcgagctgccaagacagtggcccacactgaaggctaccccagcttcctgtccgtggaccactcgggcctggggctgggccctgcctatggatctctccagaatccctatggaatgaccttccaaccgccaccgccgacacccagcgcccgccaagtgcccgagccaggggagcgcagccggaccatgcctcgcaccgtgcccggctctaccatgaagatgggctccctggagcgaaagaaattacggtattcagacctggactttgagaaggtgatgcacacccggaaacggcattcagaactctaccacgagctcaaccagaagttccacactttcgaccgctaccgcagccagtccacggccaaggataagcccagccctggggagcgccccagcttgtcccaacatcggcgccatcagagctggagcaccttcaaatctatgacactgggctcgctgccccccaagccccgagaacggctgactctgcaccgggcagcagcctgggagcccacagaaccaccggatggtgacttccagacagaggtgtgagtgccacgctggactgcccactgcatataaatatatatatctctctattttcacactccactttggaactacccaggagccagcgccctctcccctctcccgagggctgggcagggaggcgccgtggactcagccaggctgggggagccggacatggcttggcctggggtcccagggcccttccttgtttctcagaggcccctcagccactggaaccccatcttcagcccagcctgtccgtccctgtcccgggctggggaggggggaggggaactttgttgggaataaacttcactctgtgga

SEQ ID NO: 3659 - DNA, 4879 bp, Homo sapiens
  source 1..4879: mol_type = unassigned DNA
ggggagggagatccagcttcagacatgcaaaggaagaccccgcagaggatcctgcctgacacttagctgtcatatgctgagcctcagagggccagatactcatggcaagggacataggatgaccccagcctgtcccctcttactgtctgtgattctgtccctgcgcctggccaccgccttcgaccccgcccccagtgcctgctctgccctggcctcgggtgtgctctacggggccttctcgctgcaggacctctttcctaccatcgcctcgggctgctcctggaccctggagaaccctgaccccaccaagtactccctctacctgcgcttcaaccgccaggagcaggtgtgcgcacactttgccccccgcctgctgcccctggaccactacctggtcaactttacctgcctgcggcctagccccgaggaggcggtggcccaggcggagtcagaggtggggcggccagaagaggaggaggcagaggcggcagcggggttggagctgtgcagcggctcaggcccctttaccttcctgcacttcgacaagaacttcgtgcagctgtgcctgtcggctgagccctccgaggccccgcgcctgctggcgcccgctgccctagccttccgctttgtcgaggtcttgctcatcaacaacaacaactctagccaattcacctgtggtgtgctctgccgctggagtgaggagtgtggccgcgctgccggcagggcctgcggctttgctcagccaggctgcagctgccctggagaggcgggggccggctccaccaccaccacatctccaggccctcctgctgcccacaccctgtccaatgccctggtgcccgggggcccagccccacctgctgaggccgatttgcactcggggagcagcaatgatctgttcacaaccgagatgagatatggtgaggagccggaagaggaaccgaaagtgaaaacccagtggccgaggtctgcagatgagcctgggctatacatggcgcagacagtgcacggcgtgtgggaggagtgggggtcctggagcctgtgctcccgcagctgcgggcgggggtcccggagccggatgcggacctgcgtgcccccccagcacggcggcaaggcctgcgagggtcctgagctgcagactaagctctgcagtatggctgcctgcccggtggaaggccagtggttagaatggggtccctggggcccatgctccacgtcctgtgccaatgggacccaacagcgcagccggaagtgcagcgtggcgggcccagcctgggccacatgcacgggtgccctcactgacacccgggagtgcagcaacctcgagtgcccggccactgatagcaagtgggggccatggaatgcgtggagcctgtgctctaagacgtgtgacacaggctggcagcgccgcttccgcatgtgccaggccacgggcacgcagggctacccctgcgagggcaccggagaggaggtgaagccttgtagtgagaagaggtgtccagccttccatgagatgtgcagggatgagtacgtgatgctgatgacgtggaagaaggcagctgctggcgagatcatctacaacaagtgccccccgaatgcctcagggtctgccagccgccgctgtctcctcagtgcccaaggcgtggcgtactgggggctgcccagctttgctcgctgcatctcccatgagtaccgctacctgtatctgtcacttagggagcacctggccaaggggcagcgcatgctggcaggcgagggcatgtcgcaggtggtgcgcagcctgcaggagctactggcccggcgcacctactatagtggggacctgctcttctctgtggacattctgaggaatgtcactgacacctttaagagggccacctacgtgccctcggctgatgatgtgcagcgcttcttccaggtggtgagcttcatggtggatgcggaaaacaaggagaagtgggacgatgctcagcaggtgtcccctggctctgtgcacctgctccgtgtcgtggaggacttcattcacctggtgggcgatgctctcaaggccttccagagctctctgattgtcacagataatctagtgatcagcattcagcgagagcccgtctcagctgtgtccagtgacatcacgttccccatgcggggccgccggggcatgaaggactgggtgcggcactcagaggaccgcctcttcctgcccaaggaggtgctcagcctctcctccccagggaagccagccacatctggggcagcaggcagccctggcagggggaggggcccaggaacggtgcctcctggcccaggccactcccaccagcgcctcctcccagcagaccctgatgagtcctcctactttgtgatcggtgctgtactctaccgcacccttggcctcatcctgccgcctcccaggcccccgctggccgtcacatcccgggtgatgacagtgactgtgcgcccccctacccagcctccagctgagcccctcatcactgtggagctctcctacatcatcaatgggaccacggatccccattgcgccagctgggactactccagagcagatgccagctcaggagactgggacactgaaaattgccagaccctggagacccaggcagctcacacccgctgccagtgccagcacctgtccacctttgctgtactagcccagccgcccaaggacctgaccctggagctggcgggctccccctcggtccccctggtgatcggctgtgcagtgtcgtgcatggcgctgctcaccctgctcgccatctatgccgccttttggaggttcataaaatctgaacgctccatcatcttgctgaacttctgcctgtccatcttggcatccaacatcctgatcctcgtgggccagtcccgggtgctgagcaagggcgtgtgcaccatgacggctgccttcctgcacttcttctttctctcctccttttgctgggtgcttaccgaggcctggcagtcctacctggctgtcattgggcggatgcgcacccgcctcgttcgcaagcgcttcctctgcctgggctggggtctgcctgccctggtggtggccgtgtctgttggctttacccgaacgaaaggatacggtacatccagctactgctggctctccctggagggcggcctgctctacgcctttgtgggccctgcagccgtcattgtcctggtgaacatgctcatcggaatcatcgtcttcaacaagctcatggcacgtgatggcatctccgacaaatccaagaagcagagggccggggcctcactctggagctcctgcgtggtgctgcccctgctggcgctcacctggatgtctgccgtcctggctatgacagaccgccgttccgtcctcttccaggccctctttgctgtcttcaactccgcgcagggctttgtcatcactgctgtgcactgcttcctgcgccgagaggtccaggatgtggtgaagtgccagatgggggtgtgccgggctgatgagagcgaagactcccctgactcgtgtaagaacgggcagctgcagatcctgtcagactttgaaaaggatgtggatctggcttgtcaaacagtgctgttcaaggaggtcaacacttgcaacccgtccaccatcacgggcacactatcccgcctgtccctggatgaggatgaggagcccaagtcctgcctcgtgggccctgagggcagcctcagcttctcaccactgcctgggaatatcctggtgcccatggcagcctcaccagggctgggggagcctccgcccccacaggaggccaaccctgtttacatgtgtggggagggtggcctgcggcagctggacctcacatggctgcggcccactgagccaggctctgagggagactacatggtgctgccccggcggactttgagcctgcagcctggcggtgggggtggaggtggtgaggatgcccccagggcccggccggaggggaccccccggcgagctgccaagacagtggcccacactgaaggctaccccagcttcctgtccgtggaccactcgggcctggggctgggccctgcctatggatctctccagaatccctatggaatgaccttccaaccgccaccgccgacacccagcgcccgccaagtgcccgagccaggggagcgcagccggaccatgcctcgcaccgtgcccggctctaccatgaagatgggctccctggagcgaaagaaattacggtattcagacctggactttgagaaggtgatgcacacccggaaacggcattcagaactctaccacgagctcaaccagaagttccacactttcgaccgctaccgcagccagtccacggccaagagggagaagcggtggagtgtgtcctcgggtggggcagccgagcggagcgtgtgcaccgataagcccagccctggggagcgccccagcttgtcccaacatcggcgccatcagagctggagcaccttcaaatctatgacactgggctcgctgccccccaagccccgagaacggctgactctgcaccgggcagcagcctgggagcccacagaaccaccggatggtgacttccagacagaggtgtgagtgccacgctggactgcccactgcatataaatatatatatctctctattttcacactccactttggaactacccaggagccagcgccctctcccctctcccgagggctgggcagggaggcgccgtggactcagccaggctgggggagccggacatggcttggcctggggtcccagggcccttccttgtttctcagaggcccctcagccactggaaccccatcttcagcccagcctgtccgtccctgtcccgggctggggaggggggaggggaactttgttgggaataaacttcactctgtgga

SEQ ID NO: 3660 - DNA, 2541 bp, Homo sapiens
  source 1..2541: mol_type = unassigned DNA
ggcaagggacataggatgaccccagcctgtcccctcttactgtctgtgattctgtccctgcgcctggccaccgccttcgaccccgcccccagtgcctgctctgccctggcctcgggtgtgctctacggggccttctcgctgcaggacctctttcctaccatcgcctcgggctgctcctggaccctggagaaccctgaccccaccaagtactccctctacctgcgcttcaaccgccaggagcaggtgtgcgcacactttgccccccgcctgctgcccctggaccactacctggtcaactttacctgcctgcggcctagccccgaggaggcggtggcccaggcggagtcagaggtggggcggccagaagaggaggaggcagaggcggcagcggggttggagctgtgcagcggctcaggcccctttaccttcctgcacttcgacaagaacttcgtgcagctgtgcctgtcggctgagccctccgaggccccgcgcctgctggcgcccgctgccctagccttccgctttgtcgaggtcttgctcatcaacaacaacaactctagccaattcacctgtggtgtgctctgccgctggagtgaggagtgtggccgcgctgccggcagggcctgcggctttgctcagccaggctgcagctgccctggagaggcgggggccggctccaccaccaccacatctccaggccctcctgctgcccacaccctgtccaatgccctggtgcccgggggcccagccccacctgctgaggccgatttgcactcggggagcagcaatgatctgttcacaaccgagatgagatatggtgaggagccggaagaggaaccgaaagtgaaaacccagtggccgaggtctgcagatgagcctgggctatacatggcgcagacaggcgacccggcggctgaggagtggtccccgtggagcgtgtgttccctgacgtgtgggcagggtctgcaggtgcggacccgctcctgtgtgtcctccccctatgggaccctgtgcagcgggcccctgcgggagaccaggccctgcaacaattcagccacctgcccagtggaaggccagtggttagaatggggtccctggggcccatgctccacgtcctgtgccaatgggacccaacagcgcagccggaagtgcagcgtggcgggcccagcctgggccacatgcacgggtgccctcactgacacccgggagtgcagcaacctcgagtgcccggccactgatagcaagtgggggccatggaatgcgtggagcctgtgctctaagacgtgtgacacaggctggcagcgccgcttccgcatgtgccaggccacgggcacgcagggctacccctgcgagggcaccggagaggaggtgaagccttgtagtgagaagaggtgtccagccttccatgagatgtgcagggatgagtacgtgatgctgatgacgtggaagaaggcagctgctggcgagatcatctacaacaagtgccccccgaatgcctcagggtctgccagccgccgctgtctcctcagtgcccaaggcgtggcgtactgggggctgcccagctttgctcgctgcatctcccatgagtaccgctacctgtatctgtcacttagggagcacctggccaaggggcagcgcatgctggcaggcgagggcatgtcgcaggtggtgcgcagcctgcaggagctactggcccggcgcacctactatagtggggacctgctcttctctgtggacattctgaggaatgtcactgacacctttaagagggccacctacgtgccctcggctgatgatgtgcagcgcttcttccaggtggtgagcttcatggtggatgcggaaaacaaggagaagtgggacgatgctcagcaggtgtcccctggctctgtgcacctgctccgtgtcgtggaggacttcattcacctggtgggcgatgctctcaaggccttccagagctctctgattgtcacagataatctagtgatcagcattcagcgagagcccgtctcagctgtgtccagtgacatcacgttccccatgcggggccgccggggcatgaaggactgggtgcggcactcagaggaccgcctcttcctgcccaaggaggtgctcagcctctcctccccagggaagccagccacatctggggcagcaggcagccctggcagggggaggggcccaggaacggtgcctcctggcccaggccactcccaccagcgcctcctcccagcagaccctgatgagtcctcctactttgtgatcggtgctgtactctaccgcacccttggcctcatcctgccgcctcccaggcccccgctggccgtcacatcccgggtgatgacagtgactgtgcgcccccctacccagcctccagctgagcccctcatcactgtggagctctcctacatcatcaatgggaccacggatccccattgcgccagctgggactactccagagcagatgccagctcaggagactgggacactgaaaattgccagaccctggagacccaggcagctcacacccgctgccagtgccag

SEQ ID NO: 3661 - DNA, 539 bp, Homo sapiens
  source 1..539: mol_type = unassigned DNA
accgcccccaggggccgagggctgccccttgtcccccttccagttctgcccgcgttttcctccttaaggaggaaccccctcccctaagagagcgaccctctctggcagtcggagcgggaggactgcacagagggggtcgctccctcccctcggcccagtccccagctccggaggcaggatggagggtgtgcgtcccccagggcgacagagctctaggagagcggctcctgaggaccctgtccttgggtccgagcgctggcagaggacccaaagccaccgagtgggggtcaccgcctgcgtggcggcctgggcaggtcgggcggcgagcgccggggaggcggagggaaatccacagcagtgatacatgtgacgtccacactgacagtgccctcctgtgggcatggctcaggttgtgcgcagttcctggcacactggctgtaactccgcccctttctctccctctcagtaaagcaagattacgcggtgacatgcctcacagctgatcacgacacacggggatggagagcaagagttatgga

SEQ ID NO: 3662 - DNA, 3702 bp, Homo sapiens
  source 1..3702: mol_type = unassigned DNA
ggtgaggagccggaagaggaaccgaaagtgaaaacccagtggccgaggtctgcagatgagcctgggctatacatggcgcagacagtgcacggcgtgtgggaggagtgggggtcctggagcctgtgctcccgcagctgcgggcgggggtcccggagccggatgcggacctgcgtgcccccccagcacggcggcaaggcctgcgagggtcctgagctgcagactaagctctgcagtatggctgcctgcccggtggaaggccagtggttagaatggggtccctggggcccatgctccacgtcctgtgccaatgggacccaacagcgcagccggaagtgcagcgtggcgggcccagcctgggccacatgcacgggtgccctcactgacacccgggagtgcagcaacctcgagtgcccggccactgatagcaagtgggggccatggaatgcgtggagcctgtgctctaagacgtgtgacacaggctggcagcgccgcttccgcatgtgccaggccacgggcacgcagggctacccctgcgagggcaccggagaggaggtgaagccttgtagtgagaagaggtgtccagccttccatgagatgtgcagggatgagtacgtgatgctgatgacgtggaagaaggcagctgctggcgagatcatctacaacaagtgccccccgaatgcctcagggtctgccagccgccgctgtctcctcagtgcccaaggcgtggcgtactgggggctgcccagctttgctcgctgcatctcccatgagtaccgctacctgtatctgtcacttagggagcacctggccaaggggcagcgcatgctggcaggcgagggcatgtcgcaggtggtgcgcagcctgcaggagctactggcccggcgcacctactatagtggggacctgctcttctctgtggacattctgaggaatgtcactgacacctttaagagggccacctacgtgccctcggctgatgatgtgcagcgcttcttccaggtggtgagcttcatggtggatgcggaaaacaaggagaagtgggacgatgctcagcaggtgtcccctggctctgtgcacctgctccgtgtcgtggaggacttcattcacctggtgggcgatgctctcaaggccttccagagctctctgattgtcacagataatctagtgatcagcattcagcgagagcccgtctcagctgtgtccagtgacatcacgttccccatgcggggccgccggggcatgaaggactgggtgcggcactcagaggaccgcctcttcctgcccaaggaggtgctcagcctctcctccccagggaagccagccacatctggggcagcaggcagccctggcagggggaggggcccaggaacggtgcctcctggcccaggccactcccaccagcgcctcctcccagcagaccctgatgagtcctcctactttgtgatcggtgctgtactctaccgcacccttggcctcatcctgccgcctcccaggcccccgctggccgtcacatcccgggtgatgacagtgactgtgcgcccccctacccagcctccagctgagcccctcatcactgtggagctctcctacatcatcaatgggaccacggatccccattgcgccagctgggactactccagagcagatgccagctcaggagactgggacactgaaaattgccagaccctggagacccaggcagctcacacccgctgccagtgccagcacctgtccacctttgctgtactagcccagccgcccaaggacctgaccctggagctggcgggctccccctcggtccccctggtgatcggctgtgcagtgtcgtgcatggcgctgctcaccctgctcgccatctatgccgccttttggaggttcataaaatctgaacgctccatcatcttgctgaacttctgcctgtccatcttggcatccaacatcctgatcctcgtgggccagtcccgggtgctgagcaagggcgtgtgcaccatgacggctgccttcctgcacttcttctttctctcctccttttgctgggtgcttaccgaggcctggcagtcctacctggctgtcattgggcggatgcgcacccgcctcgttcgcaagcgcttcctctgcctgggctggggtctgcctgccctggtggtggccgtgtctgttggctttacccgaacgaaaggatacggtacatccagctactgctggctctccctggagggcggcctgctctacgcctttgtgggccctgcagccgtcattgtcctggtgaacatgctcatcggaatcatcgtcttcaacaagctcatggcacgtgatggcatctccgacaaatccaagaagcagagggccggggcctcactctggagctcctgcgtggtgctgcccctgctggcgctcacctggatgtctgccgtcctggctatgacagaccgccgttccgtcctcttccaggccctctttgctgtcttcaactccgcgcagggctttgtcatcactgctgtgcactgcttcctgcgccgagaggtccaggatgtggtgaagtgccagatgggggtgtgccgggctgatgagagcgaagactcccctgactcgtgtaagaacgggcagctgcagatcctgtcagactttgaaaaggatgtggatctggcttgtcaaacagtgctgttcaaggaggtcaacacttgcaacccgtccaccatcacgggcacactatcccgcctgtccctggatgaggatgaggagcccaagtcctgcctcgtgggccctgagggcagcctcagcttctcaccactgcctgggaatatcctggtgcccatggcagcctcaccagggctgggggagcctccgcccccacaggaggccaaccctgtttacatgtgtggggagggtggcctgcggcagctggacctcacatggctgcggcccactgagccaggctctgagggagactacatggtgctgccccggcggactttgagcctgcagcctggcggtgggggtggaggtggtgaggatgcccccagggcccggccggaggggaccccccggcgagctgccaagacagtggcccacactgaaggctaccccagcttcctgtccgtggaccactcgggcctggggctgggccctgcctatggatctctccagaatccctatggaatgaccttccaaccgccaccgccgacacccagcgcccgccaagtgcccgagccaggggagcgcagccggaccatgcctcgcaccgtgcccggctctaccatgaagatgggctccctggagcgaaagaaattacggtattcagacctggactttgagaaggtgatgcacacccggaaacggcattcagaactctaccacgagctcaaccagaagttccacactttcgaccgctaccgcagccagtccacggccaaggataagcccagccctggggagcgccccagcttgtcccaacatcggcgccatcagagctggagcaccttcaaatctatgacactgggctcgctgccccccaagccccgagaacggctgactctgcaccgggcagcagcctgggagcccacagaaccaccggatggtgacttccagacagaggtgtgagtgccacgctggactgcccactgcatataaatatatatatctctctattttcacactccactttggaactacccaggagccagcgccctctcccctctcccg

SEQ ID NO: 3663 - DNA, 4919 bp, Homo sapiens
  source 1..4919: mol_type = unassigned DNA
cagctgatcacgacacacggggatggagagcaagagttatggagaatacaggttggatgggcaagggacataggatgaccccagcctgtcccctcttactgtctgtgattctgtccctgcgcctggccaccgccttcgaccccgcccccagtgcctgctctgccctggcctcgggtgtgctctacggggccttctcgctgcaggacctctttcctaccatcgcctcgggctgctcctggaccctggagaaccctgaccccaccaagtactccctctacctgcgcttcaaccgccaggagcaggtgtgcgcacactttgccccccgcctgctgcccctggaccactacctggtcaactttacctgcctgcggcctagccccgaggaggcggtggcccaggcggagtcagaggtggggcggccagaagaggaggaggcagaggcggcagcggggttggagctgtgcagcggctcaggcccctttaccttcctgcacttcgacaagaacttcgtgcagctgtgcctgtcggctgagccctccgaggccccgcgcctgctggcgcccgctgccctagccttccgctttgtcgaggtcttgctcatcaacaacaacaactctagccaattcacctgtggtgtgctctgccgctggagtgaggagtgtggccgcgctgccggcagggcctgcggctttgctcagccaggctgcagctgccctggagaggcgggggccggctccaccaccaccacatctccaggccctcctgctgcccacaccctgtccaatgccctggtgcccgggggcccagccccacctgctgaggccgatttgcactcggggagcagcaatgatctgttcacaaccgagatgagatatggtgaggagccggaagaggaaccgaaagtgaaaacccagtggccgaggtctgcagatgagcctgggctatacatggcgcagacaggcgacccggcggctgaggagtggtccccgtggagcgtgtgttccctgacgtgtgggcagggtctgcaggtgcggacccgctcctgtgtgtcctccccctatgggaccctgtgcagcgggcccctgcgggagaccaggccctgcaacaattcagccacctgcccagtgcacggcgtgtgggaggagtgggggtcctggagcctgtgctcccgcagctgcgggcgggggtcccggagccggatgcggacctgcgtgcccccccagcacggcggcaaggcctgcgagggtcctgagctgcagactaagctctgcagtatggctgcctgcccggtggaaggccagtggttagaatggggtccctggggcccatgctccacgtcctgtgccaatgggacccaacagcgcagccggaagtgcagcgtggcgggcccagcctgggccacatgcacgggtgccctcactgacacccgggagtgcagcaacctcgagtgcccggccactgatagcaagtgggggccatggaatgcgtggagcctgtgctctaagacgtgtgacacaggctggcagcgccgcttccgcatgtgccaggccacgggcacgcagggctacccctgcgagggcaccggagaggaggtgaagccttgtagtgagaagaggtgtccagccttccatgagatgtgcagggatgagtacgtgatgctgatgacgtggaagaaggcagctgctggcgagatcatctacaacaagtgccccccgaatgcctcagggtctgccagccgccgctgtctcctcagtgcccaaggcgtggcgtactgggggctgcccagctttgctcgctgcatctcccatgagtaccgctacctgtatctgtcacttagggagcacctggccaaggggcagcgcatgctggcaggcgagggcatgtcgcaggtggtgcgcagcctgcaggagctactggcccggcgcacctactatagtggggacctgctcttctctgtggacattctgaggaatgtcactgacacctttaagagggccacctacgtgccctcggctgatgatgtgcagcgcttcttccaggtggtgagcttcatggtggatgcggaaaacaaggagaagtgggacgatgctcagcaggtgtcccctggctctgtgcacctgctccgtgtcgtggaggacttcattcacctggtgggcgatgctctcaaggccttccagagctctctgattgtcacagataatctagtgatcagcattcagcgagagcccgtctcagctgtgtccagtgacatcacgttccccatgcggggccgccggggcatgaaggactgggtgcggcactcagaggaccgcctcttcctgcccaaggaggtgctcagcctctcctccccagggaagccagccacatctggggcagcaggcagccctggcagggggaggggcccaggaacggtgcctcctggcccaggccactcccaccagcgcctcctcccagcagaccctgatgagtcctcctactttgtgatcggtgctgtactctaccgcacccttggcctcatcctgccgcctcccaggcccccgctggccgtcacatcccgggtgatgacagtgactgtgcgcccccctacccagcctccagctgagcccctcatcactgtggagctctcctacatcatcaatgggaccacggatccccattgcgccagctgggactactccagagcagatgccagctcaggagactgggacactgaaaattgccagaccctggagacccaggcagctcacacccgctgccagtgccagcacctgtccacctttgctgtactagcccagccgcccaaggacctgaccctggagctggcgggctccccctcggtccccctggtgatcggctgtgcagtgtcgtgcatggcgctgctcaccctgctcgccatctatgccgccttttggaggttcataaaatctgaacgctccatcatcttgctgaacttctgcctgtccatcttggcatccaacatcctgatcctcgtgggccagtcccgggtgctgagcaagggcgtgtgcaccatgacggctgccttcctgcacttcttctttctctcctccttttgctgggtgcttaccgaggcctggcagtcctacctggctgtcattgggcggatgcgcacccgcctcgttcgcaagcgcttcctctgcctgggctggggtctgcctgccctggtggtggccgtgtctgttggctttacccgaacgaaaggatacggtacatccagctactgctggctctccctggagggcggcctgctctacgcctttgtgggccctgcagccgtcattgtcctggtgaacatgctcatcggaatcatcgtcttcaacaagctcatggcacgtgatggcatctccgacaaatccaagaagcagagggccggggcctcactctggagctcctgcgtggtgctgcccctgctggcgctcacctggatgtctgccgtcctggctatgacagaccgccgttccgtcctcttccaggccctctttgctgtcttcaactccgcgcagggctttgtcatcactgctgtgcactgcttcctgcgccgagaggtccaggatgtggtgaagtgccagatgggggtgtgccgggctgatgagagcgaagactcccctgactcgtgtaagaacgggcagctgcagatcctgtcagactttgaaaaggatgtggatctggcttgtcaaacagtgctgttcaaggaggtcaacacttgcaacccgtccaccatcacgggcacactatcccgcctgtccctggatgaggatgaggagcccaagtcctgcctcgtgggccctgagggcagcctcagcttctcaccactgcctgggaatatcctggtgcccatggcagcctcaccagggctgggggagcctccgcccccacaggaggccaaccctgtttacatgtgtggggagggtggcctgcggcagctggacctcacatggctgcggcccactgagccaggctctgagggagactacatggtgctgccccggcggactttgagcctgcagcctggcggtgggggtggaggtggtgaggatgcccccagggcccggccggaggggaccccccggcgagctgccaagacagtggcccacactgaaggctaccccagcttcctgtccgtggaccactcgggcctggggctgggccctgcctatggatctctccagaatccctatggaatgaccttccaaccgccaccgccgacacccagcgcccgccaagtgcccgagccaggggagcgcagccggaccatgcctcgcaccgtgcccggctctaccatgaagatgggctccctggagcgaaagaaattacggtattcagacctggactttgaggtgatgcacacccggaaacggcattcagaactctaccacgagctcaaccagaagttccacactttcgaccgctaccgcagccagtccacggccaagagggagaagcggtggagtgtgtcctcgggtggggcagccgagcggagcgtgtgcaccgataagcccagccctggggagcgccccagcttgtcccaacatcggcgccatcagagctggagcaccttcaaatctatgacactgggctcgctgccccccaagccccgagaacggctgactctgcaccgggcagcagcctgggagcccacagaaccaccggatggtgacttccagacagaggtgtgagtgccacgctggactgcccactgcatataaatatatatatctctctattttcacactccactttggaactacccaggagccagcgccctctcccctctcccgagggctgggcagggaggcgccgtggactcagccaggctgggggagccggacatggcttggcctggggtcccagggcccttccttgtttctcagaggcccctcagccactggaaccccatcttc

SEQ ID NO: 3664 - DNA, 2927 bp, Homo sapiens
  source 1..2927: mol_type = unassigned DNA
atatgctttagcattttaaatggctacaccaaagagaaaattgaaccaggctctcttccctactcctactggactttggggtggggttattcctctgaatgttctagcggacttggggttagcttaatgcttctgccccagggcaaagaagcagttgagggaaagaaatgtcaaggacgtcagaggcgagctggactgagtgaagtgtggagtaggaagcttaggaacgagtctttgggaacgtggtccacccagggatgtaaaactgtgcttaccgatgcatcccatacgaaatgcttatgtgatcgtctctctaccttcgccattttggctcagcaacctagagaaataatcatggaatcctctggcacaccttcagttaccctaatagtaggcagtggtctttcttgcttggccttgattaccctagcagttgtctatgcagcattatggaggtacatacgctctgagagatccataatactaattaacttctgcctgtctatcatctcatccaatatcctcatactggttggacagactcagacacataataagagtatctgcacaaccaccactgcatttttgcactttttcttcctggcttcattctgttgggttttgactgaggcgtggcaatcatatatggctgtaactggaaaaattaggacacggcttataagaaaacgctttttgtgccttggatggggtttaccagcattagtagtggccacatcagtaggcttcaccagaacaaaaggatatggcactgatcactactgctggctctctcttgaaggaggactactctatgcttttgtgggacctgcagccgctgttgtcctggtcaacatggtgattggcattttggtatttaataaacttgtttccagagatggaatcctagataaaaagctcaaacacagagccggtcagatgagtgagcctcatagcggtttgacgctcaaatgtgccaagtgtggagtagtttcaacaacagctttgtcagccaccaccgccagtaacgccatggcgtctctttggagctcctgtgtggtgttgccccttctggctttgacgtggatgtctgcggttctggccatgacagataaacgctccatattgtttcaaatactttttgctgtgtttgattcattgcaaggctttgttatagtcatggtccactgcattcttcggagagaggttcaggatgcatttagatgccgattgagaaactgtcaggatcccatcaatgcagattcttcgagttcgtttcctaatgggcatgctcaaatcatgacagactttgaaaaggatgtagacattgcctgtcgatcagttcttcataaggatattggtccttgccgagcagccacaataacaggaacactttctaggatttctctaaatgatgatgaagaagaaaagggaacaaaccctgaagggctaagctattcaacattgcctggaaatgtcatttccaaagtcatcatccagcaacccacaggtttgcacatgcccatgagtatgaatgagcttagcaatccatgtttgaaaaaagaaaatagtgaattgcggagaactgtgtacttatgtacggatgataatttgagaggggctgacatggacatagtccatcctcaagaaagaatgatggaaagtgactatattgtgatgcccagaagttctgtaaataaccagccttcaatgaaagaagaaagcaaaatgaatattggcatggaaaccttgccgcatgaaaggctattgcactacaaagtaaaccctgaattcaatatgaatccccctgtaatggaccagttcaatatgaacttagagcaacatctcgcaccccaggaacatatgcagaatttgccctttgaacctcgcacagctgtgaagaatttcatggcctctgagttggatgataatgcaggactatcaagaagtgaaactggatcaacgatatcaatgagttctttagagagaagaaaatcacgatattcagaccttgactttgagaaggtcatgcatacaaggaagaggcatatggaactatttcaagaactaaatcagaaatttcaaactttggacagatttcgggatataccaaatacaagcagtatggaaaaccccgcaccaaacaagaatccatgggacactttcaaaaaccccagtgaatacccgcattacaccacaatcaatgtcttagacacagaggcaaaggatgctttggaactgaggccagcagagtgggagaagtgtctgaatttgcctctggatgtgcaagagggtgactttcaaacagaagtttaaaaaaatcaaaatggactaaggtagagacaaaactttattgcactgacacttaagacttgggaagcctgacatttctatctggacagtgtgactatcttatgtcaggaccttcatgtgccaaacgtcagtggtgttttcatatggtaacttctcactagtcaggctagtggagagatgaccaggtgtacagttctgaccatcctgtgttgtaagtacccgtggaatggatttgtaaggtaatctttatagataaacctcaagcaacgattcatgttgtaaccgcttcatatggtttagttttcaaaaaacttcaccatgaagcacaatgtatatatttatgcagtttttaaagtttataacagtctgtttggccattactacactttttactttataatataaaagcaaagtttttgtcattaaatgaatgtttgttgagctacattcttcattgctttaaatgcaataaagtaataatctcacttttatatgaataatatatttcacatctttattattgcagttttctctagaaagctctgagaagctttctctgctgcagctgtgtataaaatatttaaaatgttgtatggtgtaaataaacttttgtctac

SEQ ID NO: 3665 - DNA, 6010 bp, Homo sapiens
  source 1..6010: mol_type = unassigned DNA
ctttccgacatcaccagccaaggatttttttccccgctctccttagtcgccgtccgtccatcagtacctgcaggggggaggaggaggagggaggaaagcggaaagaggaaaaagcataagcttgagccttccgatccgaccacgaatactcctgtaataaacccaccgccccaacaaatctgccatagcagccgccgccgccgccggtcacttctcgtctcagcgctttctttgcttcttggtttgttgggggtagcttttatgaaacaaatctttgctattaagccacttacattttggggggttccttagagtctcccttgggggggcttctccctccctttagcccccctcggtttggaggttggattcagttggatacggcgcaaggttctgggctcctgctggcttttttttcctctctctcatcgacccccctttggttcccaccccccaccttttgcttttcgtatgtatgcatttttaaaaataaatcctgattttggaagctgagccggggaaaatgggcaacggtgattgggaccgaaggggagtctctccgtcactgttgctgggacgcgtgcctgtgctggtgtcttagagcaagagcctccctgagctttcggagtggaagaacagtggaagagactgcagcctaaagacttttaaaattaacttggcatcacttttatcagctcaaaggctaaacaaacaaacaaaagcagtgtcatttattctaagaaataacttcttaaaggttaaagctgaaaaatattcaagttatttttggataacaacttacagaggccaaatgacataggatgaaggctgttcgtaacctgctgatttatatattttccacctatctcctggttatgtttggatttaatgctgcccaagacttctggtgttcaactttggtgaagggagtcatttatggatcgtattctgtaagtgaaatgtttcctaaaaactttacaaactgcacttggacgctggaaaatccagatccaaccaaatatagcatttacctgaaattttccaaaaaggaccttagctgctctaacttttcactcctggcttatcagtttgatcatttttcccatgaaaaaataaaggatcttttaagaaagaatcattctataatgcaactctgcaattccaagaatgctttcgtttttctacagtatgataaaaattttattcaaatacgtcgagtatttccaactaatttcccaggattacagaaaaaaggggaagaagatcagaaatctttttttgagtttttggtattgaacaaggtcagcccaagccagtttggttgccatgtattatgtacttggttggagagctgcttaaaatcagaaaatgggagaacagaatcatgtgggatcatgtatacaaaatgcacctgccctcagcatttgggagagtgggggatcgacgaccagtcgctgattttgttaaataacgtggtgttacccctgaatgagcagacagagggctgcctgacccaggagctgcaaaccacccaagtctgcaatcttaccagggaggccaagcgaccacccaaagaagaatttggaatgatgggagatcatacaattaaaagtcagcgacctcgatctgttcatgaaaaaagggtccctcaggaacaagctgatgctgctaaatttatggcacaaactggtgaatctggtgtggaagagtggtcccagtggagcacatgttcggttacttgtggtcaagggtcgcaggtgcgaaccagaacttgtgtatcaccttacgggacacactgcagcggcccattaagagaatcaagggtttgcaataacactgccctctgtccagtacacggagtatgggaggaatggtcaccatggagtttatgttcatttacatgtggtcgaggccaaagaacaagaacaaggtcatgcacacctcctcagtatggaggaaggccgtgtgaaggacctgaaacacatcataagccttgtaatattgctctttgcccagttgatggacagtggcaagagtggagttcgtggagccagtgctcagtaacgtgctcgaatgggactcagcagagaagccggcagtgcactgcagctgcccatggaggctccgaatgcagagggccatgggcagaaagcagagagtgctataaccctgaatgtacagccaatggtcaatggaatcagtggggtcattggagtggttgttccaagtcctgtgatggcggctgggaaaggcgaataaggacctgtcagggtgcagtgataacagggcagcaatgtgaaggaacgggcgaagaagtgagaagatgcaatgagcagcgatgccctgcaccttatgaaatatgccctgaggattatctgatgtcgatggtgtggaaaagaactccagcaggcgacttggcattcaatcaatgtcccctgaatgccacaggcaccactagcagacgctgctctctcagtcttcatggagtggccttctgggaacagccgagctttgcaagatgcatatcaaatgagtacagacacttgcagcattcaattaaagagcaccttgctaaggggcagcgaatgctggcaggtgatggaatgtcccaggtgaccaagacactgttggatttaactcagagaaaaaatttctatgcaggcgatcttctgatgtctgtggagatcctgagaaatgtgacagacacatttaaaagggcaagttacatccctgcatctgatggtgtccagaacttctttcaaatagttagcaaccttctagatgaagaaaacaaggaaaaatgggaagatgcacaacagatttatccagggtcaatagagttaatgcaggtgattgaagattttatacacattgttggaatggggatgatggactttcagaattcatacttaatgactggaaatgtagtggctagtattcagaagcttcctgcagcctctgttctaacagacatcaactttccaatgaaaggacggaagggaatggttgactgggcaagaaactcagaagatagggtagtaattccaaaaagcattttcactccggtgtcatcaaaagaattagatgaatcatctgtatttgttcttggcgcagtcctatacaaaaacttagatctaattttgcccactttgagaaattatactgtcattaattccaaaatcatcgtggtcacaataaggcctgaacccaaaacaaccgattcgtttctggagatagaactagctcatttggctaatggtactttgaatccctattgtgtattgtgggatgactccaaaacgaacgagtctttgggaacgtggtccacccagggatgtaaaactgtgcttaccgatgcatcccatacgaaatgcttatgtgatcgtctctctaccttcgccattttggctcagcaacctagagaaataatcatggaatcctctggcacaccttcagttaccctaatagtaggcagtggtctttcttgcttggccttgattaccctagcagttgtctatgcagcattatggaggtacatacgctctgagagatccataatactaattaacttctgcctgtctatcatctcatccaatatcctcatactggttggacagactcagacacataataagagtatctgcacaaccaccactgcatttttgcactttttcttcctggcttcattctgttgggttttgactgaggcgtggcaatcatatatggctgtaactggaaaaattaggacacggcttataagaaaacgctttttgtgccttggatggggtttaccagcattagtagtggccacatcagtaggcttcaccagaacaaaaggatatggcactgatcactactgctggctctctcttgaaggaggactactctatgcttttgtgggacctgcagccgctgttgtcctggtcaacatggtgattggcattttggtatttaataaacttgtttccagagatggaatcctagataaaaagctcaaacacagagccggtcagatgagtgagcctcatagcggtttgacgctcaaatgtgccaagtgtggagtagtttcaacaacagctttgtcagccaccaccgccagtaacgccatggcgtctctttggagctcctgtgtggtgttgccccttctggctttgacgtggatgtctgcggttctggccatgacagataaacgctccatattgtttcaaatactttttgctgtgtttgattcattgcaaggctttgttatagtcatggtccactgcattcttcggagagaggttcaggatgcatttagatgccgattgagaaactgtcaggatcccatcaatgcagattcttcgagttcgtttcctaatgggcatgctcaaatcatgacagactttgaaaaggatgtagacattgcctgtcgatcagttcttcataaggatattggtccttgccgagcagccacaataacaggaacactttctaggatttctctaaatgatgatgaagaagaaaagggaacaaaccctgaagggctaagctattcaacattgcctggaaatgtcatttccaaagtcatcatccagcaacccacaggtttgcacatgcccatgagtatgaatgagcttagcaatccatgtttgaaaaaagaaaatagtgaattgcggagaactgtgtacttatgtacggatgataatttgagaggggctgacatggacatagtccatcctcaagaaagaatgatggaaagtgactatattgtgatgcccagaagttctgtaaataaccagccttcaatgaaagaagaaagcaaaatgaatattggcatggaaaccttgccgcatgaaaggctattgcactacaaagtaaaccctgaattcaatatgaatccccctgtaatggaccagttcaatatgaacttagagcaacatctcgcaccccaggaacatatgcagaatttgccctttgaacctcgcacagctgtgaagaatttcatggcctctgagttggatgataatgcaggactatcaagaagtgaaactggatcaacgatatcaatgagttctttagagagaagaaaatcacgatattcagaccttgactttgagaaggtcatgcatacaaggaagaggcatatggaactatttcaagaactaaatcagaaatttcaaactttggacagatttcgggatataccaaatacaagcagtatggaaaaccccgcaccaaacaagaatccatgggacactttcaaaaaccccagtgaatacccgcattacaccacaatcaatgtcttagacacagaggcaaaggatgctttggaactgaggccagcagagtgggagaagtgtctgaatttgcctctggatgtgcaagagggtgactttcaaacagaagtttaaaaaaatcaaaatggactaaggtagagacaaaactttattgcactgacacttaagacttgggaagcctgacatttctatctggacagtgtgactatcttatgtcaggaccttcatgtgccaaacgtcagtggtgttttcatatggtaacttctcactagtcaggctagtggagagatgaccaggtgtacagttctgaccatcctgtgttgtaagtacccgtggaatggatttgtaaggtaatctttatagataaacctcaagcaacgattcatgttgtaaccgcttcatatggtttagttttcaaaaaacttcaccatgaagcacaatgtatatatttatgcagtttttaaagtttataacagtctgtttggccattactacactttttactttataatataaaagcaaagtttttgtcattaaatgaatgtttgttgagctacattcttcattgctttaaatgcaataaagtaataatctcacttttatatgaataatatatttcacatctttattattgcagttttctctagaaagctctgagaagctttctctgctgcagctgtgtataaaatatttaaaatgttgtatggtgtaaataaacttttgtctacatatca

SEQ ID NO: 3666 - DNA, 1882 bp, Homo sapiens
  source 1..1882: mol_type = unassigned DNA
gtacatagatgaataagtattctcttgattaagtggtatcttgtcaggaaactatgaagagtgactcttcctaagtccatacttaataggtcaacatggtgattggcattttggtatttaataaacttgtttccagagatggaatcctagataaaaagctcaaacacagagccggtcagatgagtgagcctcatagcggtttgacgctcaaatgtgccaagtgtggagtagtttcaacaacagctttgtcagccaccaccgccagtaacgccatggcgtctctttggagctcctgtgtggtgttgccccttctggctttgacgtggatgtctgcggttctggccatgacagataaacgctccatattgtttcaaatactttttgctgtgtttgattcattgcaaggctttgttatagtcatggtccactgcattcttcggagagaggttcaggatgcatttagatgccgattgagaaactgtcaggatcccatcaatgcagattcttcgagttcgtttcctaatgggcatgctcaaatcatgacagactttgaaaaggatgtagacattgcctgtcgatcagttcttcataaggatattggtccttgccgagcagccacaataacaggaacactttctaggatttctctaaatgatgatgaagaagaaaagggaacaaaccctgaagggctaagctattcaacattgcctggaaatgtcatttccaaagtcatcatccagcaacccacaggtttgcacatgcccatgagtatgaatgagcttagcaatccatgtttgaaaaaagaaaatagtgaattgcggagaactgtgtacttatgtacggatgataatttgagaggggctgacatggacatagtccatcctcaagaaagaatgatggaaagtgactatattgtgatgcccagaagttctgtaaataaccagccttcaatgaaagaagaaagcaaaatgaatattggcatggaaaccttgccgcatgaaaggctattgcactacaaagtaaaccctgaattcaatatgaatccccctgtaatggaccagttcaatatgaacttagagcaacatctcgcaccccaggaacatatgcagaatttgccctttgaacctcgcacagctgtgaagaatttcatggcctctgagttggatgataatgcaggactatcaagaagtgaaactggatcaacgatatcaatgagttctttagagagaagaaaatcacgatattcagaccttgactttgagaaggtcatgcatacaaggaagaggcatatggaactatttcaagaactaaatcagaaatttcaaactttggacagatttcgggatataccaaatacaagcagtatggaaaaccccgcaccaaacaagaatccatgggacactttcaaaaaccccagtgaatacccgcattacaccacaatcaatgtcttagacacagaggcaaaggatgctttggaactgaggccagcagagtgggagaagtgtctgaatttgcctctggatgtgcaagagggtgactttcaaacagaagtttaaaaaaatcaaaatggactaaggtagagacaaaactttattgcactgacacttaagacttgggaagcctgacatttctatctggacagtgtgactatcttatgtcaggaccttcatgtgccaaacgtcagtggtgttttcatatggtaacttctcactagtcaggctagtggagagatgaccaggtgtacagttctgaccatcctgtgttgtaagtacccgtggaatggatttgtaaggtaatctttatagataaacctcaagcaacgattcatgttgtaaccgcttcatatggtttagttttcaaaaaacttcaccatgaagcacaa

SEQ ID NO: 3667 - DNA, 4319 bp, Homo sapiens
  source 1..4319: mol_type = unassigned DNA
acgtgtactcgccgccgcctcgggcactgccccaggtcttgctgcagccgggaccgcgctctgcagccgcagacccggtccacacggccaggggctacgacccttgggatctgccctccgctcagctcgagcttccctcgtggccgacggaacaatgaaggctaaagacctaatagtcacaccagctaccattttaaaggaaaaaccagaccccaataatctggtttttggaactgtgttcacggatcatatgctgacggtggagtggtcctcagagtttggatgggagaaacctcatatcaagcctcttcagaacctgtcattgcaccctggctcatcagctttgcactatgcagtggaagtatttgacaaagaagagctcttagagtgtattcaacagcttgtgaaattggatcaagaatgggtcccatattcaacatctgctagtctgtatattcgtcctacattcattggaactgagccttctcttggagtcaagaagcctaccaaagccctgctctttgtactcttgagcccagtgggaccttatttttcaagtggaacctttaatccagtgtccctgtgggccaatcccaagtatgtaagagcctggaaaggtggaactggggactgcaagatgggagggaattacggctcatctctttttgcccaatgtgaagcagtagataatgggtgtcagcaggtcctgtggctctatggagaggaccatcagatcactgaagtgggaactatgaatctttttctttactggataaatgaagatggagaagaagaactggcaactcctccactagatggcatcattcttccaggagtgacaaggcggtgcattctggacctggcacatcagtggggtgaatttaaggtgtcagagagatacctcaccatggatgacttgacaacagccctggaggggaacagagtgagagagatgtttggctctggtacagcctgtgttgtttgcccagtttctgatatactgtacaaaggcgagacaatacacattccaactatggagaatggtcctaagctggcaagccgcatcttgagcaaattaactgatatccagtatggaagagaagagagcgactggacaattgtgctatcctgaatggaaaatagaggatacaatggaaaatagaggataccaactgtatgctactgggacagactgttgcatttgaattgtgatagatttctttggctacctgtgcataatgtagtttgtagtatcaatgtgttacaagagtgattgtttcttcatgccagagaaaatgaattgcaatcatcaaatggtgtttcataacttggtagtagtaacttaccttaccttacctagaaaaacattaatgtaagccatataacatgggattttcctcaatgattttagtgcctccttttgtacttcactcagatactaaatagtagtttattctttaatataagttacattctgctcctcaaacaaatgcaattttttgtgtgtgtttgaaagctaatttgagaaaatttcataggttacatttcctgcagcctatctttatccacagaaagtgttttcttttttttaaatcaagacttttaaaactggatttcctcccatcactgttttttgaaggtcctccaagtccgtgttaaggtaaatatctgttttcttcctgatgtcacagcctgagcatactctgtgcattaggaagacctgagtgcatttcccaccattgtcctttccacattatgttgtagctggctggctgtcaggcgactacaagactgagggtcttgtgccttatagatctttgtatcccccatggctgacatatagtaggtactcagtaaatggttttataatgaatcagtgaacattttgcttctatagaagtgtaccttctttgtttctatattatgaaacctctttattagaatttgtgattgattctgacagtgtatagatttaccttatattgtctttattttccatgagctactaagtcattagagatactctgaagcatagttagtttaggaaatcacttcatattgattgtattagaattatcttggaattgaagatatatccctagagcaggggaccccaacccccaggccatgggccacacagcaggaagaggtgagtggtgggccattgaggagcttcatctgtatttatggctacttcccatcactcgaattaccacctgaactccacctcttgtcagctcagtggcagcattagattctcataggagcacaaatcctattgtgaactctgcatgcaagggatctaggctatgcgctccttatgagaatctaatgcttgatgacctgaggtgtaacagtttcatcctgaaaccacccttcaccctgcagtctgtggaaaaattgtcttccacaaaactggtccctggtgccaaaaatgttggggaccactgctctagagagaggtcatgatatcataccaaccaaatggaaatgacaaatgttttatgtcaagtgttaattgcagaaataaatcttttttttttttttttggtagaaaacaaagaggcatactctgatttttatactctgtttttgcaggtgctcttttctttgaatggagatttgatgagcaagtggttaggatgcagggagagctactatgggtgatattttccttgtttaggagctgtgagttaaaattgtatcctttgtggtttatctaaggaaagtcaaatcttgacagaaaacatttttccttggaaggtcaactctcagacattgtattttggtttccctcagtcctcataacttccttcttgctgaacatattttattctcttttcagagaaggaaaataaaaaggattctaaaagtttgatgcattggaaaaatttccttgaggcatttagcaacacatagaaaatgggctttgattcttttccaaaacttttagccatagggtcttttatagacagggatagtaaaatgaaaattgagaaatataagatgaaaaggaatgataaaaatatcttttagggggcttttaattggtgatctgaaatcttgggagaagctgttcttttcaggcctgaggtgctcttgactgtcgcctgcgcactgtgtaccccgagcaacattctaagggtgtgctttcgccttggctaactcctttgacctcattcttcatatagtagtctaggaaaaagttgcaggtaatttaaactgtctagtggtacatagtaactaaatttctattcctatgagaaatgagaattatttatttgccatcaacacattttatactttgcatctccaaatttattgtggcgagacttgtccattgtgaaagttagagaacattatgtttgtatcatttctttcataaaacctcaagagcatttttaagcccttttcatcagacccagtgaaaactaaggatagatgtttaaaaactggaggtctcctgataaggagaacacaatccaccattgtcatttaagtaataagacaggaaattgaccttgacgctttcttgttaaatagatttaacaggaacatctgcacatcttttttccttgtgcactatttgtttaattgcagtggattaatacagcaagagtgccacattataactaggcaattatccattcttcaagacttagttattgtcacactaattgatcgtttaaggcataagatggtctagcattaggaacatgtgaagctaatctgctcaaaaagatcaacaaattaatattgttgctgatatttgcataattggctgcaattatttaatgtttaattgggttgatcaaatgagattcagcaattcacaagtgcattaatataaacagaactggtggcacttaaaatgataatgattaacttatattgcatgttctcttcctttcacttttttcagtttctacatttcagaccgagcttgtcagcttttttgaaaacacatcagtagaaaccaagattttaaaatgaagtgtcaagacaaaggcaaaacctgagcagttcctaaaaagatttgctgttagaaattttctttgtggcagtcatttattaaggattcaactcgtgatacaccaaaagaagagttgacttcagagatgtgttccatgctctctagcacaggaatgaataaatttataacacctgctttagcctttgttttcaaaagcacaaaggaaaagtgaaagggaaagagaaacaagtgactgagaagtcttgttaaggaatcaggttttttctacctggtaaacattctctattcttttctcaaaagattgctgtaagaaaaaatgtaagac

SEQ ID NO: 3668 - DNA, 4694 bp, Homo sapiens
  source 1..4694: mol_type = unassigned DNA
tgattgacaagaccacgaggctgagcgcgccctggagatttttctataaatggcttaacaccccagtctagactatttgctcggatataagggagacaattgtttttttgttctttgccggcgaaccctggctctgtagggctgacctggaatttaaccagtcttccctgagccggcggaggaggacaaaaaccgccgcgaccccggcagggtgggaagtgcagggcagcgctcccaagacacgcttgttggaggttcgggcctgggtgcttggttgtctgagcctccttttttgtgtttgcctgggtcctggagaggagcgcacggtatcatggattgcagtaacggatgctccgcagagtgtaccggagaaggaggatcaaaagaggtggtggggacttttaaggctaaagacctaatagtcacaccagctaccattttaaaggaaaaaccagaccccaataatctggtttttggaactgtgttcacggatcatatgctgacggtggagtggtcctcagagtttggatgggagaaacctcatatcaagcctcttcagaacctgtcattgcaccctggctcatcagctttgcactatgcagtggaattatttgaaggattgaaggcatttcgaggagtagataataaaattcgactgtttcagccaaacctcaacatggatagaatgtatcgctctgctgtgagggcaactctgccggtatttgacaaagaagagctcttagagtgtattcaacagcttgtgaaattggatcaagaatgggtcccatattcaacatctgctagtctgtatattcgtcctacattcattggaactgagccttctcttggagtcaagaagcctaccaaagccctgctctttgtactcttgagcccagtgggaccttatttttcaagtggaacctttaatccagtgtccctgtgggccaatcccaagtatgtaagagcctggaaaggtggaactggggactgcaagatgggagggaattacggctcatctctttttgcccaatgtgaagcagtagataatgggtgtcagcaggtcctgtggctctatggagaggaccatcagatcactgaagtgggaactatgaatctttttctttactggataaatgaagatggagaagaagaactggcaactcctccactagatggcatcattcttccaggagtgacaaggcggtgcattctggacctggcacatcagtggggtgaatttaaggtgtcagagagatacctcaccatggatgacttgacaacagccctggaggggaacagagtgagagagatgtttggctctggtacagcctgtgttgtttgcccagtttctgatatactgtacaaaggcgagacaatacacattccaactatggagaatggtcctaagctggcaagccgcatcttgagcaaattaactgatatccagtatggaagagaagagagcgactggacaattgtgctatcctgaatggaaaatagaggatacaatggaaaatagaggataccaactgtatgctactgggacagactgttgcatttgaattgtgatagatttctttggctacctgtgcataatgtagtttgtagtatcaatgtgttacaagagtgattgtttcttcatgccagagaaaatgaattgcaatcatcaaatggtgtttcataacttggtagtagtaacttaccttaccttacctagaaaaacattaatgtaagccatataacatgggattttcctcaatgattttagtgcctccttttgtacttcactcagatactaaatagtagtttattctttaatataagttacattctgctcctcaaacaaatgcaattttttgtgtgtgtttgaaagctaatttgagaaaatttcataggttacatttcctgcagcctatctttatccacagaaagtgttttcttttttttaaatcaagacttttaaaactggatttcctcccatcactgttttttgaaggtcctccaagtccgtgttaaggtaaatatctgttttcttcctgatgtcacagcctgagcatactctgtgcattaggaagacctgagtgcatttcccaccattgtcctttccacattatgttgtagctggctggctgtcaggcgactacaagactgagggtcttgtgccttatagatctttgtatcccccatggctgacatatagtaggtactcagtaaatggttttataatgaatcagtgaacattttgcttctatagaagtgtaccttctttgtttctatattatgaaacctctttattagaatttgtgattgattctgacagtgtatagatttaccttatattgtctttattttccatgagctactaagtcattagagatactctgaagcatagttagtttaggaaatcacttcatattgattgtattagaattatcttggaattgaagatatatccctagagcaggggaccccaacccccaggccatgggccacacagcaggaagaggtgagtggtgggccattgaggagcttcatctgtatttatggctacttcccatcactcgaattaccacctgaactccacctcttgtcagctcagtggcagcattagattctcataggagcacaaatcctattgtgaactctgcatgcaagggatctaggctatgcgctccttatgagaatctaatgcttgatgacctgaggtgtaacagtttcatcctgaaaccacccttcaccctgcagtctgtggaaaaattgtcttccacaaaactggtccctggtgccaaaaatgttggggaccactgctctagagagaggtcatgatatcataccaaccaaatggaaatgacaaatgttttatgtcaagtgttaattgcagaaataaatcttttttttttttttttggtagaaaacaaagaggcatactctgatttttatactctgtttttgcaggtgctcttttctttgaatggagatttgatgagcaagtggttaggatgcagggagagctactatgggtgatattttccttgtttaggagctgtgagttaaaattgtatcctttgtggtttatctaaggaaagtcaaatcttgacagaaaacatttttccttggaaggtcaactctcagacattgtattttggtttccctcagtcctcataacttccttcttgctgaacatattttattctcttttcagagaaggaaaataaaaaggattctaaaagtttgatgcattggaaaaatttccttgaggcatttagcaacacatagaaaatgggctttgattcttttccaaaacttttagccatagggtcttttatagacagggatagtaaaatgaaaattgagaaatataagatgaaaaggaatgataaaaatatcttttagggggcttttaattggtgatctgaaatcttgggagaagctgttcttttcaggcctgaggtgctcttgactgtcgcctgcgcactgtgtaccccgagcaacattctaagggtgtgctttcgccttggctaactcctttgacctcattcttcatatagtagtctaggaaaaagttgcaggtaatttaaactgtctagtggtacatagtaactaaatttctattcctatgagaaatgagaattatttatttgccatcaacacattttatactttgcatctccaaatttattgtggcgagacttgtccattgtgaaagttagagaacattatgtttgtatcatttctttcataaaacctcaagagcatttttaagcccttttcatcagacccagtgaaaactaaggatagatgtttaaaaactggaggtctcctgataaggagaacacaatccaccattgtcatttaagtaataagacaggaaattgaccttgacgctttcttgttaaatagatttaacaggaacatctgcacatcttttttccttgtgcactatttgtttaattgcagtggattaatacagcaagagtgccacattataactaggcaattatccattcttcaagacttagttattgtcacactaattgatcgtttaaggcataagatggtctagcattaggaacatgtgaagctaatctgctcaaaaagatcaacaaattaatattgttgctgatatttgcataattggctgcaattatttaatgtttaattgggttgatcaaatgagattcagcaattcacaagtgcattaatataaacagaactggtggcacttaaaatgataatgattaacttatattgcatgttctcttcctttcacttttttcagtttctacatttcagaccgagcttgtcagcttttttgaaaacacatcagtagaaaccaagattttaaaatgaagtgtcaagacaaaggcaaaacctgagcagttcctaaaaagatttgctgttagaaattttctttgtggcagtcatttattaaggattcaactcgtgatacaccaaaagaagagttgacttcagagatgtgttccatgctctctagcacaggaatgaataaatttataacacctgctttagcctttgttttcaaaagcacaaaggaaaagtgaaagggaaagagaaacaagtgactgagaagtcttgttaaggaatcaggttttttctacctggtaaacattctctattcttttctcaaaagattgctgtaagaaaaaatgtaagacaaaaaaaaaaaaaaaaaa

SEQ ID NO: 3669 - DNA, 1811 bp, Homo sapiens
  source 1..1811: mol_type = unassigned DNA
gcttggccacaccgcctgctttcgcttccagccgcgcgctccgtgccactgccgctctctgcagccccgcgtccccgcagcctccccatggccagcccgcttcgctccgctgcggcccttgcccgccaggattgcagtaacggatgctccgcagagtgtaccggagaaggaggatcaaaagaggtggtggggacttttaaggctaaagacctaatagtcacaccagctaccattttaaaggaaaaaccagaccccaataatctggtttttggaactgtgttcacggatcatatgctgacggtggagtggtcctcagagtttggatgggagaaacctcatatcaagcctcttcagaacctgtcattgcaccctggctcatcagctttgcactatgcagtggaattatttgaaggattgaaggcatttcgaggagtagataataaaattcgactgtttcagccaaacctcaacatggatagaatgtatcgctctgctgtgagggcaactctgccggtatttgacaaagaagagctcttagagtgtattcaacagcttgtgaaattggatcaagaatgggtcccatattcaacatctgctagtctgtatattcgtcctacattcattggaactgagccttctcttggagtcaagaagcctaccaaagccctgctctttgtactcttgagcccagtgggaccttatttttcaagtggaacctttaatccagtgtccctgtgggccaatcccaagtatgtaagagcctggaaaggtggaactggggactgcaagatgggagggaattacggctcatctctttttgcccaatgtgaagcagtagataatgggtgtcagcaggtcctgtggctctatggagaggaccatcagatcactgaagtgggaactatgaatctttttctttactggataaatgaagatggagaagaagaactggcaactcctccactagatggcatcattcttccaggagtgacaaggcggtgcattctggacctggcacatcagtggggtgaatttaaggtgtcagagagatacctcaccatggatgacttgacaacagccctggaggggaacagagtgagagagatgtttggctctggtacagcctgtgttgtttgcccagtttctgatatactgtacaaaggcgagacaatacacattccaactatggagaatggtcctaagctggcaagccgcatcttgagcaaattaactgatatccagtatggaagagaagagagcgactggacaattgtgctatcctgaatggaaaatagaggatacaatggaaaatagaggataccaactgtatgctactgggacagactgttgcatttgaattgtgatagatttctttggctacctgtgcataatgtagtttgtagtatcaatgtgttacaagagtgattgtttcttcatgccagagaaaatgaattgcaatcatcaaatggtgtttcataacttggtagtagtaacttaccttaccttacctagaaaaacattaatgtaagccatataacatgggattttcctcaatgattttagtgcctccttttgtacttcactcagatactaaatagtagtttattctttaatataagttacattctgctcctcaaacaaatgcaattttttgtgtgtgtttgaaagctaatttgagaaaatttcataggttacatttcctgcagcctatctttatccacagaaagtgttttcttttttttaaatcaagacttttaaaactggatttcctcccatcactgttttttgaaggtcctccaagtccgtgttaa

SEQ ID NO: 3670 - DNA, 1360 bp, Homo sapiens
  source 1..1360: mol_type = unassigned DNA
gcagccgggaccgcgctctgcagccgcagacccggtccacacggccaggggctacgacccttgggatctgccctccgctcagctcgagcttccctcgtggccgacggaacaatgaaggattgcagtaacggatgctccgcagagtgtaccggagaaggaggatcaaaagaggtggtggggacttttaaggctaaagacctaatagtcacaccagctaccattttaaaggaaaaaccagaccccaataatctggtttttggaactgtgttcacggatcatatgctgacggtggagtggtcctcagagtttggatgggagaaacctcatatcaagcctcttcagaacctgtcattgcaccctggctcatcagctttgcactatgcagtggaagtatttgacaaagaagagctcttagagtgtattcaacagcttgtgaaattggatcaagaatgggtcccatattcaacatctgctagtctgtatattcgtcctacattcattggaactgagccttctcttggagtcaagaagcctaccaaagccctgctctttgtactcttgagcccagtgggaccttatttttcaagtggaacctttaatccagtgtccctgtgggccaatcccaagtatgtaagagcctggaaaggtggaactggggactgcaagatgggagggaattacggctcatctctttttgcccaatgtgaagcagtagataatgggtgtcagcaggtcctgtggctctatggagaggaccatcagatcactgaagtgggaactatgaatctttttctttactggataaatgaagatggagaagaagaactggcaactcctccactagatggcatcattcttccaggagtgacaaggcggtgcattctggacctggcacatcagtggggtgaatttaaggtgtcagagagatacctcaccatggatgacttgacaacagccctggaggggaacagagtgagagagatgtttggctctggtacagcctgtgttgtttgcccagtttctgatatactgtacaaaggcgagacaatacacattccaactatggagaatggtcctaagctggcaagccgcatcttgagcaaattaactgatatccagtatggaagagaagagagcgactggacaattgtgctatcctgaatggaaaatagaggatacaatggaaaatagaggataccaactgtatgctactgggacagactgttgcatttgaattgtgatagatttctttggctacctgtgcataatgtagtttgtagtatcaatgtgttacaagagtgattgtttcttcatgccagagaaaatgaattgcaatcatcaaatggtgtttcataacttg

SEQ ID NO: 3671 - DNA, 8335 bp, Homo sapiens
  source 1..8335: mol_type = unassigned DNA
agtagggaggtgggcaggagccagtgatgacggaatggcaatcacatttgacctctgatctgtttatttcctcctccttgacgtctccatataaatgttacacgggcatccccacactcggatacgcacccacagtggctgattcgggggtaaccgtgtcatttgcttgcaacactggcacctctgccctgcaccccgggagtgagcagtgagtgaggctcgggtctgggcgctggctccgaatcttcgggctgggagagactccaccatctgggggcggcctgggggagcagccttagtgtcttcctgctgatgcaatccgctaggtcgcgagtctccgccgcgagagggccggtctgcaatccagcccgccacgtgtactcgccgccgcctcgggcactgccccaggtcttgctgcagccgggaccgcgctctgcagccgcagacccggtccacacggccaggggctacgacccttgggatctgccctccgctcagctcgagcttccctcgtggccgacggaacaatgaaggattgcagtaacggatgctccgcagagtgtaccggagaaggaggatcaaaagaggtggtggggacttttaaggctaaagacctaatagtcacaccagctaccattttaaaggaaaaaccagaccccaataatctggtttttggaactgtgttcacggatcatatgctgacggtggagtggtcctcagagtttggatgggagaaacctcatatcaagcctcttcagaacctgtcattgcaccctggctcatcagctttgcactatgcagtggaattatttgaaggattgaaggcatttcgaggagtagataataaaattcgactgtttcagccaaacctcaacatggatagaatgtatcgctctgctgtgagggcaactctgccggtatttgacaaagaagagctcttagagtgtattcaacagcttgtgaaattggatcaagaatgggtcccatattcaacatctgctagtctgtatattcgtcctacattcattggaactgagccttctcttggagtcaagaagcctaccaaagccctgctctttgtactcttgagcccagtgggaccttatttttcaagtggaacctttaatccagtgtccctgtgggccaatcccaagtatgtaagagcctggaaaggtggaactggggactgcaagatgggagggaattacggctcatctctttttgcccaatgtgaagcagtagataatgggtgtcagcaggtcctgtggctctatggagaggaccatcagatcactgaagtgggaactatgaatctttttctttactggataaatgaagatggagaagaagaactggcaactcctccactagatggcatcattcttccaggagtgacaaggcggtgcattctggacctggcacatcagtggggtgaatttaaggtgtcagagagatacctcaccatggatgacttgacaacagccctggaggggaacagagtgagagagatgtttggctctggtacagcctgtgttgtttgcccagtttctgatatactgtacaaaggcgagacaatacacattccaactatggagaatggtcctaagctggcaagccgcatcttgagcaaattaactgatatccagtatggaagagaagagagcgactggacaattgtgctatcctgaatggaaaatagaggatacaatggaaaatagaggataccaactgtatgctactgggacagactgttgcatttgaattgtgatagatttctttggctacctgtgcataatgtagtttgtagtatcaatgtgttacaagagtgattgtttcttcatgccagagaaaatgaattgcaatcatcaaatggtgtttcataacttggtagtagtaacttaccttaccttacctagaaaaacattaatgtaagccatataacatgggattttcctcaatgattttagtgcctccttttgtacttcactcagatactaaatagtagtttattctttaatataagttacattctgctcctcaaacaaatgcaattttttgtgtgtgtttgaaagctaatttgagaaaatttcataggttacatttcctgcagcctatctttatccacagaaagtgttttcttttttttaaatcaagacttttaaaactggatttcctcccatcactgttttttgaaggtcctccaagtccgtgttaaggtaaatatctgttttcttcctgatgtcacagcctgagcatactctgtgcattaggaagacctgagtgcatttcccaccattgtcctttccacattatgttgtagctggctggctgtcaggcgactacaagactgagggtcttgtgccttatagatctttgtatcccccatggctgacatatagtaggtactcagtaaatggttttataatgaatcagtgaacattttgcttctatagaagtgtaccttctttgtttctatattatgaaacctctttattagaatttgtgattgattctgacagtgtatagatttaccttatattgtctttattttccatgagctactaagtcattagagatactctgaagcatagttagtttaggaaatcacttcatattgattgtattagaattatcttggaattgaagatatatccctagagcaggggaccccaacccccaggccatgggccacacagcaggaagaggtgagtggtgggccattgaggagcttcatctgtatttatggctacttcccatcactcgaattaccacctgaactccacctcttgtcagctcagtggcagcattagattctcataggagcacaaatcctattgtgaactctgcatgcaagggatctaggctatgcgctccttatgagaatctaatgcttgatgacctgaggtgtaacagtttcatcctgaaaccacccttcaccctgcagtctgtggaaaaattgtcttccacaaaactggtccctggtgccaaaaatgttggggaccactgctctagagagaggtcatgatatcataccaaccaaatggaaatgacaaatgttttatgtcaagtgttaattgcagaaataaatcttttttttttttttttggtagaaaacaaagaggcatactctgatttttatactctgtttttgcaggtgctcttttctttgaatggagatttgatgagcaagtggttaggatgcagggagagctactatgggtgatattttccttgtttaggagctgtgagttaaaattgtatcctttgtggtttatctaaggaaagtcaaatcttgacagaaaacatttttccttggaaggtcaactctcagacattgtattttggtttccctcagtcctcataacttccttcttgctgaacatattttattctcttttcagagaaggaaaataaaaaggattctaaaagtttgatgcattggaaaaatttccttgaggcatttagcaacacatagaaaatgggctttgattcttttccaaaacttttagccatagggtcttttatagacagggatagtaaaatgaaaattgagaaatataagatgaaaaggaatgataaaaatatcttttagggggcttttaattggtgatctgaaatcttgggagaagctgttcttttcaggcctgaggtgctcttgactgtcgcctgcgcactgtgtaccccgagcaacattctaagggtgtgctttcgccttggctaactcctttgacctcattcttcatatagtagtctaggaaaaagttgcaggtaatttaaactgtctagtggtacatagtaactaaatttctattcctatgagaaatgagaattatttatttgccatcaacacattttatactttgcatctccaaatttattgtggcgagacttgtccattgtgaaagttagagaacattatgtttgtatcatttctttcataaaacctcaagagcatttttaagcccttttcatcagacccagtgaaaactaaggatagatgtttaaaaactggaggtctcctgataaggagaacacaatccaccattgtcatttaagtaataagacaggaaattgaccttgacgctttcttgttaaatagatttaacaggaacatctgcacatcttttttccttgtgcactatttgtttaattgcagtggattaatacagcaagagtgccacattataactaggcaattatccattcttcaagacttagttattgtcacactaattgatcgtttaaggcataagatggtctagcattaggaacatgtgaagctaatctgctcaaaaagatcaacaaattaatattgttgctgatatttgcataattggctgcaattatttaatgtttaattgggttgatcaaatgagattcagcaattcacaagtgcattaatataaacagaactggtggcacttaaaatgataatgattaacttatattgcatgttctcttcctttcacttttttcagtttctacatttcagaccgagcttgtcagcttttttgaaaacacatcagtagaaaccaagattttaaaatgaagtgtcaagacaaaggcaaaacctgagcagttcctaaaaagatttgctgttagaaattttctttgtggcagtcatttattaaggattcaactcgtgatacaccaaaagaagagttgacttcagagatgtgttccatgctctctagcacaggaatgaataaatttataacacctgctttagcctttgttttcaaaagcacaaaggaaaagtgaaagggaaagagaaacaagtgactgagaagtcttgttaaggaatcaggttttttctacctggtaaacattctctattcttttctcaaaagattgctgtaagaaaaaatgtaagacaaaaaaaaaaaaaaaaaacaaacagaggcagaggcaggcagtagcaagaaagcagagcgtaacatcagctagatggtaacatgcaatgtcagctctcttgaagacatgggaaacctaagttacaccttgggttaaaattcttcaccatattagttttgttgcttcataaaatttacctaagcaagtggtcttgcttgcctcaaatccaagcagtcttgaacacttggaggcaattaatgagtatatcttagtcaaaagaattgttggagctttttattaaagctacagtttcagttctgcttttggggaattgtgctatgaaagcagctgccaaaataagctcatttattttcttcaatcccactcagtgctcagtcactatattctgtttcctttttttttttcaagttgcatatttggtttccccttatgattgggaaagatgaattttcagcagaaaacattgtttgttcactttcaaagagtgatagtttctaaaacatttagagcaataaatattcatcagaggtaccaagtaagccggcagaagagttaagggttagagaaatcccttatttcatgtcttgactctaaaattatcaaagtacttttccttgtaatgtggatttcttcttatgcggatatgcaaaaacttcagttatacgtagtaatgctagcaggtaattttagtagacattttataacaactgtcactttgtttcgccacatgtagagtttgttcagctattttccagatatctccccacaaaaggaggcaaagggtaccagcttttcaatgagcattacctattacttggcaaagatgatgaagactctattaatagttcatttgataaatgttgacataaccaacaatagagattaggaagttagttttaagaaatcaatggcatatagacattaccctcatggagtttgtattctactacttgaactgattgtagctataaaagcatagttagatagctgaatagttagatcataagcaaagaaggccagaacacatctcttatcaagaaatcaatgaatagtttatctcatttttaaagcaactttatccttctttaattccttcctttcttctagtgcaaaactacttaataaggttggtgtttaggttagtgttcacaccattcctcatctggtgtgaattaccttctctttctttactatttactaccaacctagtacatgtgttgactgaattcttttcaaacaatgttgagttatcatggtgcacctaataaattaacaccacagattacagcatccttgctgattttctcagcaaagccagattagatggaaataaacaaagaaaatgatcctagagtgaatttttctagaaaatatctattatgaaccatgctgtttaaagtattagcttgaaggtgatggatccagctattcagaaaataactttcatataaccatgattttgcacagtatgaggtcttaaatgtgtggaaagagataaattttttatcattaccacaaaccccttttaaagattcaaaggtggaagaaagtgatttattttttctcttcagcatacatatataaaagacttgtcagatgtttaatttggggaggttgataatgaaacatatcaacagagtatagtagttatagtagtgtttgtgggtaaataatttcctggggtcagacatatataaacatatttgcttcaaaatgataaaggcatgaaatcagtcttaaaaattgaaatgggggtgatgggggagaaaaagaagaacaaatttgaagtgccctttcaaatctgctggatacaagtattgaagttttaagtcatcttattctgtctgaaagtgtatttttcattctacaatagacccaatcaacaagacgtataacttgagttgcatgatgttcagtttatgtaatctactgttgggatggtaagaattgatgtaggctgtggtgtaagaatgaattaaaatatagtttcactggcttttctctacatatccactatcacaatggctaggtttcctgttgctcactattggattctggagaaaaatttaatgaaagatgatatcagaggaagaataagtggaggtagagaagaaaggaatgatagaggaggggaaaaaaacaaaacatatttttgtgttatccaaaggagctttttccttattctgtcaagcattgagatcttcttcagctttcaatgtagttgctaaatacaaataatgctactaggtagtgactaaatatagcaaacacttcatcagatattagaattaggtcacactattgaggttataatctgaaggttgtgttacatagaaaccactttagattattatcaacttggactaggctttattttataatagcatagtaagtaatatctattgtgtcatttcttcaaccattttattctaagatccatgaagcttcttgaggccaaataaaataataagtttagacaagaagtagattgtgacttttttcccttagagatactatttactatctcctatcctgataggtggaaggtttactgaattggaaattggttgactattagtttttaactaaaatgtgcaataacacattgcagtttcctcaaactagtttcctatgatcattaaactcattctcagggttaagaaaggaatgtaaatttctgcctcaatttgtacttcatcaataagtttttgaagagtgcagatttttagtcaggtcttaaaaataaactcacaaatctggatgcatttctaaattctgcaaatgtttcctggggtgacttaacaaggaataatcccacaatatacctagctacctaatacatggagctggggctcaacccactgtttttaaggatttgcgcttacttgtggctgaggaaaaataagtagttcgaggaagtagtttttaaatgtgagcttatagatagaaacagaatatcaacttaattatgaaattgttagaacctgttctcttgtatctgaatctgattgcaattactattgtactgatagactccagccattgcaagtctcagatatcttagctgtgtagtgattcttgaaattctttttaagaaaaattgagtagaaagaaataaaccctttgtaaatgaggcttggcttttgtgaaagatcatccgcaggctatgttaaaaggattttagctcactaaaagtgtaataatggaaatgtggaaaatatcgtaggtaaaggaaactacctcatgctctgaaggttttgtagaagcacaattaaacatctaaaatggctttgttacaccagagccatctggtgtgaagaactctatatttgtatgttgagagggcatggaataattgtattttgctggcaatagacacattctttattatttgcagattcctcatcaaatctgtaattatgcacagtttctgttatcaataaaacaaaagaatcctgtt

SEQ ID NO: 3672 - DNA, 1596 bp, Homo sapiens
  source 1..1596: mol_type = unassigned DNA
aacgtctctcttcggagccgcgccccgggcgggcacagttacgcgccgcacggatcatggccgcagccgctctggggcagatctgggcacgaaagcttctctctgtcccttggcttctgtgtggtcccagaagatatgcctcctccagtttcaaggctgcagacctgcagctggaaatgacacagaagcctcataagaagcctggccccggcgagcccctggtgtttgggaagacatttaccgaccacatgctgatggtggaatggaatgacaagggctggggccagccccgaatccagcccttccagaacctcacgctgcacccagcctcctccagcctccactactccctgcagctgtttgagggcatgaaggcgttcaaaggcaaagaccagcaggtgcgcctcttccgcccctggctcaacatggaccggatgctgcgctcagccatgcgcctgtgcctgccgagtttcgacaagctggagttgctggagtgcatccgccggctcatcgaagtggacaaggactgggtccccgatgccgccggcaccagcctctatgtgcggcctgtgctcattgggaacgagccctcgctgggtgtcagccagcccacgcgcgcgctcctgttcgtcattctctgcccagtgggtgcctacttccctggaggctccgtgaccccggtctccctcctggccgacccagccttcatccgggcctgggtgggcggggtcggcaactacaagttaggtgggaattatgggcccaccgtgttagtgcaacaggaggcactcaagcggggctgtgaacaggtcctctggctgtatgggcccgaccaccagctcaccgaggtgggaaccatgaacatctttgtctactggacccacgaagatggggtgctggagctggtgacgcccccgctgaatggtgttatcctgcctggagtggtcagacagagtctactggacatggctcagacctggggtgagttccgggtggtggagcgcacgatcaccatgaagcagttgctgcgggccctggaggagggccgcgtgcgggaagtctttggctcgggcaccgcttgccaggtctgcccagtgcaccgaatcctgtacaaagacaggaacctccacattcccaccatggaaaatgggcctgagctgatcctccgcttccagaaggagctgaaggagatccagtacggaatcagagcccacgagtggatgttcccggtgtgaagctgcaggctgtgctccagatccaccgacccgtagcatctcgtcacgccagcactcgcctccctaccaatgactcacctgaagtgcaatacgaaataaaaggccagcgggcggcgtctgggtctctggcgcccccatgtggttgcgacactcccaaagccgtaagggccgacccaggcatcttggcccccagcccctcgtcgcgggttcaggtccgcccattactccttgtcgtgcggtcaaggatacaccttggccccgattccggatctctccgttctcaggccagacccctggtgctgccgttgatttttttttctctgtctttgctgcaattttgaaataaaatgccaaagaacac

SEQ ID NO: 3673 - DNA, 2041 bp, Homo sapiens
  source 1..2041: mol_type = unassigned DNA
agttacgcgccgcacggatcatggccgcagccgctctggggcagaagcatggctgcaaggctgagcagtctagatgtcgccacccaaaggcaatctggggacccacgctctgatcaccccggaatccctggagcctcacaccagcaagaccacgctgcaggcccatctcccagcaactcacctagcgacaagtgaccacgcccattcacgtccatcttccagaatcagtgccaactcacccagctcacagggcaggccaggccaggccactctgtctctctcaacctcacgccccaacgcctccccacagggctggggaaagaggccttgtgaggtcaaaggtcaccagagagggcccagcctgctggacacagccagacctgctcttcctactcccctctgggaggacccgcctgagcctcatgcagtgaggactgcagtggctccccaggcccctgtagctgcccctcagccccaggggctgaagggaattggagtcactgccaaaatgggtttgtatttcagatctgggcacgaaagcttctctctgtcccttggcttctgtgtggtcccagaagatatgcctcctccagtttcaaggctgcagacctgcagctggaaatgacacagaagcctcataagaagcctggccccggcgagcccctggtgtttgggaagacatttaccgaccacatgctgatggtggaatggaatgacaagggctggggccagccccgaatccagcccttccagaacctcacgctgcacccagcctcctccagcctccactactccctgcagctgtttgagggcatgaaggcgttcaaaggcaaagaccagcaggtgcgcctcttccgcccctggctcaacatggaccggatgctgcgctcagccatgcgcctgtgcctgccgagtttcgacaagctggagttgctggagtgcatccgccggctcatcgaagtggacaaggactgggtccccgatgccgccggcaccagcctctatgtgcggcctgtgctcattgggaacgagccctcgctgggtgtcagccagcccacgcgcgcgctcctgttcgtcattctctgcccagtgggtgcctacttccctggaggctccgtgaccccggtctccctcctggccgacccagccttcatccgggcctgggtgggcggggtcggcaactacaagttaggtgggaattatgggcccaccgtgttagtgcaacaggaggcactcaagcggggctgtgaacaggtcctctggctgtatgggcccgaccaccagctcaccgaggtgggaaccatgaacatctttgtctactggacccacgaagatggggtgctggagctggtgacgcccccgctgaatggtgttatcctgcctggagtggtcagacagagtctactggacatggctcagacctggggtgagttccgggtggtggagcgcacgatcaccatgaagcagttgctgcgggccctggaggagggccgcgtgcgggaagtctttggctcgggcaccgcttgccaggtctgcccagtgcaccgaatcctgtacaaagacaggaacctccacattcccaccatggaaaatgggcctgagctgatcctccgcttccagaaggagctgaaggagatccagtacggaatcagagcccacgagtggatgttcccggtgtgaagctgcaggctgtgctccagatccaccgacccgtagcatctcgtcacgccagcactcgcctccctaccaatgactcacctgaagtgcaatacgaaataaaaggccagcgggcggcgtctgggtctctggcgcccccatgtggttgcgacactcccaaagccgtaagggccgacccaggcatcttggcccccagcccctcgtcgcgggttcaggtccgcccattactccttgtcgtgcggtcaaggatacaccttggccccgattccggatctctccgttctcaggccagacccctggtgctgccgttgatttttttttctctgtctttgctgcaattttgaaataaaatgccaaagaacac

SEQ ID NO: 3674 - DNA, 1320 bp, Homo sapiens
  source 1..1320: mol_type = unassigned DNA
aacgtctctcttcggagccgcgccccgggcgggcacagttacgcgccgcacggatcatggccgcagccgctctggggcagctgtttgagggcatgaaggcgttcaaaggcaaagaccagcaggtgcgcctcttccgcccctggctcaacatggaccggatgctgcgctcagccatgcgcctgtgcctgccgagtttcgacaagctggagttgctggagtgcatccgccggctcatcgaagtggacaaggactgggtccccgatgccgccggcaccagcctctatgtgcggcctgtgctcattgggaacgagccctcgctgggtgtcagccagcccacgcgcgcgctcctgttcgtcattctctgcccagtgggtgcctacttccctggaggctccgtgaccccggtctccctcctggccgacccagccttcatccgggcctgggtgggcggggtcggcaactacaagttaggtgggaattatgggcccaccgtgttagtgcaacaggaggcactcaagcggggctgtgaacaggtcctctggctgtatgggcccgaccaccagctcaccgaggtgggaaccatgaacatctttgtctactggacccacgaagatggggtgctggagctggtgacgcccccgctgaatggtgttatcctgcctggagtggtcagacagagtctactggacatggctcagacctggggtgagttccgggtggtggagcgcacgatcaccatgaagcagttgctgcgggccctggaggagggccgcgtgcgggaagtctttggctcgggcaccgcttgccaggtctgcccagtgcaccgaatcctgtacaaagacaggaacctccacattcccaccatggaaaatgggcctgagctgatcctccgcttccagaaggagctgaaggagatccagtacggaatcagagcccacgagtggatgttcccggtgtgaagctgcaggctgtgctccagatccaccgacccgtagcatctcgtcacgccagcactcgcctccctaccaatgactcacctgaagtgcaatacgaaataaaaggccagcgggcggcgtctgggtctctggcgcccccatgtggttgcgacactcccaaagccgtaagggccgacccaggcatcttggcccccagcccctcgtcgcgggttcaggtccgcccattactccttgtcgtgcggtcaaggatacaccttggccccgattccggatctctccgttctcaggccagacccctggtgctgccgttgatttttttttctctgtctttgctgcaattttgaaataaaatgccaaagaacac

SEQ ID NO: 3675 - DNA, 2103 bp, Homo sapiens
  source 1..2103: mol_type = unassigned DNA
accaacaatctggctccgcccagtcccacctcctaactctggcaacgccattggacatttgggaacagaaggcaggccttggcattgatccgctttactctgggcccccgggccctaaatccctgaggccctggtcaggttgccctcttctttgcctgttacaggagtaactacaatgaggcgattggagaaaattttgggtagatagatttttttttctccaaatctctgtgcattctatctaccacagaacgggaagaagatggttttcttgtcagatggtgctggagtttgcgtcaggcacataaagaggcagccccgaatctagcctacgtgagtgccggaccgctgagtggttgttagccaagatggcggtagcgatcgctgcagcgagggtctggcggctaaaccgtggtttgagccaggctgccctcctgctgctgcggcagcctggggctcggggactggctagatctcacccccccaggcagcagcagcagttttcatctctggatgacaagccccagttcccaggggcctcggcggagtttatagataagttggaattcatccagcccaacgtcatctctggaatccccatctaccgcgtcatggaccggcaaggccagatcatcaaccccagcgaggacccccacctgccgaaggagaaggtgctgaagctctacaagagcatgacactgcttaacaccatggaccgcatcctctatgagtctcagcggcagggccggatctccttctacatgaccaactatggtgaggagggcacgcacgtggggagtgccgccgccctggacaacacggacctggtgtttggccagtaccgggaggcaggtgtgctgatgtatcgggactaccccctggaactattcatggcccagtgctatggcaacatcagtgacttgggcaaggggcgccagatgcctgtccactacggctgcaaggaacgccacttcgtcactatctcctctccactggccacgcagatccctcaggcggtgggggcggcgtacgcagccaagcgggccaatgccaacagggtcgtcatctgttacttcggcgagggggcagccagtgagggggacgcccatgccggcttcaacttcgctgccacacttgagtgccccatcatcttcttctgccggaacaatggctacgccatctccacgcccacctctgagcagtatcgcggcgatggcattgcagcacgaggccccgggtatggcatcatgtcaatccgcgtggatggtaatgatgtgtttgccgtatacaacgccacaaaggaggcccgacggcgggctgtggcagagaaccagcccttcctcatcgaggccatgacctacaggatcgggcaccacagcaccagtgacgacagttcagcgtaccgctcggtggatgaggtcaattactgggataaacaggaccaccccatctcccggctgcggcactatctgctgagccaaggctggtgggatgaggagcaggagaaggcctggaggaagcagtcccgcaggaaggtgatggaggcctttgagcaggccgagcggaagcccaaacccaaccccaacctactcttctcagacgtgtatcaggagatgcccgcccagctccgcaagcagcaggagtctctggcccgccacctgcagacctacggggagcactacccactggatcacttcgataagtgagacctgctcagcccacccccacccatcctcagctaccccgagaggtagccccactctaaggggagcagggggacctgacagcacaccactgtcttccccagtcagctccctctaaaatactcagcggccagggcggctgccactcttcacccctgctcctcccggctgttacattgtcaggggacagcatctgcagcagttgctgaggctccgtcagccccctcttcacctgttgttacagtgccttctcccaggggctgggtgagggcacattcaggactagaagcccctctgggcatggggtggacatggcaggtcagcctgtggaacttgcgcaggtgcgagtggccagcagaggtcacgaataaactgcatctctgcgcctggctctctacca

SEQ ID NO: 3676 - DNA, 1213 bp, Homo sapiens
  source 1..1213: mol_type = unassigned DNA
gatggcggtagcgatcgctgcagcgagggtctggcggctaaaccgtggtttgagccaggctgccctcctgctgctgcggcagcctggggctcggggactggctagatctcacccccccaggcagcagcagcagttttcatctctggatgacaagccccagttcccaggggcctcggcggagtttatagataagttggaattcatccagcccaacgtcatctctggaatccccatctaccgcgtcatggaccggcaaggccagatcatcaaccccagcgaggacccccacctgccgaaggagaaggtgctgaagctctacaagagcatgacactgcttaacaccatggaccgcatcctctatgagtctcagcggcagggccggatctccttctacatgaccaactatggtgaggagggcacgcacgtggggagtgccgccgccctggacaacacggacctggtgtttggccagtaccgggaggcaggtgtgctgatgtatcgggactaccccctggaactattcatggcccagtgctatggcaacatcagtgacttgggcaaggggcgccagatgcctgtccactacggctgcaaggaacgccacttcgtcactatctcctctccactggccacgcagatccctcaggcggtgggggcggcgtacgcagccaagcgggccaatgccaacagggtcgtcatctgttacttcggcgagggggcagccagtgagggggacgcccatgccggcttcaacttcgctgccacacttgagtgccccatcatcttcttctgccggaacaatggctacgccatctccacgcccacctctgagcagtatcgcggcgatggcattgcagcacgaggccccgggtatggcatcatgtcaatccgcgtggatggtaatgatgtgtttgccgtatacacagccacagggggtcccaaggcacgtgcttcagttggtccctcatctccgtcaaccacaggcacttgtgggattatgatgccattgcatgccatgggcctctggcatcctgtttcccatcagcaagagctcagcgcggcgcccaagcccaaaggcacaaccaaaccaatcctggaatcctatcttaagagtcatctcctgggacactccaggtatcaactctatatccatcaggatgcagtcaggagagaaaaaccacagagtaacttgaacagggaaagtttaatatag

SEQ ID NO: 3677 - DNA, 3676 bp, Homo sapiens
  source 1..3676: mol_type = unassigned DNA
aggcggcgtgcggctgcatagcctgagaatcccggtggtgagcggggatggcggttgtagcggcggctgccggctggctactcaggctcagggcggcaggggctgaggggcactggcgtcggcttcctggcgcggggctggcgcggggctttttgcaccccgccgcgactgtcgaggatgcggcccagaggcggcaggtggctcattttactttccagccagatccggagccccgggagtacgggcaaactcagaaaatgaatcttttccagtctgtaacaagtgccttggataactcattggccaaagatcctactgcagtaatatttggtgaagatgttgcctttggtggagtctttagatgcactgttggcttgcgagacaaatatggaaaagatagagtttttaataccccattgtgtgaacaaggaattgttggatttggaatcggaattgcggtcactggagctactgccattgcggaaattcagtttgcagattatattttccctgcatttgatcagattgttaatgaagctgccaagtatcgctatcgctctggggatctttttaactgtggaagcctcactatccggtccccttggggctgtgttggtcatggggctctctatcattctcagagtcctgaagcattttttgcccattgcccaggaatcaaggtggttatacccagaagccctttccaggccaaaggacttcttttgtcatgcatagaggataaaaatccttgtatattttttgaacctaaaatactttacagggcagcagcggaagaagtccctatagaaccatacaacatcccactgtcccaggccgaagtcatacaggaagggagtgatgttactctagttgcctggggcactcaggttcatgtgatccgagaggtagcttccatggcaaaagaaaagcttggagtgtcttgtgaagtcattgatctgaggactataataccttgggatgtggacacaatttgtaagtctgtgatcaaaacagggcgactgctaatcagtcacgaggctcccttgacaggcggctttgcatcggaaatcagctctacagttcaggaggaatgtttcttgaacctagaggctcctatatcaagagtatgtggttatgacacaccatttcctcacatttttgaaccattctacatcccagacaaatggaagtgttatgatgcccttcgaaaaatgatcaactattgaccatataggtaggtatgcatcttgagaaagctactatgtgcccctgacattaacgtactgttaaccaagacacagcaatcatcagtgttttgatggtaacaaactttgatggtaaagttggtaaaaggcaactttcagaagaaaataatgtgctttagaaaaaaaattcaaatttatagtagtatatttacatttttgttgttgttgttgttctgagatggagtctcactctgtcgcccaggctagactgcagtggtgcaatctcagctcactgcaacctcccccctacccctgagttcaagcgattctcctgcctcagcctgctgagtagttgggattacaggcgcccaccaccatgcccagctaatttttgtgtttttattggaggtggggtgtcactatgttggctcagctgatttcaaattcctgacctcaagtgatccacctgccttagcctcccaaagtgctgggattacaggcatgagccactgcacctggctatatttacatttaatagaaacatatctagcatatgtatatgtgattttttttttttttttgagaccgagtctcactctgtcaccaggctggagtgcagtggtgcgatcttggctcatggcaacctctgcctcccaggttcaagcgattgtcctgcctcagtctcctgagtagctgggactacaggtgtgcaccaacatgcccagctaattttttatatttttagtagagacggggtttcaccatgttggccaggatggtctcgatctcttgaccttgtgttccacccgccttggcctcccaaagtgctggaattacaggcatgagccaccgcgcctggcctgtatatgtgatttctaaaaaatagatgcatgcatatgttaacattgaatagtcaatcactagatgaagatgctctctaccatggtttagattgcaagtgtactttataccattgtttcaacttcaacctttatttttgtatatattttttcagctacttaaactgttcatgaataggcgtactttctgtatttaaaaatggcccctcaagcaccgttaatttacattccagttatttacatgataattcatgacattctgaaacttgcctgtatattatctgaaaaatggatttcttgagcaaaagatctgtttattgtatgtaaggaaaaattttacctgaaaacaaacaaacaaaccctaaaactcagcaccactaccatttccagaagcttttttaacaagtgaatattttttacataatggataataaatggtatttattcatcatgattttctaagtaatgcttatcagccccttcagtggtgttattctaacaaaatgaatacattacaaattattaagttagcttttcagagttttaatatagaagttactagcactgacacactgattttgaaatgtttcaaaatgagtagatatgattagatcctttaccttttaatatctagtttttccaaaaatgatagtaatatcttttgaagaactatgctttttcaaaagcaaaatcaactctgtataatagcacattctctactttttaaagatcagaaatgctagaattcttgacttttgtgtatgggtagtaaatctagctcactgaaaatcagagtgaaacgcctttacatttgtgcggatagagaagttaactctccctcatatgtcactgtgctaccataatccctacattttctgtctgttctagtctaagaatattgttatagatggaagttaggaccattagcccacagatgcatgtattctctcagacataccggtgtagatgctatatttctgatgtcttcttaatgtctgtgaaagcaactggcatctacaataaatcacacttagagctggttagaggactccttcacttttgttgtccatgtggttcccttccgtggaccagccgtaataaagagccaaggtagtgatggtggccacgtgcctcgttgctatttttaaagtaatattcagatgtggttttaaatttagattatgtattccttttgaaacataagaaaaacatttaaacctatgctgaaaatacgataaaagaaaaacaactccaatatgctaaaagttaaatatggtatttaagaaaatagtcatgtatgcaattgagaaagtctataatttattttacagaaaagctggaagattatgactagatatggaaatattttttctgaatttttttttatatttcctccgacttacctctttttgaaaagagagtttttattaagtgaaccatcacgatattggctgaaaagttctacattctattattgtattgtaacacacatgtattgatgattttcattaagagtttcagattaactttgaaaaatattccacatggtaatcttataaattctgtttaattacatctgtaaatattatgtgtgtgatagtattcaataaa

SEQ ID NO: 3678 - DNA, 1514 bp, Homo sapiens
  source 1..1514: mol_type = unassigned DNA
aggcggcgtgcggctgcatagcctgagaatcccggtggtgagcggggatggcggttgtagcggcggctgccggctggctactcaggctcagggcggcaggggctgaggggcactggcgtcggcttcctggcgcggggctggcgcggggctttttgcaccccgccgcgactgtcgaggatgcggcccagaggcggcaggtggctcattttactttccagccagatccggagccccgggagtacgggcaaactcagaaaatgaatcttttccagtctgtaacaagtgccttggataactcattggccaaagatcctactgcagtaatatttggtgaagatgttgcctttggtggagtctttagatgcactgttggcttgcgagacaaatatggaaaagatagagtttttaataccccattgtgtgaacaaggaattgttggatttggaatcggaattgcggtcactggagctactgccattgcggaaattcagtttgcagattatattttccctgcatttgatcagattgttaatgaagctgccaagtatcgctatcgctctggggatctttttaactgtggaagcctcactatccggtccccttggggctgtgttggtcatggggctctctatcattctcagagtcctgaagcattttttgcccattgcccaggaatcaaggtggttatacccagaagccctttccaggccaaaggacttcttttgtcatgcatagaggataaaaatccttgtatattttttgaacctaaaatactttacagggcagcagcggaagaagtccctatagaaccatacaacatcccactgtcccaggccgaagtcatacaggaagggagtgatgttactctagttgcctggggcactcaggttcatgtgatccgagaggtagcttccatggcaaaagaaaagcttggagtgtcttgtgaagtcattgatctgaggactataataccttgggatgtggacacaatttgtaagtctgtgatcaaaacagggcgactgctaatcagtcacgaggctcccttgacaggcggctttgcatcggaaatcagctctacagttcaggaggaatgtttcttgaacctagaggctcctatatcaagagtatgtggttatgacacaccatttcctcacatttttgaaccattctacatcccagacaaatggaagtgttatgatgcccttcgaaaaatgatcaactattgaccatatagaaaagctggaagattatgactagatatggaaatattttttctgaatttttttttatatttcctccgacttacctctttttgaaaagagagtttttattaagtgaaccatcacgatattggctgaaaagttctacattctattattgtattgtaacacacatgtattgatgattttcattaagagtttcagattaactttgaaaaatattccacatggtaatcttataaattctgtttaattacatctgtaaatattatgtgtgtgatagtattcaataaa

SEQ ID NO: 3679 - DNA, 743 bp, Homo sapiens
  source 1..743: mol_type = unassigned DNA
aggcggcgtgcggctgcatagcctgagaatcccggtggtgagcggggatggcggttgtagcggcggctgccggctggctactcaggctcagggcggcaggggctgaggggcactggcgtcggcttcctggcgcggggctggcgcggggctttttgcaccccgccgcgactgtcgaggatgcggcccagaggcggcaggtggctcattttactttccagccagatccggagccccgggagtacgggcaaactcagaaaatgaatcttttccagtctgtaacaagtgccttggataactcattggccaaagatcctactgcagtaatatttggtgaagatgttgcctttggtggagtctttagatgcactgttggcttgcgagacaaatatggaaaagatagagtttttaataccccattgtgtgaacaaggaattgttggatttggaatcggaattgcggtcactggagctactgccattgcggaaattcagtttgcagattatattttccctgcatttgatcagattgttaatgaagctgccaagtatcgctatcgctctggggatctttttaactgtggaagcctcactatccggtccccttggggctgtgttggtcatggggctctctatcattctcagagtcctgaagcattttttgcccattgcccaggaatcaagatcaaagttataagcttatcttagttgagtagatgttgcctgatttttgaatgtgagctagaa

SEQ ID NO: 3680 - DNA, 1285 bp, Homo sapiens
  source 1..1285: mol_type = unassigned DNA
gagaatcccggtggtgagcggggatggcggttgtagcggcggctgccggctggctactcaggctcagggcggcaggggctgggctggcgcggggctttttgcaccccgccgcgactgtcgaggatgcggcccagaggcggcaggtggctcattttactttccagccagatccggagccccgggagtacgggcaaactcagaaaatgaatcttttccagtctgtaacaagtgccttggataactcattggccaaagatcctactgcagtaatatttggtgaagatgttgcctttggtggagtctttagatgcactgttggcttgcgagacaaatatggaaaagatagagtttttaataccccattgtgtgaacaaggaattgttggatttggaatcggaattgcggtcactggagctactgccattgcggaaattcagtttgcagattatattttccctgcatttgatcagattgttaatgaagctgccaagtatcgctatcgctctggggatctttttaactgtggaagcctcactatccggtccccttggggctgtgttggtcatggggctctctatcattctcagagtcctgaagcattttttgcccattgcccaggaatcaaggtggttatacccagaagccctttccaggccaaaggacttcttttgtcatgcatagaggataaaaatccttgtatattttttgaacctaaaatactttacagggcagcagcggaagaagtccctatagaaccatacaacatcccactgtcccaggccgaagtcatacaggaagggagtgatgttactctagttgcctggggcactcaggttcatgtgatccgagaggtagcttccatggcaaaagaaaagcttggagtgtcttgtgaagtcattgatctgaggactataataccttgggatgtggacacaatttgtaagtctgtgatcaaaacagggcgactgctaatcagtcacgaggctcccttgacaggcggctttgcatcggaaatcagctctacagttcaggaggaatgtttcttgaacctagaggctcctatatcaagagtatgtggttatgacacaccatttcctcacatttttgaaccattctacatcccagacaaatggaagtgttatgatgcccttcgaaaaatgatcaactattgaccatataggtaggtatgcatcttgagaaagctactatgtgcccctgacattaacgtactgttaaccaagacacagcaatcatcagtgttttgatggtaacaaactttgatggt

SEQ ID NO: 3681 - DNA, 3767 bp, Homo sapiens
  source 1..3767: mol_type = unassigned DNA
agcctgagaatcccggtggtgagcggggatggcggttgtagcggcggctgccggctggctactcaggctcagggcggcaggggctgaggggcactggcgtcggcttcctggcgcggggctggcgcggggctttttgcaccccgccgcgactgtcgaggatgcggcccagaggcggcaggtggctcattttactttccagccagatccggagccccgggagtacgggcaaactcagaaaatgaatcttttccagtctgtaacaagtgccttggataactcattggccaaagatcctactgcagtaatatttggtgaagatgttgcctttggtggagtctttagatgcactgttggcttgcgagacaaatatggaaaagatagagtttttaataccccattgtgtgaacaaggaattgttggatttggaatcggaattgcggtcactggagctactgccattgcggaaattcagtttgcagattatattttccctgcatttgatcagattgttaatgaagctgccaagtatcgctatcgctctggggatctttttaactgtggaagcctcactatccggtccccttggggctgtgttggtcatggggctctctatcattctcagagtcctgaagcattttttgcccattgcccaggaatcaagatcaaagttataagcttatcttagttgagtagatgttgcctgatttttgaatgtgagctagaagttgtagactgggaaagaagccatgtgcgaggtggttatacccagaagccctttccaggccaaaggacttcttttgtcatgcatagaggataaaaatccttgtatattttttgaacctaaaatactttacagggcagcagcggaagaagtccctatagaaccatacaacatcccactgtcccaggccgaagtcatacaggaagggagtgatgttactctagttgcctggggcactcaggttcatgtgatccgagaggtagcttccatggcaaaagaaaagcttggagtgtcttgtgaagtcattgatctgaggactataataccttgggatgtggacacaatttgtaagtctgtgatcaaaacagggcgactgctaatcagtcacgaggctcccttgacaggcggctttgcatcggaaatcagctctacagttcaggaggaatgtttcttgaacctagaggctcctatatcaagagtatgtggttatgacacaccatttcctcacatttttgaaccattctacatcccagacaaatggaagtgttatgatgcccttcgaaaaatgatcaactattgaccatataggtaggtatgcatcttgagaaagctactatgtgcccctgacattaacgtactgttaaccaagacacagcaatcatcagtgttttgatggtaacaaactttgatggtaaagttggtaaaaggcaactttcagaagaaaataatgtgctttagaaaaaaaattcaaatttatagtagtatatttacatttttgttgttgttgttgttctgagatggagtctcactctgtcgcccaggctagactgcagtggtgcaatctcagctcactgcaacctcccccctacccctgagttcaagcgattctcctgcctcagcctgctgagtagttgggattacaggcgcccaccaccatgcccagctaatttttgtgtttttattggaggtggggtgtcactatgttggctcagctgatttcaaattcctgacctcaagtgatccacctgccttagcctcccaaagtgctgggattacaggcatgagccactgcacctggctatatttacatttaatagaaacatatctagcatatgtatatgtgattttttttttttttttgagaccgagtctcactctgtcaccaggctggagtgcagtggtgcgatcttggctcatggcaacctctgcctcccaggttcaagcgattgtcctgcctcagtctcctgagtagctgggactacaggtgtgcaccaacatgcccagctaattttttatatttttagtagagacggggtttcaccatgttggccaggatggtctcgatctcttgaccttgtgttccacccgccttggcctcccaaagtgctggaattacaggcatgagccaccgcgcctggcctgtatatgtgatttctaaaaaatagatgcatgcatatgttaacattgaatagtcaatcactagatgaagatgctctctaccatggtttagattgcaagtgtactttataccattgtttcaacttcaacctttatttttgtatatattttttcagctacttaaactgttcatgaataggcgtactttctgtatttaaaaatggcccctcaagcaccgttaatttacattccagttatttacatgataattcatgacattctgaaacttgcctgtatattatctgaaaaatggatttcttgagcaaaagatctgtttattgtatgtaaggaaaaattttacctgaaaacaaacaaacaaaccctaaaactcagcaccactaccatttccagaagcttttttaacaagtgaatattttttacataatggataataaatggtatttattcatcatgattttctaagtaatgcttatcagccccttcagtggtgttattctaacaaaatgaatacattacaaattattaagttagcttttcagagttttaatatagaagttactagcactgacacactgattttgaaatgtttcaaaatgagtagatatgattagatcctttaccttttaatatctagtttttccaaaaatgatagtaatatcttttgaagaactatgctttttcaaaagcaaaatcaactctgtataatagcacattctctactttttaaagatcagaaatgctagaattcttgacttttgtgtatgggtagtaaatctagctcactgaaaatcagagtgaaacgcctttacatttgtgcggatagagaagttaactctccctcatatgtcactgtgctaccataatccctacattttctgtctgttctagtctaagaatattgttatagatggaagttaggaccattagcccacagatgcatgtattctctcagacataccggtgtagatgctatatttctgatgtcttcttaatgtctgtgaaagcaactggcatctacaataaatcacacttagagctggttagaggactccttcacttttgttgtccatgtggttcccttccgtggaccagccgtaataaagagccaaggtagtgatggtggccacgtgcctcgttgctatttttaaagtaatattcagatgtggttttaaatttagattatgtattccttttgaaacataagaaaaacatttaaacctatgctgaaaatacgataaaagaaaaacaactccaatatgctaaaagttaaatatggtatttaagaaaatagtcatgtatgcaattgagaaagtctataatttattttacagaaaagctggaagattatgactagatatggaaatattttttctgaatttttttttatatttcctccgacttacctctttttgaaaagagagtttttattaagtgaaccatcacgatattggctgaaaagttctacattctattattgtattgtaacacacatgtattgatgattttcattaagagtttcagattaactttgaaaaatattccacatggtaatcttataaattctgtttaattacatctgtaaatattatgtgtgtgatagtattcaataaagtaaaatcaaattgtc

SEQ ID NO: 3682 - DNA, 3179 bp, Homo sapiens
  source 1..3179: mol_type = unassigned DNA
agcgacggcggccgggaggcggaagtggaggttgttgtggctccgagggctgttcgaggagctgctgctgctgaggcggcggcaactgcattgaggtggtggcggcgctgccggccccgggccgctcggcctctcggctcgccttccagcctcgcctgagcccgccggggcccgcgccggccagcgcctgccctatgagtgtgtcactggttgttatccgattggagctcgcggaacactcgcctgtccccgccggcttcggcttcagcgccgcggccggggaaatgtctgatgaggagataaaaaagacgacactagcctcagctgtagcctgtttagaaggcaagtcaccaggagagaaagtagcgattatccatcagcatctcggccgtcgagaaatgacagatgtgatcattgagaccatgaagtccaacccagatgaactaaaaactacagtggaagaaaggaagtcttcagaagcctcccccactgcgcaaagaagtaaagatcacagtaaggaatgcataaacgctgccccagattctccgtccaaacagcttccagaccagatttcattcttcagtggaaatccatcagttgaaatagttcatggtattatgcacctatataagacaaataagatgacctccttaaaagaagatgtgcggcgcagtgccatgctgtgtattctcacagtccctgctgcaatgaccagtcatgaccttatgaagtttgttgccccatttaacgaagtaattgaacaaatgaaaattatcagagactctactcccaaccaatatatggtgctgataaagtttcgtgcacaggctgatgcggatagtttttatatgacatgcaatggccgccagttcaactcaatagaagatgacgtttgccagctagtgtatgtggaaagagctgaagtgctcaaatctgaagatggcgccagcctcccagtgatggacctgactgaactccccaagtgcacggtgtgtctggagcgcatggacgagtctgtgaatggcatcctcacaacgttatgtaaccacagcttccacagccagtgtctacagcgctgggacgataccacgtgtcctgtttgccggtactgtcaaacgcccgagccagtagaagaaaataagtgttttgagtgtggtgttcaggaaaatctttggatttgtttaatatgcggccacataggatgtggacggtatgtcagtcgacatgcttataagcactttgaggaaacgcagcacacgtatgccatgcagcttaccaaccatcgagtctgggactatgctggagataactatgttcatcgactggttgcaagtaaaacagatggaaaaatagtacagtatgaatgtgagggggatacttgccaggaagagaaaatagatgccttacagttagagtattcatatttactaacaagccagctggaatctcagcgaatctactgggaaaacaagatagttcggatagagaaggacacagcagaggaaattaacaacatgaagaccaagtttaaagaaacaattgagaagtgtgataatctagagcacaaactaaatgatctcctaaaagaaaagcagtctgtggaaagaaagtgcactcagctaaacacaaaagtggccaaactcaccaacgagctcaaagaggagcaggaaatgaacaagtgtttgcgagccaaccaagtcctcctgcagaacaagctaaaagaggaggagagggtgctgaaggagacctgtgaccaaaaagatctgcagatcaccgagatccaggagcagctgcgtgacgtcatgttctacctggagacacagcagaagatcaaccatctgcctgccgagacccggcaggaaatccaggagggacagatcaacatcgccatggcctcggcctcgagccctgcctcttcggggggcagtgggaagttgccctccaggaagggccgcagcaagaggggcaagtgaccttcagagcaacagacatccctgagactgttctccctgacactgtgagagtgtgctgggaccttcagctaaatgtgagggtgggccctaataagtacaagtgaggatcaagccacagttgtttggctctttcatttgctagtgtgtgatgtagtgaatgtaaagggtgctgactggagagctgatagaaaggcgctgcgttcgaaaaggtcttaagagttcactaacctcacattctaatgaccattttgccttcctgcttggtagaagccccaactctgctgtgcatttttccattgtatttatggagttggcgtatttgacattcagttctggggtaggtttaagatgttaagttatttcttgtaacctcaaaggtaaggttatctagcactaaagcaccaaacctctctgagggcataacagctgctttaaagagaggtttccattggctattaaggagttatgaaaactccctagcaatagtgtcatatcattatcatctcccccttcctctggggagtggaagaattgcttgaatgttatctgaaaagaggcctggtagtaaaccaggccctggctctttaccagcagtcatctcttcttgctctggggccagccaggaaaaacaaacaacccggggcacattgggtagactcagtgtaggaaaaatggtggcagctccactgtttatttttggtgacttcgtacatcattatgaaccgcaattaaggaggaggcttaatggctgttcccaaactcaaatctcagagtgggtatcctagcatctagcaagactgagtggggagatttctcatccgtgtgaaaatgtagagtgaggcctctgactagctaattgtgtattttgttgggtttagtattttctaaatgtttacaaaatattgggctgcatgttcaggttgcagctagagggagcttgggcagattttcaattacgctttcaagatataaccaaaagctgtttctaaatcctaaaattagaatttcaacagagccccctttagaacagtcatataacgcttgtgtgggccaacagaggggctgtgtactctctctggaaccataaatgtcaaataatttataacctgcagtaattgagcaaacttaaaataagacctgtgttggaatttagtttcttgaagaggtagagggataggttagtaagatgtattgttaaacaacagg

SEQ ID NO: 3683 - DNA, 1549 bp, Homo sapiens
  source 1..1549: mol_type = unassigned DNA
tttcattcttcagtggaaatccatcagttgaaatagttcatggtattatgcacctatataagacaaataagatgacctccttaaaagaagatgtgcggcgcagtgccatgctgtgtattctcacagtccctgctgcaatgaccagtcatgaccttatgaagtttgttgccccatttaacgaagtaattgaacaaatgaaaattatcagagactctactcccaaccaatatatggtgctgataaagtttcgtgcacagggcgccagcctcccagtgatggacctgactgaactccccaagtgcacggtgtgtctggagcgcatggacgagtctgtgaatggcatcctcacaacgttatgtaaccacagcttccacagccagtgtctacagcgctgggacgataccacgtgtcctgtttgccggtactgtcaaacgcccgagccagtagaagaaaataagtgttttgagtgtggtgttcaggaaaatctttggatttgtttaatatgcggccacataggatgtggacggtatgtcagtcgacatgcttataagcactttgaggaaacgcagcacacgtatgccatgcagcttaccaaccatcgagtctgggactatgctggagataactatgttcatcgactggttgcaagtaaaacagatggaaaaatagtacagtatgaatgtgagggggatacttgccaggaagagaaaatagatgccttacagttagagtattcatatttactaacaagccagctggaatctcagcgaatctactgggaaaacaagatagttcggatagagaaggacacagcagaggaaattaacaacatgaagaccaagtttaaagaaacaattgagaagtgtgataatctagagcacaaactaaatgatctcctaaaagaaaagcagtctgtggaaagaaagtgcactcagctaaacacaaaagtggccaaactcaccaacgagctcaaagaggagcaggaaatgaacaagtgtttgcgagccaaccaagtcctcctgcagaacaagctaaaagaggaggagagggtgctgaaggagacctgtgaccaaaaagatctgcagatcaccgagatccaggagcagctgcgtgacgtcatgttctacctggagacacagcagaagatcaaccatctgcctgccgagacccggcaggaaatccaggagggacagatcaacatcgccatggcctcggcctcgagccctgcctcttcggggggcagtgggaagttgccctccaggaagggccgcagcaagaggggcaagtgaccttcagagcaacagacatccctgagactgttctccctgacactgtgagagtgtgctgggaccttcagctaaatgtgagggtgggccctaataagtacaagtgaggatcaagccacagttgtttggctctttcatttgctagtgtgtgatgtagtgaatgtaaagggtgctgactggagagctgatagaaaggcgctgcgttcgaaaaggtcttaagagttcactaacctcacattctaatgaccattttgccttcctgc

SEQ ID NO: 3684 - DNA, 3434 bp, Homo sapiens
  source 1..3434: mol_type = unassigned DNA
cctggacatggcgctgaggggccgccccgcgggaagatgaataagggctggctggagctggagagcgacccaggcctcttcaccctgctcgtggaagatttcggtgtcaagggggtgcaagtggaggagatctacgaccttcagagcaaatgtcagggccctgtatatggatttatcttcctgttcaaatggatcgaagagcgccggtcccggcgaaaggtctctaccttggtggatgatacgtccgtgattgatgatgatattgtgaataacatgttctttgcccaccagctgatacccaactcttgtgcaactcatgccttgctgagcgtgctcctgaactgcagcagcgtggacctgggacccaccctgagtcgcatgaaggacttcaccaagggtttcagccctgagagcaaaggatatgcgattggcaatgccccggagttggccaaggcccataatagccatgccaggcccgagccacgccacctccctgagaagcagaatggccttagtgcagtgcggaccatggaggcgttccactttgtcagctatgtgcctatcacaggccggctctttgagctggatgggctgaaggtctaccccattgaccatgggccctggggggaggacgaggagtggacagacaaggcccggcgggtcatcatggagcgtatcggcctcgccactgcagggatcaagtatgaggccaggctgcatgtgctgaaggtgaaccgtcagacagtactagaggctctgcagcagctgataagagtaacacagccagagctgattcagacccacaagtctcaagagtcacagctgcctgaggagtccaagtcagccagcaacaagtccccgctggtgctggaagcaaacagggcccctgcagcctctgagggcaaccacacagatggtgcagaggaggcggctggttcatgcgcacaagccccatcccacagccctcccaacaaacccaagctagtggtgaagcctccaggcagcagcctcaatggggttcaccccaaccccactcccattgtccagcggctgccggcctttctagacaatcacaattatgccaagtcccccatgcaggaggaagaagacctggcggcaggtgtgggccgcagccgagttccagtccgcccaccccagcagtactcagatgatgaggatgactatgaggatgacgaggaggatgacgtgcagaacaccaactctgcccttaggtataaggggaagggaacagggaagccaggggcattgagcggttctgctgatgggcaactgtcagtgctgcagcccaacaccatcaacgtcttggctgagaagctcaaagagtcccagaaggacctctcaattcctctgtccatcaagactagcagcggggctgggagtccggctgtggcagtgcccacacactcgcagccctcacccacccccagcaatgagagtacagacacggcctctgagatcggcagtgctttcaactcgccactgcgctcgcctatccgctcagccaacccgacgcggccctccagccctgtcacctcccacatctccaaggtgctttttggagaggatgacagcctgctgcgtgttgactgcatacgctacaaccgtgctgtccgtgatctgggtcctgtcatcagcacaggcctgctgcacctggctgaggatggggtgctgagtcccctggcgctgacagagggtgggaagggttcctcgccctccatcagaccaatccaaggcagccaggggtccagcagcccagtggagaaggaggtcgtggaagccacggacagcagagagaagacggggatggtgaggcctggcgagcccttgagtggggagaaatactcacccaaggagctgctggcactgctgaagtgtgtggaggctgagattgcaaactatgaggcgtgcctcaaggaggaggtagagaagaggaagaagttcaagattgatgaccagagaaggacccacaactacgatgagttcatctgcacctttatctccatgctggctcaggaaggcatgctggccaacctagtggagcagaacatctccgtgcggcggcgccaaggggtcagcatcggccggctccacaagcagcggaagcctgaccggcggaaacgctctcgcccctacaaggccaagcgccagtgaggactgctggccctgactctgcagcccactcttgccgtgtggccctcaccagggtccttccctgccccacttccccttttcccagtattactgaatagtcccagctggagagtccaggccctgggaatgggaggaaccaggccacattccttccatcgtgccctgaggcctgacacggcagatcagccccatagtgctcaggaggcagcatctggagttggggcacagcgaggtactgcagcttcctccacagccggctgtggagcagcaggacctggcccttctgcctgggcagcagaatatatattttacctatcagagacatctatttttctgggctccaacccaacatgccaccatgttgacataagttcctacctgactatgctttctctcctaggagctgtcctggtgggcccaggtccttgtatcatgccacggtcccaactacagggtcctagctgggggcctgggtgggccctgggctctgggccctgctgctctagccccagccaccagcctgtccctgttgtaaggaagccaggtcttctctcttcattcctcttaggagagtgccaaactcagggacccagcactgggctgggttgggagtagggtgtcccagtggggttggggtgagcaggctgctgggatcccatggcctgagcagagcatgtgggaactgttcagtggcctgtgaactgtcttccttgttctagccaggctgttcaagactgctctccatagcaaggttctagggctcttcgccttcagtgttgtggccctagctatgggcctaaattgggctctaggtctctgtccctggcgcttgaggctcagaagagcctctgtccagcccctcagtattaccatgtctccctctcaggggtagcagagacagggttgcttataggaagctggcaccactcagctcttcctgctactccagtttcctcagcctctgcaaggcactcagggtgggggacagcaggatcaagacaacccgttggagcccctgtgttccagaggacctgatgccaaggggtaatgggcccagcagtgcctctggagcccaggccccaacacagccccatggcctctgccagatggctttgaaaaaggtgatccaagcaggcccctttatctgtacatagtgactgagtggggggtgctggcaagtgtggcagctgcctctgggctgagcacagcttgacccctctagcccctgtaaatactggatcaatgaatgaataaaactctcc

SEQ ID NO: 3685 - DNA, 3937 bp, Homo sapiens
  source 1..3937: mol_type = unassigned DNA
cgctccgcccctcccctcgcagcacccgggcctagtactgcccgtcccgcccctcctctcgagcctcagcgctcagcatcgcccggaccccctcttcccttcgcccgcctcgtcccgaccctccccttcgcccccgtcccgccccgcccctccccttcgcccccgtcccgtcccgccccgcccctccccttcgcccccgtccctccccttcgcccccgtccctccgcgcgtgcgcgttcgccttcgagcgcatgcccgcatctgctgtccgacaggcggaagacgagcccagaggcggagcagggccgtcgcgccttggtgacgtctgccgccggcgcgggcgggtgacgcgactgggcccgttgtctgtgtgtgggactgaggggccccgggggcggtgggggctcccggtgggggcagcggtggggagggagggcctggacatggcgctgaggggccgccccgcgggaagatgaataagggctggctggagctggagagcgacccaggcctcttcaccctgctcgtggaagatttcggtgtcaagggggtgcaagtggaggagatctacgaccttcagagcaaatgtcagggccctgtatatggatttatcttcctgttcaaatggatcgaagagcgccggtcccggcgaaaggtctctaccttggtggatgatacgtccgtgattgatgatgatattgtgaataacatgttctttgcccaccagctgatacccaactcttgtgcaactcatgccttgctgagcgtgctcctgaactgcagcagcgtggacctgggacccaccctgagtcgcatgaaggacttcaccaagggtttcagccctgagagcaaaggatatgcgattggcaatgccccggagttggccaaggcccataatagccatgccaggcccgagccacgccacctccctgagaagcagaatggccttagtgcagtgcggaccatggaggcgttccactttgtcagctatgtgcctatcacaggccggctctttgagctggatgggctgaaggtctaccccattgaccatgggccctggggggaggacgaggagtggacagacaaggcccggcgggtcatcatggagcgtatcggcctcgccactgcaggggagccctaccacgacatccgcttcaacctgatggcagtggtgcccgaccgcaggatcaagtatgaggccaggctgcatgtgctgaaggtgaaccgtcagacagtactagaggctctgcagcagctgataagagtaacacagccagagctgattcagacccacaagtctcaagagtcacagctgcctgaggagtccaagtcagccagcaacaagtccccgctggtgctggaagcaaacagggcccctgcagcctctgagggcaaccacacagatggtgcagaggaggcggctggttcatgcgcacaagccccatcccacagccctcccaacaaacccaagctagtggtgaagcctccaggcagcagcctcaatggggttcaccccaaccccactcccattgtccagcggctgccggcctttctagacaatcacaattatgccaagtcccccatgcaggaggaagaagacctggcggcaggtgtgggccgcagccgagttccagtccgcccaccccagcagtactcagatgatgaggatgactatgaggatgacgaggaggatgacgtgcagaacaccaactctgcccttaggtataaggggaagggaacagggaagccaggggcattgagcggttctgctgatgggcaactgtcagtgctgcagcccaacaccatcaacgtcttggctgagaagctcaaagagtcccagaaggacctctcaattcctctgtccatcaagactagcagcggggctgggagtccggctgtggcagtgcccacacactcgcagccctcacccacccccagcaatgagagtacagacacggcctctgagatcggcagtgctttcaactcgccactgcgctcgcctatccgctcagccaacccgacgcggccctccagccctgtcacctcccacatctccaaggtgctttttggagaggatgacagcctgctgcgtgttgactgcatacgctacaaccgtgctgtccgtgatctgggtcctgtcatcagcacaggcctgctgcacctggctgaggatggggtgctgagtcccctggcgctgacagagggtgggaagggttcctcgccctccatcagaccaatccaaggcagccaggggtccagcagcccagtggagaaggaggtcgtggaagccacggacagcagagagaagacggggatggtgaggcctggcgagcccttgagtggggagaaatactcacccaaggagctgctggcactgctgaagtgtgtggaggctgagattgcaaactatgaggcgtgcctcaaggaggaggtagagaagaggaagaagttcaagattgatgaccagagaaggacccacaactacgatgagttcatctgcacctttatctccatgctggctcaggaaggcatgctggccaacctagtggagcagaacatctccgtgcggcggcgccaaggggtcagcatcggccggctccacaagcagcggaagcctgaccggcggaaacgctctcgcccctacaaggccaagcgccagtgaggactgctggccctgactctgcagcccactcttgccgtgtggccctcaccagggtccttccctgccccacttccccttttcccagtattactgaatagtcccagctggagagtccaggccctgggaatgggaggaaccaggccacattccttccatcgtgccctgaggcctgacacggcagatcagccccatagtgctcaggaggcagcatctggagttggggcacagcgaggtactgcagcttcctccacagccggctgtggagcagcaggacctggcccttctgcctgggcagcagaatatatattttacctatcagagacatctatttttctgggctccaacccaacatgccaccatgttgacataagttcctacctgactatgctttctctcctaggagctgtcctggtgggcccaggtccttgtatcatgccacggtcccaactacagggtcctagctgggggcctgggtgggccctgggctctgggccctgctgctctagccccagccaccagcctgtccctgttgtaaggaagccaggtcttctctcttcattcctcttaggagagtgccaaactcagggacccagcactgggctgggttgggagtagggtgtcccagtggggttggggtgagcaggctgctgggatcccatggcctgagcagagcatgtgggaactgttcagtggcctgtgaactgtcttccttgttctagccaggctgttcaagactgctctccatagcaaggttctagggctcttcgccttcagtgttgtggccctagctatgggcctaaattgggctctaggtctctgtccctggcgcttgaggctcagaagagcctctgtccagcccctcagtattaccatgtctccctctcaggggtagcagagacagggttgcttataggaagctggcaccactcagctcttcctgctactccagtttcctcagcctctgcaaggcactcagggtgggggacagcaggatcaagacaacccgttggagcccctgtgttccagaggacctgatgccaaggggtaatgggcccagcagtgcctctggagcccaggccccaacacagccccatggcctctgccagatggctttgaaaaaggtgatccaagcaggcccctttatctgtacatagtgactgagtggggggtgctggcaagtgtggcagctgcctctgggctgagcacagcttgacccctctagcccctgtaaatactggatcaatgaatgaataaaactctcctaagaatctcctg

SEQ ID NO: 3686 - DNA, 1101 bp, Homo sapiens
  source 1..1101: mol_type = unassigned DNA
aggcctgggcggagcgcacagcgctgggcgctggggaggctgcgccgcagcacccggttggtcaggaccaagtgggcccgaggcggacgtgagaagggtcgggccaagatggcggtgcaggtggtgcaggcggtgcaggcggttcatctcgagtctgacgctttcctcgtttgtctcaaccacgctctgagcacagagaaggaggaagtaatggggctgtgcataggggagttgaacgatgatacaagtaggagtgactccaaatttgcatatactggaactgaaatgcgcacagttgctgaaaaggttgatgccgtcagaattgttcacattcattctgtcatcatcttacgacgttctgataagaggaaggaccgagtagaaatttctccagagcagctgtctgcagcttcaacagaggcagagaggttggctgaactgacaggccgccccatgagagttgtgggctggtatcattcccatcctcatataactgtttggccttcacatgttgatgttcgcacacaagccatgtaccagatgatggatcaaggctttgtaggacttattttttcctgtttcatagaagataagaacacaaagactggccgggtactctacacttgcttccaatccatacaggcccaaaagagttcagagtatgagagaatcgaaatcccaatccatattgtacctcatgtcactatcgggaaagtgtgccttgaatcagcagtagagctgcccaagatcctgtgccaggaggagcaggatgcgtataggaggatccacagccttacacatctggactcagtaaccaagatccataatggctcagtgtttaccaagaatctgtgcagtcagatgtcggcagtcagcgggcctctcctacagtggttggaggacagactggagcaaaaccaacagcatttgcaggaattacaacaagaaaaggaagagcttatgcaagaactttcttctctagaataaatcaggagacaaaatggggaaagatgaaaatatccagtgtaaagttacttaagctaaatcaatttcaaagaagaaaaacttggaggactcattttacctgacttcaagacttac

SEQ ID NO: 3687 - DNA, 2496 bp, Homo sapiens
  source 1..2496: mol_type = unassigned DNA
gagcgcacagcgctgggcgctggggaggctgcgccgcagcacccggttggtcaggaccaagtgggcccgaggcggacgtgagaagggtcgggccaagatggcggtgcaggtggtgcaggcggtgcaggcggttcatctcgagtctgacgctttcctcgtttgtctcaaccacgctctgagcacagagaaggaggaagtaatggggctgtgcataggggagttgaacgatgatacaaggagtgactccaaatttgcatatactggaactgaaatgcgcacagttgctgaaaaggttgatgccgtcagaattgttcacattcattctgtcatcatcttacgacgttctgataagaggaaggaccgagtagaaatttctccagagcagctgtctgcagcttcaacagaggcagagaggttggctgaactgacaggccgccccatgagagttgtgggctggtatcattcccatcctcatataactgtttggccttcacatgttgatgttcgcacacaagccatgtaccagatgatggatcaaggctttgtaggacttattttttcctgtttcatagaagataagaacacaaagactggccgggtactctacacttgcttccaatccatacaggcccaaaagagttcagagtatgagagaatcgaaatcccaatccatattgtacctcatgtcactatcgggaaagtgtgccttgaatcagcagtagagctgcccaagatcctgtgccaggaggagcaggatgcgtataggaggatccacagccttacacatctggactcagtaaccaagatccataatggctcagtgtttaccaagaatctgtgcagtcagatgtcggcagtcagcgggcctctcctacagtggttggaggacagactggagcaaaaccaacagcatttgcaggaattacaacaagaaaaggaagagcttatgcaagaactttcttctctagaataaatcaggagacaaaatggggaaagatgaaaatatccagtgtaaagttacttaagctaaatcaatttcaaagaagaaaaacttggaggactcattttacctgacttcaagacttactataaagctatagtaatcaagatagatggtattggcagaggaacagacacatacgtcaatggaacagatgagagaacccagaaataaacccatataaatatgctcagctgattttgaaaaagtgaaaaagcaattcaatggaggaagaatagcctttctgacaaattatgctagagcaattagacacccatggcgaggagaaaaaagaacctctacttaaacctcacatcttatataaaatttaactcaaaatgtataacggacttaaatgtgatacataaaactagataactttgaaaaaagccacaggagaaaaatcttcaggatcttgggctaggtgacaagttcttggactttgccccgaaagcacatccataaaagacaaaatctgatatattggacttcttcaaaatttaaaaacttgtgatttaagaagaggaaaagataagctacagattgagatgaatttgcaaaccatatatctgatcaatttggaatatataaagtgtactaaaaactcaactgaagtcaggcatggtagctcatgcttgtaatctcaccactttgggaggccaagatgggaggagtgcttgaggttaggcgttccagaccagcctgggcaacatagtgagactcttgtctctacaaaaagtttttttaaaaaattaactgggcaccatgacacacaccagtagtcccagctactagggaggcaggaggatcacttgagcccaggagtttgaggctgcggtgagctgtgatcacaccaccacactccaacctgtgtaacagagtgaggcctcatctcaaaaaaaaaaaaaggccacaaaactcaacaataaaaacaaacagtccaattagaaaatgggcaaaagacatgaatagatgtttcactgaagaggatctatagatggcaagtaagcatatgaaaagctgttaaactccataagtcatcagggaatgcaaattgaaaccacagcgaggctatgacttacttatctcaatggctaaagaaaaaatagtgaaaataccaaatactgatgaggatacaaactggatattttatacattgctgacaggaatgtaaaatggtacagccactctgggaaagagtttatgaatttcttatcaagttaaacataattttttaatcaagttaaacataagacccagcagttgtgctcctggacattcattccagagaaatgaaaacctatattgtacttgtactcaaatattcataggagctttatttgtaatagccccaaactggaaacaacccagatgtcctacaacaggtacatggttaaacaaaccatccataacttggaatactgctctggaatgaaaaggaactaactgttgatacaagaacttggttgtacctcaggggtattatggtgaacaaa

SEQ ID NO: 3688 - DNA, 2846 bp, Homo sapiens
  source 1..2846: mol_type = unassigned DNA
cggacgtgagaagggtcgggccaagatggcggtgcaggtggtgcaggcggtgcaggcggttcatctcgagtctgacgctttcctcgtttgtctcaaccacgctctgagcacagagaaggaggaagtaatggggctgtgcataggggagttgaacgatgatacaaggagtgactccaaatttgcatatactggaactgaaatgcgcacagttgctgaaaaggttgatgccgtcagaattgttcacattcattctgtcatcatcttacgacgttctgataagaggaaggaccgagtagaaatttctccagagcagctgtctgcagcttcaacagaggcagagaggttggctgaactgacaggccgccccatgagagttgtgggctggtatcattcccatcctcatataactgtttggccttcacatgttgatgttcgcacacaagccatgtaccagatgatggatcaaggctttgtaggacttattttttcctgtttcatagaagataagaacacaaagactggccgggtactctacacttgcttccaatccatacaggcccaaaagagttcagagtcccttcatggtccacgagacttctggagctccagccagcacatctccattgagggccagaaggaagaggaaaggtatgagagaatcgaaatcccaatccatattgtacctcatgtcactatcgggaaagtgtgccttgaatcagcagtagagctgcccaagatcctgtgccaggaggagcaggatgcgtataggaggatccacagccttacacatctggactcagtaaccaagatccataatggctcagtgtttaccaagaatctgtgcagtcagatgtcggcagtcagcgggcctctcctacagtggttggaggacagactggagcaaaaccaacagcatttgcaggaattacaacaagaaaaggaagagcttatgcaagaactttcttctctagaataaatcaggagacaaaatggggaaagatgaaaatatccagtgtaaagttacttaagctaaatcaatttcaaagaagaaaaacttggaggactcattttacctgacttcaagacttactataaagctatagtaatcaagatagatggtattggcagaggaacagacacatacgtcaatggaacagatgagagaacccagaaataaacccatataaatatgctcagctgattttgaaaaagtgaaaaagcaattcaatggaggaagaatagcctttctgacaaattatgctagagcaattagacacccatggcgaggagaaaaaagaacctctacttaaacctcacatcttatataaaatttaactcaaaatgtataacggacttaaatgtgatacataaaactagataactttgaaaaaagccacaggagaaaaatcttcaggatcttgggctaggtgacaagttcttggactttgccccgaaagcacatccataaaagacaaaatctgatatattggacttcttcaaaatttaaaaacttgtgatttaagaagaggaaaagataagctacagattgagatgaatttgcaaaccatatatctgatcaatttggaatatataaagtgtactaaaaactcaactgaagtcaggcatggtagctcatgcttgtaatctcaccactttgggaggccaagatgggaggagtgcttgaggttaggcgttccagaccagcctgggcaacatagtgagactcttgtctctacaaaaagtttttttaaaaaattaactgggcaccatgacacacaccagtagtcccagctactagggaggcaggaggatcacttgagcccaggagtttgaggctgcggtgagctgtgatcacaccaccacactccaacctgtgtaacagagtgaggcctcatctcaaaaaaaaaaaaaggccacaaaactcaacaataaaaacaaacagtccaattagaaaatgggcaaaagacatgaatagatgtttcactgaagaggatctatagatggcaagtaagcatatgaaaagctgttaaactccataagtcatcagggaatgcaaattgaaaccacagcgaggctatgacttacttatctcaatggctaaagaaaaaatagtgaaaataccaaatactgatgaggatacaaactggatattttatacattgctgacaggaatgtaaaatggtacagccactctgggaaagagtttatgaatttcttatcaagttaaacataattttttaatcaagttaaacataagacccagcagttgtgctcctggacattcattccagagaaatgaaaacctatattgtacttgtactcaaatattcataggagctttatttgtaatagccccaaactggaaacaacccagatgtcctacaacaggtacatggttaaacaaaccatccataacttggaatactgctctggaatgaaaaggaactaactgttgatacaagaacttggttgtacctcaggggtattatggtgaacaaaaaaaaaaccagtctcaaatggtcacatactgtatgatcgcatttatataacattcttgaggtgacaaaattattgaaatgaagaacagattaatggttgccagggatagggactggagggggtgtggggtatgtatgactataaagggatgacgcaaggagttcctttgtgctgatggaacagttctatatgattatgatgattacgatgttgattataacatttgattatgaggttaagcacatgagtctttacctgtgctgaagttgtatggacctacatacacacaaatgaatgcatgtaaaatctggtgatactgaataaagtctgtggtctagatagcagta

SEQ ID NO: 3689 - DNA, 954 bp, Homo sapiens
  source 1..954: mol_type = unassigned DNA
atggcggtgcaggtggtgcaggcggtgcaggcggttcatctcgagtctgacgctttcctcgtttgtctcaaccacgctctgagcacagagaaggaggaagtaatggggctgtgcataggggaggtgagtagtcccagtaggagtgactccaaatttgcatatactggaactgaaatgcgcacagttgctgaaaaggttgatgccgtcagaattgttcacattcattctgtcatcatcttacgacgttctgataagaggaaggaccgagtagaaatttctccagagcagctgtctgcagcttcaacagagacacacaggttggctgaactgacaggccgccccatgagagttgtgggctggtatcattcccatcctcatataactgtttggccttcacatgttgatgttcgcacacaagccatgtaccagatgatggatcaaggctttgtaggacttattttttcctgtttcatagaagataagaacacaaagactggccgggtactctacacttgcttccaatccatacaggcccaaaagagttcagagtcccttcatggtccacgagacttctggagctccagccagcacatctccattgagggccagaaggaagaggaaaggtatgagagaatcgaaatcccaatccatattgtacctcatgtcactatcgggaaagtgtgccttgaatcagcagtagagctgcccaagatcctgtgccaggaggagcaggatgcgtataggaggatccacagccttacacatctggactcagtaaccaagatccataatggctcagaagtgtttaccaagaatctgtgcagtcagatgtcggcagtcagcgggcctctcctacagtggttggaggacagactggagcaaaaccaacagcatttgcaggaattacaacaagaaaaggaagagcttatgcaagaactttcttctctagaataa

SEQ ID NO: 3690 - DNA, 747 bp, Homo sapiens
  source 1..747: mol_type = unassigned DNA
atggcggtgcaggtggtgcaggcggtgcaggcggttcatctcgagtctgacgctttcctcgtttgtctcaaccacgctctgagcacagagaaggaggaagtaatggggctgtgcataggggaggtgagtagtcccagtaggagtgactccaaatttgcatatactggaactgaaatgcgcacagttgctgaaaaggttgatgccgtcagaattgttcacattcattctgtcatcatcttacgacgttctgataagaggaaggaccgagtagaaatttctccagagcagctgtctgcagcttcaacagagacacacaggttggctgaactgacaggccgccccatgagagttgtgggctggtatcattcccatcctcatataactgtttggccttcacatgttgatgttcgcacacaagccatgtaccagatgatggatcaaggctttgtaggacttattttttcctgtttcatagaagataagaacacaaagactggccgggtactctacacttgcttccaatccatacaggcccaaaagagttcagaccttacacatctggactcagtaaccaagatccataatggctcagaagtgtttaccaagaatctgtgcagtcagatgtcggcagtcagcgggcctctcctacagtggttggaggacagactggagcaaaaccaacagcatttgcaggaattacaacaagaaaaggaagagcttatgcaagaactttcttctctagaataa

SEQ ID NO: 3691 - DNA, 2183 bp, Homo sapiens
  source 1..2183: mol_type = unassigned DNA
actgggtagaatacttggggtgccagggaggcattaatgcgagaggagtcaggtgctcagtttttattggagttgggagggcagccccacatcaggaagagaacctgtttctgcaggatggtccggggagaagggaggactccacccaggcttgtgtttgccctgctctgtgtattcagccagcaggctctgcacaaggaagcaaagtgcagggagccaggctccaccgacagccaggcactgggcagcacgcactggagacccaggaccctgtgcaggagcagctccgggtgacacgaggggactgaagatactcccacaggggctcagcaggagcaatgggtaaccaaatgagtgttccccaaagagttgaagaccaagagaatgaaccagaagcagagacttaccaggacaacgcgtctgctctgaacggggttccagtggtggtgtcgacccacacagttcagcacttagaggaagtcgacttgggaataagtgtcaagacggataatgtggccacttcttcccccgagacaacggagataagtgctgttgcggatgccaacggaaagaatcttgggaaagaggccaaacccgaggcaccagctgctaaatctcgttttttcttgatgctctctcggcctgtaccaggacgtaccggagaccaagccgcagattcatcccttggatcagtgaagcttgatgtcagctccaataaagctccagcgaacaaagacccaagtgagagctggacacttccggtggcagctggaccggggcaggacacagataaaaccccagggcacgccccggcccaagacaaggtcctctctgccgccagggatcccacgcttctcccacctgagacagggggagcaggaggagaagctccctccaagcccaaggactccagcttttttgacaaattcttcaagctggacaagggacaggaaaaggtgccaggtgacagccaacaggaagccaagagggcagagcatcaagacaaggtggatgaggttcctggcttatcagggcagtccgatgatgtccctgcagggaaggacatagttgacggcaaggaaaaagaaggacaagaacttggaactgcggattgctctgtccctggggacccagaaggactggagactgcaaaggacgattcccaggcagcagctatagcagagaataataattccatcatgagtttctttaaaactctggtttcacctaacaaagctgaaacaaaaaaggacccagaagacacggcatcgaaagcagaaagtgtctgtgatggacaagctggtcagaagacatccgagatccaggctagaggcaccaagaaaaagcacctggatagccccaggctaggactcgcctttagaaaattctttaggcataagggtgctgaaaagtcacccaccacttcagctgaccttaagtcagacaaagccaactttacatcccaggagacccaaggggctggcaagaattccaaaggatgcaacccatcggggcacacacagtccgtgacaacccctgaacctgcgaaggaaggcaccaaggagaaatcaggacccacctctctgcctctgggcaaactgttttggaaaaaggtggtgtgtgagtcaccagtagagattataaagtccaaggaagtagaatcagccttacaaacagtggacctcaacgaaggagatgctgcacctgaacccacagaagcgaaactcaaaagagaagaaagcaaaccaagaacctctctgatggcgtttctcagacaaatgacatcagactccacagaaaagactatcacaccgccagagcctgaaccaacaggagcaccacagaagggtaaagagggctcctcgaaggacaagaagtcagcagccgagatgaacaagcagaagagcaacaagcaggaagccaaagaaccagcccagtgcacagagcaggccacggtggacacgaactcactgcagaatggggacaagctccaaaagagacctgagaagcggcagcagtcccttgggggcttctttaaaggcctgggaccaaagcggatgttggatgctcaagtgcaaacagacccagtatccatcggaccagttggcaaatccaagtacacagggaagtgtgtcttctcccatgtcaagaagaagtggcctttccaggaatggagctattga

SEQ ID NO: 3692 - DNA, 3303 bp, Homo sapiens
  source 1..3303: mol_type = unassigned DNA
gtattcagccagcaggctctgcacaaggaagcaaagtgcagggagccaggctccaccgacagccaggcactgggcagcacgcactggagacccaggaccctgtgcaggagcagctccgggtgacacgaggggactgaagatactcccacaggggctcagcaggagcaatgggtaaccaaatgagtgttccccaaagagttgaagaccaagagaatgaaccagaagcagagacttaccaggacaacgcgtctgctctgaacggggttccagtggtggtgtcgacccacacagttcagcacttagaggaagtcgacttgggaataagtgtcaagacggataatgtggccacttcttcccccgagacaacggagataagtgctgttgcggatgccaacggaaagaatcttgggaaagaggccaaacccgaggcaccagctgctaaatctcgttttttcttgatgctctctcggcctgtaccaggacgtaccggagaccaagccgcagattcatcccttggatcagtgaagcttgatgtcagctccaataaagctccagcgaacaaagacccaagtgagagctggacacttccggtggcagctggaccggggcaggacacagataaaaccccagggcacgccccggcccaagacaaggtcctctctgccgccagggatcccacgcttctcccacctgagacagggggagcaggaggagaagctccctccaagcccaaggactccagcttttttgacaaattcttcaagctggacaagggacaggaaaaggtgccaggtgacagccaacaggaagccaagagggcagagcatcaagacaaggtggatgaggttcctggcttatcagggcagtccgatgatgtccctgcagggaaggacatagttgacggcaaggaaaaagaaggacaagaacttggaactgcggattgctctgtccctggggacccagaaggactggagactgcaaaggacgattcccaggcagcagctatagcagagaataataattccatcatgagtttctttaaaactctggtttcacctaacaaagctgaaacaaaaaaggacccagaagacacgggtgctgaaaagtcacccaccacttcagctgaccttaagtcagacaaagccaactttacatcccaggagacccaaggggctggcaagaattccaaaggatgcaacccatcggggcacacacagtccgtgacaacccctgaacctgcgaaggaaggcaccaaggagaaatcaggacccacctctctgcctctgggcaaactgttttggaaaaagtcagttaaagaggactcagtccccacaggtgcggaggagaatgtggtgtgtgagtcaccagtagagattataaagtccaaggaagtagaatcagccttacaaacagtggacctcaacgaaggagatgctgcacctgaacccacagaagcgaaactcaaaagagaagaaagcaaaccaagaacctctctgatggcgtttctcagacaaatgtcagtgaaaggggatggagggatcacccactcagaagaaataaatgggaaagactccagctgccaaacatcagactccacagaaaagactatcacaccgccagagcctgaaccaacaggagcaccacagaagggtaaagagggctcctcgaaggacaagaagtcagcagccgagatgaacaagcagaagagcaacaagcaggaagccaaagaaccagcccagtgcacagagcaggccacggtggacacgaactcactgcagaatggggacaagctccaaaagagacctgagaagcggcagcagtcccttgggggcttctttaaaggcctgggaccaaagcggatgttggatgctcaagtgcaaacagacccagtatccatcggaccagttggcaaatccaagtaaacaaatcagcacggttcccaccaggttctcctgccaccaagatgtgttctccttactccatctcctccccaaacacgctccatgtatatattcttctgatggccagcaaatgaaattctgcctagaaattaagcccgagctgttgtatattgaggtgtattatttacgtctctggtccagtcttttctggcaaataacagtaaagatggtttagcaggtcacctagttgggtcagaagagtcgatgatcaccaagcaggaaagggagggaatagaggaatgtgttcgggttaagtgatgaaaatggcagtggtggccgggcgtggtggctctcgcctgtaatctcagcactttgggaggccgaggcaggtggatcacctgaggtcaggagttcaagactagcctggccaacatcatgaaaccccgtctctactaaaaatacaaaaattagccaggcatggtggcacacacctgtagtcccagctactcgggagcccaacgcacgagaaccgcttgtacccaggaggtggaggttgcagtgagccgaagttgcaccattgcactccaccctgggcgacagagcaagattctatcaaaaaaaaaaaaaggcagtggcaagtaagttatagaagagaaatgctgctagaaggaattaagcgttgtagtaaatgcgtgcttatcctctaagcttgaagaagggagacgaaaatccatttgtttaaattcacatctcaaggagggagaacccgggctgtgttgggtggttgccaatttcctagaacggaatgtgtggggtatagaaaaaggaatgaataagcgttgtttttcaaatagggtccttgtaagttattgatgagagggaaaagattgactggggagggcttaaaatgatttgggaaaacaattgcttttgaggctcagtgacaacggcaaagattacaacttaaaaaaaaaaaataaataaaaaataaaggaagttgcacggttattttgcaacacaagggggcggcaaggtccccatttttatcctgtaatactgtatccctaacaaagatttggtctctgctatcttacattattaatgtttctcagatggctgaggggctcgcttcatctgttccgtctgacacttatctcaagtgtgtctgtcattcctaatgttctcaggatgtgctctgataaaaccctccccataacctcagttaataaaaatttacagaagacttctcaaatacctgagttgtttttaatacctgtacaaaggagtaaataggaccctgagtctattaaaatgtaattcaaagtagcatatgattgactgacagtcatgtaaactgtatctttctttttctgatttaataaaaaatacatttacttctaaa

SEQ ID NO: 3693 - DNA, 1160 bp, Homo sapiens
  source 1..1160: mol_type = unassigned DNA
gcaggagcagctccgggtgacacgaggggactgaagatactcccacaggggctcagcagtcgacttgggaataagtgtcaagacggataatgtggccacttcttcccccgagacaacggagataagtgctgttgcggatgccaacggaaagaatcttgggaaagaggccaaacccgaggcaccagctgctaaatctcgttttttcttgatgctctctcggcctgtaccaggacgtaccggagaccaagccgcagattcatcccttggatcagtgaagcttgatgtcagctccaataaagctccagcgaacaaagacccaagtgagagctggacacttccggtggcagctggaccggggcaggacacagataaaaccccagggcacgccccggcccaagacaaggtcctctctgccgccagggatcccacgcttctcccacctgagacagggggagcaggaggagaagctccctccaagcccaaggactccagcttttttgacaaattcttcaagctggacaagggacaggaaaaggtgccaggtgacagccaacaggaagccaagagggcagagcatcaagacaaggtggatgaggttcctggcttatcagggcagtccgatgatgtccctgcagggaaggtaagtgtgccaaggtgtatccacttggttctgaatgcatgctcgggggcgctaatgggataagaccactgcacatatgcagtcaccctgggcctaggcaaggtggcaagctgttgacccctctagaacaaatagcacattgcagcagagtgtcatcctgatgtttctctgggtagaaacttctgtgtgaagaacaataacagctgtggcatctgttttatgtaaaagaaaagaggaggtgagttacatgcagatgaatttgtccatccatttttcaaaggcggaagtagacaggttgcgtttacgatcagtggattctggaggaaaaggcattagtggaataaaaatgattcctaaaagatgttacctagtctctgtagtttgttgacatgcagagttttgttggaacacatttcgtcccttactgttaatagcctgaattgatatttaaccatcttttgctctaaggtgtgtgtttgaataaggagattttacagctctgggcagactcttttatgta

SEQ ID NO: 3694 - DNA, 1337 bp, Homo sapiens
  source 1..1337: mol_type = unassigned DNA
ataatctcatgattgttctgcacgcctgtgggcagaagaagtatggctggaattagggggtaagagagaaaggggtgtgaagcaaaagtatgactttgagagttcacattcagcaagtggcaactgtgacaactgttttgcccctaggacatagttgacggcaaggaaaaagaaggacaagaacttggaactgcggattgctctgtccctggggacccagaaggactggagactgcaaaggacgattcccaggcagcagctatagcagagaataataattccatcatgagtttctttaaaactctggtttcacctaacaaagctgaaacaaaaaaggacccagaagacacggcatcgaaagcagaaagtgtctgtgatggacaagctggtcagaagacatccgagatccaggctagaggcaccaagaaaaagcacctggatagccccaggctaggactcgcctttagaaaattctttaggcataagggtgctgaaaagtcacccaccacttcagctgaccttaagtcagacaaagccaactttacatcccaggagacccaaggggctggcaagaattccaaaggatgcaacccatcggggcacacacagtccgtgacaacccctgaacctgcgaaggaaggcaccaaggagaaatcaggacccacctctctgcctctgggcaaactgttttggaaaaagacatcagactccacagaaaagactatcacaccgccagagcctgaaccaacaggagcaccacagaagggtaaagagggctcctcgaaggacaagaagtcagcagccgagatgaacaagcagaagagcaacaagcaggaagccaaagaaccagcccagtgcacagagcaggccacggtggacacgaactcactgcagaatggggacaagctccaaaagagacctgagaagcggcagcagtcccttgggggcttctttaaaggcctgggaccaaagcggatgttggatgctcaagtgcaaacagacccagtatccatcggaccagttggcaaatccaagtaaacaaatcagcacggttcccaccaggttctcctgccaccaagatgtgttctccttactccatctcctccccaaacacgctccatgtatatattcttctgatggccagcaaatgaaattctgcctagaaattaagcccgagctgttgtatattgaggtgtattatttacgtctctggtccagtcttttctggcaaataacagtaaagatggtttagcaggtcacctagttgggtcagaagagtcgatgatcaccaagcaggaaagggagggaatagaggaatgtgttcgggttaagtgatg

SEQ ID NO: 3695 - DNA, 2537 bp, Homo sapiens
  source 1..2537: mol_type = unassigned DNA
atgtcagctccaataaagctccagcgaacaaagacccaagtgagagctggacacttccggtggcagctggaccggggcaggacacagataaaaccccagggcacgccccggcccaagacaaggtcctctctgccgccagggatcccacgcttctcccacctgagacagggggagcaggaggagaagctccctccaagcccaaggactccattttttgacaaattcttcaagctggacaagggacaggaaaaggtgccaggtgacagccaacaggaagccaagagggcagagcatcaagacaaggtggatgaggttcctggcttatcagggcagtccgatgatgtccctgcagggaaggacatagttgacggcaaggaaaaagaaggacaagaacttggaactgcggattgctctgtccctggggacccagaaggactggagactgcaaaggacgattcccaggcagcagctatagcagagaataataattccatcatgagtttctttaaaactctggtttcacctaacaaagctgaaacaaaaaaggacccagaagacacgggtgctgaaaagtcacccaccacttcagctgaccttaagtcagacaaagccaactttacatcccaggagacccaaggggctggcaagaattccaaaggatgcaacccatcggggcacacacagtccgtgacaacccctgaacctgcgaaggaaggcaccaaggagaaatcaggacccacctctctgcctctgggcaaactgttttggaaaaagtcagttaaagaggactcagtccccacaggtgcggaggagaatacatcagactccacagaaaagactatcacaccgccagagcctgaaccaacaggagcaccacagaagggtaaagagggctcctcgaaggacaagaagtcagcagccgagatgaacaagcagaagagcaacaagcaggaagccaaagaaccagcccagtgcacagagcaggccacggtggacacgaactcactgcagaatggggacaagctccaaaagagacctgagaagcggcagcagtcccttgggggcttctttaaaggcctgggaccaaagcggatgttggatgctcaagtgcaaacagacccagtatccatcggaccagttggcaaatccaagtaaacaaatcagcacggttcccaccaggttctcctgccaccaagatgtgttctccttactccatctcctccccaaacacgctccatgtatatattcttctgatggccagcaaatgaaattctgcctagaaattaagcccgagctgttgtatattgaggtgtattatttacgtctctggtccagtcttttctggcaaataacagtaaagatggtttagcaggtcacctagttgggtcagaagagtcgatgatcaccaagcaggaaagggagggaatagaggaatgtgttcgggttaagtgatgaaaatggcagtggtggccgggcgtggtggctctcgcctgtaatctcagcactttgggaggccgaggcaggtggatcacctgaggtcaggagttcaagactagcctggccaacatcatgaaaccccgtctctactaaaaatacaaaaattagccaggcatggtggcacacacctgtagtcccagctactcgggagcccaacgcacgagaaccgcttgtacccaggaggtggaggttgcagtgagccgaagttgcaccattgcactccaccctgggcgacagagcaagattctatcaaaaaaaaaaaaaggcagtggcaagtaagttatagaagagaaatgctgctagaaggaattaagcgttgtagtaaatgcgtgcttatcctctaagcttgaagaagggagacgaaaatccatttgtttaaattcacatctcaaggagggagaacccgggctgtgttgggtggttgccaatttcctagaacggaatgtgtggggtatagaaaaaggaatgaataagcgttgtttttcaaatagggtccttgtaagttattgatgagagggaaaagattgactggggagggcttaaaatgatttgggaaaacaattgcttttgaggctcagtgacaacggcaaagattacaacttaaaaaaaaaaaataaataaaaaataaaggaagttgcacggttattttgcaacacaagggggcggcaaggtccccatttttatcctgtaatactgtatccctaacaaagatttggtctctgctatcttacattattaatgtttctcagatggctgaggggctcgcttcatctgttccgtctgacacttatctcaagtgtgtctgtcattcctaatgttctcaggatgtgctctgataaaaccctccccataacctcagttaataaaaatttacagaagacttctcaaatacctgagttgtttttaatacctgtacaaaggagtaaataggaccctgagtctattaaaatgtaattcaaagtagcatatgattgactgacagtcatgtaaactgtatctttctttttctgatttaataaaaaatacatttacttctaaag

SEQ ID NO: 3696 - DNA, 1299 bp, Homo sapiens
  source 1..1299: mol_type = unassigned DNA
tgagtttacgcagacgcagaaaacgcaggcaaacctgaggtcctcagaatggcgggcacaggtttggtggctggagaggttgtggtggatgcgctgccgtattttgatcaaggttatgaagcccctggtgtgcgggaagcggctgcagcgctggtggaggaggaaactcgcagataccgacctactaagaactacctgagctacctgacagccccggattattctgcctttgaaactgacataatgagaaatgaatttgaaagactggctgctcgacaaccaattgaattgctcagtatgaaacgatatgagcttccagccccctcctctggtcaaaaaaatgacattactgcatggcaagaatgtgtaaacaattctatggcccagttagagcatcaagcagttagaattgagaatctggaactaatgtcacagcatggatgtaatgcctggaaagtatacaatgaaaatctagttcatatgattgaacacgcacagaaggaacttcagaagttaagaaaacatattcaagatttaaactggcagagaaagaacatgcaactcacagctggatctaaattgagagaaatggagtcaaattgggtatccctggtcagtaagaattatgagattgaacggactattgttcagctagaaaatgaaatctatcaaattaagcagcaacatggagaggcaaacaaagaaaacatccggcaagacttctgaaaagacaatttagcaggtagaagaaaagttgggctttcacaaaaggcatctgaacttttaatgaactttgaaggacaacagcatcttcccaaaaccattgatgtttaagtgtttagaaatcatagaaggtgtaggctgctgtggtaattctatttgtatatctcaacagaattaaaatgtctagcttggtggtatttttatagccataaaagaaaatctttaggctttcaaaataaggatgactttagaataatattgtgtcatagaattaattttcagccatgtggaccatattttgtatccaaggatccttatttaaagctttcaacatgtacaggaagttggaaatttttggtttatgactttgtctaataaagagatagttctaaacacattcttgatcaccaaacaacttcagaaagacagtgactgtacagttatcattatcatcatcatcgtcatcatcataggtaacagttatatcaagcttaatatgtgctgaacattgttctgaacactttaggtagatgaactagatgtatgtgaataaaaattatttggtcctcacaaaaa

SEQ ID NO: 3697 - DNA, 1109 bp, Homo sapiens
  source 1..1109: mol_type = unassigned DNA
ggagctgcgagccgcgaccgccgggagcgcacctgccccgcctccgccaggcggtccgcggggcatgcagcggaccgggggcggggctccgaggcccgggcgcaaccacgggctcccaggcagcctccgccagccggaccccgtcgccctcctgatgctgctcgtggacgctgatcagccggagcccatgcgcagcggggcgcgcgagctcgcgctcttcctgacccccgagcctggggccgaggcgaaggaggtggaggagaccatcgagggcatgctcctcaggctggaagagttttgcagcctggctgacctgatcaggagtgatacttcacagatcctggaggaaaacatcccagtccttaaggccaaactgacagaaatgcgtggcatctatgccaaagtggaccggctagagaagtcacctgcaccggtgcccgtgacgtacgagctgcccacactgtataggacggaggactattttcctgtggacgccggggaagcacagcaccacccccgcacctgccctcggcctttgtgagctttgtggtcttcccatcaggaacgctggaaagtgacattgtgtacacactgcagcttgggggttttttctttgtattgctgtttattttatattttaaaaatatttaaaaaaatgtcgagatggggtctcactatgttgtccagactgatctcaaactcctgggctcaagtgatccacccaccttggccttccaaagtggtgggattatgggcaggagcctccgtgcccaggctgctgccattttcaaatttcctccctgcctcatgtgagaccacagggtttggagaagcagttggaacccacgtgtggtgatgcctcccacatcggcctgcttggggttctacaggggttgagggaccaggcctggccggggctgatggacagtggggactttccttctctccatgatggctttgcaggggctccatggtccttctctctgtgatgggtttttgcacggggtgtgctctgccactgtggtgggtgggtggatgctgcttctgttgcctccagacctcggtgcccacagccttgaggatccttccaataaaggtgtcaagagctc

SEQ ID NO: 3698 - DNA, 634 bp, Homo sapiens
  source 1..634: mol_type = unassigned DNA
ggagctgcgagccgcgaccgccgggagcgcacctgccccgcctccgccaggcggtccgcggggcatgcagcggaccgggggcggggctccgaggcccgggcgcaaccacgggctcccaggcagcctccgccagccggaccccgtcgccctcctgatgctgctcgtggacgctgatcagccggagcccatgcgcagcggggcgcgcgagctcgcgctcttcctgacccccgagcctggggccgaggcgaaggaggtggaggagaccatcgagggcatgctcctcaggctggaagagttttgcagcctggctgacctgatcaggagtgatacttcacagatcctggaggaaaacatcccagtccttaaggccaaactgacagaaatgcgtggcatctatgccaaagtggaccggctagaggccttcgtcaagatggttggacaccacgtcgccttcctggaagcagacgtgcttcaggctgagcgggaccatggggccttccctcaggccctgcggaggtggctgggatccgcagggctcccctccttcaggaacctggagtgcagtggtgcaatcttggctcactgcaacctccgcctctcgggttcaagcgattctcctgcctcagcctcctga

SEQ ID NO: 3699 - DNA, 1378 bp, Homo sapiens
  source 1..1378: mol_type = unassigned DNA
cactgggtggcgctgcccgctcggcccggcgctcctggagctgcgagccgcgaccgccgggagcgcacctgccccgcctccgccaggcggtccgcggggcatgcagcggaccgggggcggggctccgaggcccgggcgcaaccacgggctcccaggcagcctccgccagccggaccccgtcgccctcctgatgctgctcgtggacgctgatcagccggagcccatgcgcagcggggcgcgcgagctcgcgctcttcctgacccccgagcctggggccgaggcgaaggaggtggaggagaccatcgagggcatgctcctcaggctggaagagttttgcagcctggctgacctgatcaggagtgatacttcacagatcctggaggaaaacatcccagtccttaaggccaaactgacagaaatgcgtggcatctatgccaaagtggaccggctagaggccttcgtcaagatggttggacaccacgtcgccttcctggaagcagacgtgcttcaggctgagcgggaccatggggccttccctcaggccctgcggaggtggctgggatccgcagggctcccctccttcaggaacgtggagtgcagtggcacaatcccagctcgctgcaacctccgcctcccgggttcaagtgattctcctgcctccgcctcccaagtagctgggattacagaagtcacctgcaccggtgcccgtgacgtacgagctgcccacactgtataggacggaggactattttcctgtggacgccggggaagcacagcaccacccccgcacctgccctcggcctttgtgagctttgtggtcttcccatcaggaacgctggaaagtgacattgtgtacacactgcagcttgggggttttttctttgtattgctgtttattttatattttaaaaatatttaaaaaaatgtcgagatggggtctcactatgttgtccagactgatctcaaactcctgggctcaagtgatccacccaccttggccttccaaagtggtgggattatgggcaggagcctccgtgcccaggctgctgccattttcaaatttcctccctgcctcatgtgagaccacagggtttggagaagcagttggaacccacgtgtggtgatgcctcccacatcggcctgcttggggttctacaggggttgagggaccaggcctggccggggctgatggacagtggggactttccttctctccatgatggctttgcaggggctccatggtccttctctctgtgatgggtttttgcacggggtgtgctctgccactgtggtgggtgggtggatgctgcttctgttgcctccagacctcggtgcccacagccttgaggatccttccaataaaggtgtcaagagctca

SEQ ID NO: 3700 - DNA, 1181 bp, Homo sapiens
  source 1..1181: mol_type = unassigned DNA
atgcagcggaccgggggcggggctccgaggcccgggcgcaaccacgggctcccaggcagcctccgccagccggaccccgtcgccctcctgatgctgctcgtggacgctgatcagccggagcccatgcgcagcggggcgcgcgagctcgcgctcttcctgacccccgagcctggggccgaggcgaaggaggtggaggagaccatcgagggcatgctcctcaggctggaagagttttgcagcctggctgacctgatcaggagtgatacttcacagatcctggaggaaaacatcccagtccttaaggccaaactgacagaaatgcgtggcatctatgccaaagtggaccggctagaggccttcgtcaagatggttggacaccacgtcgccttcctggaagcagacgtgcttcaggctgagcgggaccatggggccttccctcaggccctgcggaggtggctgggatccgcagggctcccctccttcaggaacaagtcacctgcaccggtgcccgtgacgtacgagctgcccacactgtataggacggaggactattttcctgtggacgccggggaagcacagcaccacccccgcacctgccctcggcctttgtgagctttgtggtcttcccatcaggaacgctggaaagtgacattgtgtacacactgcagcttgggggttttttctttgtattgctgtttattttatattttaaaaatatttaaaaaaatgtcgagatggggtctcactatgttgtccagactgatctcaaactcctgggctcaagtgatccacccaccttggccttccaaagtggtgggattatgggcaggagcctccgtgcccaggctgctgccattttcaaatttcctccctgcctcatgtgagaccacagggtttggagaagcagttggaacccacgtgtggtgatgcctcccacatcggcctgcttggggttctacaggggttgagggaccaggcctggccggggctgatggacagtggggactttccttctctccatgatggctttgcaggggctccatggtccttctctctgtgatgggtttttgcacggggtgtgctctgccactgtggtgggtgggtggatgctgcttctgttgcctccagacctcggtgcccacagccttgaggatccttccaataaaggtgtcaagagctca

SEQ ID NO: 3701 - DNA, 1450 bp, Homo sapiens
  source 1..1450: mol_type = unassigned DNA
gctcgccgctggagaccgcgctcactatccgaggaggaccctcctctgccccgcgtccagctttagtccccgactgcgttcatcgccaagggcccgcccactgccttaggtcgcgtcgccagccttgggtcccgtcgccagccttgggtcccgtccccggctgcactcaccgcgaggccccacccttagctctagtccccggtgtcgcccaccgacgaggccccgccccaaactccagtcccgggctgcgctcaccgccgtggccccgcccccaagcgccagtcctcggctgcgctcaccggtaggccccgctcgggttccgccgaagcccagcccccgcaggtcgcccctccgacgccggcgcgccgcaagggaggccagctcgctcgcagtggggaggtcgcggctccagtcctcgcgtccccgccgtggtcccggtgcctgtcccatcccgcgggcgcggccgttgcgggcggcgcggcccgggcgcgcgcggcgaatctgcggctgcgaatcggctggagcggggcctcgcgagagcggcgaggcctgggcggctgggcctgggcgggcggcgcgggctgctccggaggctcgggtggcttgagagtcttgggaggctccgggcgctgcccgcgcggtcgccggcatgacgggccgcgtgtgccgcggttgcggcggcacggacatcgagctggacgcggcgcgcggggacgcggtgtgcaccgcctgcggctcagtgctggaggacaacatcatcgtgtccgaggtgcagttcgtggagagcagcggcggcggctcctcggccgtgggccagttcgtgtccctggacggtgctggcaaaaccccgactctgggtggcggcttccacgtgaatctggggaaggagtcgagagcgcagaccctgcagaatgggaggcgccacatccaccacctggggaaccagctgcagctgaaccagcactgcctggacaccgccttcaacttcttcaagatggccgtgagcaggcacctgacccgcggccggaagatggcccacgtgattgctgcctgcctctacctggtctgccgtacggagggcacgccgcacatgctcctggacctcagcgacctgctccaggtagacagcctccgtcctgcatctttccccacctggggttgtgacctgggggttgtgaccagggttgtgaccggggtgtaccccaggtgcctccacgcatctcagtggccggtctgtgctgcctgcccagtcaggaagttttggtctgtaggatgaggggccttcatgacatgggggtcacagtccgagacttgtgggagtgtgggtctccatggcaggagggcacctgccaatgctgggcacggttgggtgttagctaggcctgggtgaacagtgaacttttgtcctacacaaaggagattattttcaattaaaaaatttttttgtgag

SEQ ID NO: 3702 - DNA, 2292 bp, Homo sapiens
  source 1..2292: mol_type = unassigned DNA
acaaccgagtcctgcgcgccccgtgcgccgggggtcgctcccaggccgaggtctgacagtgtcgccgaacgcgaaaggaagcgtgtggtacccgagagaggaagcaccctcgtcaccccggccggcaccgcattgaggcaggtgtgcaggtgcggttgcggcgagccaggtgctggcaaaaccccgactctgggtggcggcttccacgtgaatctggggaaggagtcgagagcgcagaccctgcagaatgggaggcgccacatccaccacctggggaaccagctgcagctgaaccagcactgcctggacaccgccttcaacttcttcaagatggccgtgagcaggcacctgacccgcggccggaagatggcccacgtgattgctgcctgcctctacctggtctgccgtacggagggcacgccgcacatgctcctggacctcagcgacctgctccaggtgaatgtgtacgtgcttggaaagacgtttcttctcttggcaagagagctctgcatcaatgcgccggccatagacccgtgcctgtatattccacgctttgcgcacctgctggaattcggggagaagaaccacgaggtgtccatgactgccctgaggctcctacagaggatgaagcgggactggatgcacacaggccggcgcccctcgggcctctgcggagcagcgctcctggttgcagccagaatgcatgacttcaggaggactgtgaaggaggtcatcagtgtggtcaaagtgtgtgagtccacgctgcggaagaggctcacggaatttgaagacacccccaccagtcagttgaccattgatgagttcatgaagatcgacctggaggaggagtgcgaccccccctcgtacacagctgggcagaggaagctgcggatgaagcagcttgaacaagtcctgtcaaaaaaactggaggaggttgaaggtgaaatatccagttaccaggatgcaattgagattgaactagaaaacagccggccaaaggccaaggggggcctggccagcctggcaaaagatggctccaccgaggacaccgcgtccagcttgtgtggcgaggaggacacagaggacgaggagctggaagccgcggccagccacctgaacaaagacttataccgggagctccttggtggtgcccccggcagctcggaagcagcaggaagccccgagtggggcggcagacctccggccctggggtccctgctggaccccctccccactgcagccagcctgggcatctcagactccatccgcgaatgcatctcctctcagagcagcgaccccaaagatgcttcaggagacggtgagctggacctcagtggcattgatgacctggagattgacaggtacatcctgaatgagtcggaagcccgcgtgaaggccgagctgtggatgagggagaacgccgagtacctgcgggaacagagggaaaaagaagcaagaatagcgaaagagaaggagctcggcatctacaaggaacacaagcccaagaagtcttgcaagcgacgggagccaattcaggccagtaccgccagggaggccatcgagaagatgctggagcagaagaagatctccagcaagatcaattatagcgtgctccggggcctcagcagcgccggcgggggcagtccgcacagggaggatgcacagcccgagcatagcgccagtgccaggaagctgtcacgaaggaggacgccggccagcagaagtggggctgaccctgtgaccagtgtggggaaaaggttgaggcctctggtgtctacgcagccagcaaagaaggtggccacgggagaggctttgctcccaagctctcccaccctcggagctgagcctgccaggccccaggcggtgctggtggagagcgggcccgtgtcataccacgccgacgaggaggctgacgaggaggagcctgacgaggaggacggggagccctgcgtcagtgccctgcagatgatgggcagcaacgactatggctgtgatggcgatgaggacgacggctactgaagtgtggcctccaggcaggtgatgtcctggcagggggcctcgcgggtctcctcagcatcagacgggcttccaggaccgcagcaggcaggccccagcgccgagactcctggtgacaggtggcacctgtcccacagccctcgtcccatgtggaacttaccattgggattgtgtttctattcagcaagggaaaccggaccaagcgtctgcatgtgtgtgatcagatgtgggccgggtgtgtgcagggctgggtcccgctgcctgccgtcgactcat

SEQ ID NO: 3703 - DNA, 1383 bp, Homo sapiens
  source 1..1383: mol_type = unassigned DNA
cggctgcgctcaccggtaggccccgctcgggttccgccgaagcccagcccccgcaggtcgcccctccgacgccggcgcgccgcaagggaggccagctcgctcgcagtggggaggtcgcggctccagtcctcgcgtccccgccgtggtcccggtgcctgtcccatcccgcgggcgcggccgttgcgggcggcgcggcccgggcgcgcgcggcgaatctgcggctgcgaatcggctggagcggggcctcgcgagagcggcgaggcctgggcggctgggcctgggcgggcggcgcgggctgctccggaggctcgggtggcttgagagtcttgggaggctccgggcgctgcccgcgcggtcgccggcatgacgggccgcgtgtgccgcggttgcggcggcacggacatcgagctggacgcggcgcgcggggacgcggtgtgcaccgcctgcggctcagtgctggaggacaacatcatcgtgtccgaggtgcagttcgtggagagcagcggcggcggctcctcggccgtgggccagttcgtgtccctggacggtgctggcaaaaccccgactctgggtggcggcttccacgtgaatctggggaaggagtcgagagcgcagaccctgcagaatgggaggcgccacatccaccacctggggaaccagctgcagctgaaccagcactgcctggacaccgccttcaacttcttcaagatggccgtgagcaggcacctgacccgcggccggaagatggcccacgtgattgctgcctgcctctacctggtctgccgtacggagggcacgccgcacatgctcctggacctcagcgacctgctccaggtgaatgtgtacgtgcttggaaagacgtttcttctcttggcaagagagctctgcatcaatgcgccggccatagacccgtgcctgtatattccacgctttgcgcacctgctggaattcggggagaagaaccacgaggtgtccatgactgccctgaggctcctacagaggatgaagcgggactggatgcacacaggccggcgcccctcgggcctctgcggagcagcgctcctggttgcagccagaatgcatgacttcaggaggactgtgaaggaggtcatcagtgtggtcaaagtgtgtgagtccacgctgcggaagaggctcacggaatttgaagacacccccaccagtcagttgaccattgatgagttcatgaagatcgacctggaggaggagtgcgaccccccccccatcgaggagggagggcagacggaggcccgagagcctccccaggcctcttcgtgggaaggccccagtaccactcgtaggaggtctcagctctggcatggctgccccggatgtggccgagggggcttcaccctgtgtccttag

SEQ ID NO: 3704 - DNA, 1086 bp, Homo sapiens
  source 1..1086: mol_type = unassigned DNA
cggctgcgctcaccggtaggccccgctcgggttccgccgaagcccagcccccgcaggtcgcccctccgacgccggcgcgccgcaagggaggccagctcgctcgcagtggggaggtcgcggctccagtcctcgcgtccccgccgtggtcccggtgcctgtcccatcccgcgggcgcggccgttgcgggcggcgcggcccgggcgcgcgcggcgaatctgcggctgcgaatcggctggagcggggcctcgcgagagcggcgaggcctgggcggctgggcctgggcgggcggcgcgggctgctccggaggctcgggtggcttgagagtcttgggaggctccgggcgctgcccgcgcggtcgccggcatgacgggccgcgtgtgccgcggttgcggcggcacggacatcgagctggacgcggcgcgcggggacgcggtgtgcaccgcctgcggctcagtgctggaggacaacatcatcgtgtccgaggtgcagttcgtggagagcagcggcggcggctcctcggccgtgggccagttcgtgtccctggacggtgctggcaaaaccccgactctgggtggcggcttccacgtgaatctggggaaggagtcgagagcgcagaccctgcagaatgggaggcgccacatccaccacctggggaaccagctgcagctgaaccagcactgcctggacaccgccttcaacttcttcaagatggccgtgagcaggcacctgacccgcggccggaagatggcccacgtgattgctgcctgcctctacctggtctgccgtacggagggcacgccgcacatgctcctggacctcagcgacctgctccaggtagacagcctccgtcctgcatctttccccacctggggttgtgacctgggggttgtgaccagggttgtgaccggggtgtaccccaggtgcccacgcatctcagtggccggtctgtgctgcctgcccagtcaggaagttttggtctgtaggatgaggggccttcatgacatgggggtcacagtccgagacttgtgggagtgtgggtctccatggcaggagcacctgccaatgctgggcacggttgggtgttag

SEQ ID NO: 3705 - DNA, 813 bp, Homo sapiens
  source 1..813: mol_type = unassigned DNA
ccgccaaggacacacccaccgaggccacagctgcgatttcatagtgtgggaccccactggcaaagacacgctggctgctgtggccgtggtttctgtcccagccgtctgtttccatagaaaaagacccgtgcctgtatattccacgctttgcgcacctgctggaattcggggagaagaaccacgaggtgtccatgactgccctgaggctcctacagaggatgaagcgggactggatgcacacaggccggcgcccctcgggcctctgcggagcagcgctcctggttgcagccagaatgcatgacttcaggaggactgtgaaggaggtcatcagtgtggtcaaagtgtgtgagtccacgctgcggaagaggctcacggaatttgaagacacccccaccagtcagttgaccattgatgagttcatgaagatcgacctggaggaggagtgcgaccccccctcgtacacagctgggcagaggaagctgcggatgaagcagcttgaacaagtcctgtcaaaaaaactggaggaggttgaaggtgaaatatccagttaccaggatgcaattgagattgaactagaaaacagccccccatcgaggagggagggcagacggaggcccgagagcctccccaggcctcttcgtgggaaggccccagtaccactcgtaggaggtctcagctctggcatggctgccccggatgtggccgagggggcttcaccctgtgtccttaggagggggtggccttgaggcagagccgtgcctcactgacccccaggggcctcatcctccccatggaatgggctgtatgtcctgc

SEQ ID NO: 3706 - DNA, 3314 bp, Homo sapiens
  source 1..3314: mol_type = unassigned DNA
gcggctgggcctgggcgggcggcgcgggctgctccggaggctcgggtggcttgagagtcttgggaggctccgggcgctgcccgcgcggtcgccggcatgacgggccgcgtgtgccgcggttgcggcggcacggacatcgagctggacgcggcgcgcggggacgcggtgtgcaccgcctgcggctcagtgctggaggacaacatcatcgtgtccgaggtgcagttcgtggagagcagcggcggcggctcctcggccgtgggccagttcgtgtccctggacgggaggcgccacatccaccacctggggaaccagctgcagctgaaccagcactgcctggacaccgccttcaacttcttcaagatggccgtgagcaggcacctgacccgcggccggaagatggcccacgtgattgctgcctgcctctacctggtctgccgtacggagggcacgccgcacatgctcctggacctcagcgacctgctccaggtgaatgtgtacgtgcttggaaagacgtttcttctcttggcaagagagctctgcatcaatgcgccggccatagacccgtgcctgtatattccacgctttgcgcacctgctggaattcggggagaagaaccacgaggtgtccatgactgccctgaggctcctacagaggatgaagcgggactggatgcacacaggccggcgcccctcgggcctctgcggagcagcgctcctggttgcagccagaatgcatgacttcaggaggactgtgaaggaggtcatcagtgtggtcaaagtgtgtgagtccacgctgcggaagaggctcacggaatttgaagacacccccaccagtcagttgaccattgatgagttcatgaagatcgacctggaggaggagtgcgaccccccctcgtacacagctgggcagaggaagctgcggatgaagcagcttgaacaagtcctgtcaaaaaaactggaggaggttgaaggtgaaatatccagttaccaggatgcaattgagattgaactagaaaacagccggccaaaggccaaggggggcctggccagcctggcaaaagatggctccaccgaggacaccgcgtccagcttgtgtggcgaggaggacacagaggacgaggagctggaagccgcggccagccacctgaacaaagacttataccgggagctccttggtggtgcccccggcagctcggaagcagcaggaagccccgagtggggcggcagacctccggccctggggtccctgctggaccccctccccactgcagccagcctgggcatctcagactccatccgcgaatgcatctcctctcagagcagcgaccccaaagatgcttcaggagacggtgagctggacctcagtggcattgatgacctggagattgacaggtacatcctgaatgagtcggaagcccgcgtgaaggccgagctgtggatgagggagaacgccgagtacctgcgggaacagagggaaaaagaagcaagaatagcgaaagagaaggagctcggcatctacaaggaacacaagcccaagaagtcttgcaagcgacgggagccaattcaggccagtaccgccagggaggccatcgagaagatgctggagcagaagaagatctccagcaagatcaattatagcgtgctccggggcctcagcagcgccggcgggggcagtccgcacagggaggatgcacagcccgagcatagcgccagtgccaggaagctgtcacgaaggaggacgccggccagcagaagtggggctgaccctgtgaccagtgtggggaaaaggttgaggcctctggtgtctacgcagccagcaaagaaggtggccacgggagaggctttgctcccaagctctcccaccctcggagctgagcctgccaggccccaggcggtgctggtggagagcgggcccgtgtcataccacgccgacgaggaggctgacgaggaggagcctgacgaggaggacggggagccctgcgtcagtgccctgcagatgatgggcagcaacgactatggctgtgatggcgatgaggacgacggctactgaagtgtggcctccaggcaggtgatgtcctggcagggggcctcgcgggtctcctcagcatcagacgggcttccaggaccgcagcaggcaggccccagcgccgagactcctggtgacaggtggcacctgtcccacagccctcgtcccatgtggaacttaccattgggattgtgtttctattcagcaagggaaaccggaccaagcgtctgcatgtgtgtgatcagatgtgggccgggtgtgtgcagggctgggtcccgctgcctgccgtcgactcatccaaggaccctccaaggctggcagtgtggtgttgctactattaaggaaacaggcttggggcagccccactgctggtccaagtgtgtggagggctgagtgtgctggccctgtgactcaggaccagctctggagtctccagcccaccctccgcaccgtcccctcctgagcagcactcggcgccagcagcctctgccagagtggaagccagagccctgcaggtgtccggcgcagccgtgggagctgaggatctggcacttgagaggcagcagctccttgaaggtcctctgcctccagctgtggccctgcatccagatacctgcctcgtccgaggcagacacccccacccctgcctcctccagacccccctccccgctgcctgcaccgcctggagcagcatgggggtcagacccctgctccagggccacttgagttgtgggcccaggagccctgcggctgccggcaggtgaactgagtgcccgacagctgagaccggcgcccacccgtcctgagcatagctctgtaggcagtgcgggcatagcctgcatagtgtcctggcgctgggagttccccgtggacagagccagagggcagtggcgctccctgtcagagctggatcaggccccccatcgaggagggagggcagacggaggcccgagagcctccccaggcctcttcgtgggaaggccccagtaccactcgtaggaggtctcagctctggcatggctgccccggatgtggccgagggggcttcaccctgtgtccttaggagggggtggccttgaggcagagccgtgcctcactgacccccaggggcctcatcctccccatggaatgggctgtatgtcctgccccaacttggcccgcagcaggccagacccccctacccccgcccagagctcagtagccagcctgggtcctgccagggcttctcgagggcttgggggaagaatagatttagtaaagcaggaagatctgttgttacttaacagaaa

SEQ ID NO: 3707 - DNA, 3579 bp, Homo sapiens
  source 1..3579: mol_type = unassigned DNA
gggaggtgcgtggcatggggcactggctttgctgatgaggagaccagacttcagaggccgtgtcacctggcctgggccgcacagctggtgcatgccaagctcgcgtgcagacgaagctccagaggcctggctgtcaggagggttcctccccgaggacacacacgcaacctcctggaccgccaggctttagacttttaaaacttccatatgcaggaaaccccacaggacgcagccagcatctcgggtcatgggtgcacctgtcaccgcagtcctgggctaaacagtgaacaggagctctgtgtctctgtggtcgttacagttgtagtgaatgttccctgggagagtcctcttcagaagatatttgcggtattttcaacaaaggactctccaggatggaggagcaactacaagtcaggaaggaaaaggctgacaacccagttttttaaaaaacgggcaaaggacgtgaacagacaccatgcaatggcccagagtgcacaaatcatcatttctcccaggaatggggtgcccgagcccccaggcggctgaacttgagacttgtcacgtagtgttggtggaatgcagagcagctggagatcacctgctgcaggtgggtgcgtaactccgcacggccaagccgtttggaaagctgtagcatatgcatgagagtccggaaagttccgagagaaagtgtgtggatgcacccgccaaggacacacccaccgaggccacagctgcgatttcatagtgtgggaccccactggcaaagacacgctggctgctgtggccgtggtttctgtcccagccgtctgtttccatagaaaaagacccgtgcctgtatattccacgctttgcgcacctgctggaattcggggagaagaaccacgaggtgtccatgactgccctgaggctcctacagaggatgaagcgggactggatgcacacaggccggcgcccctcgggcctctgcggagcagcgctcctggttgcagccagaatgcatgacttcaggaggactgtgaaggaggtcatcagtgtggtcaaagtgtgtgagtccacgctgcggaagaggctcacggaatttgaagacacccccaccagtcagttgaccattgatgagttcatgaagatcgacctggaggaggagtgcgaccccccctcgtacacagctgggcagaggaagctgcggatgaagcagcttgaacaagtcctgtcaaaaaaactggaggaggttgaaggtgaaatatccagttaccaggatgcaattgagattgaactagaaaacagccggccaaaggccaaggggggcctggccagcctggcaaaagatggctccaccgaggacaccgcgtccagcttgtgtggcgaggaggacacagaggacgaggagctggaagccgcggccagccacctgaacaaagacttataccgggagctccttggtggtgcccccggcagctcggaagcagcaggaagccccgagtggggcggcagacctccggccctggggtccctgctggaccccctccccactgcagccagcctgggcatctcagactccatccgcgaatgcatctcctctcagagcagcgaccccaaagatgcttcaggagacggtgagctggacctcagtggcattgatgacctggagattgacaggtacatcctgaatgagtcggaagcccgcgtgaaggccgagctgtggatgagggagaacgccgagtacctgcgggaacagagggaaaaagaagcaagaatagcgaaagagaaggagctcggcatctacaaggaacacaagcccaagaagtcttgcaagcgacgggagccaattcaggccagtaccgccagggaggccatcgagaagatgctggagcagaagaagatctccagcaagatcaattatagcgtgctccggggcctcagcagcgccggcgggggcagtccgcacagggaggatgcacagcccgagcatagcgccagtgccaggaagctgtcacgaaggaggacgccggccagcagaagtggggctgaccctgtgaccagtgtggggaaaaggttgaggcctctggtgtctacgcagccagcaaagaaggtggccacgggagaggctttgctcccaagctctcccaccctcggagctgagcctgccaggccccaggcggtgctggtggagagcgggcccgtgtcataccacgccgacgaggaggctgacgaggaggagcctgacgaggaggacggggagccctgcgtcagtgccctgcagatgatgggcagcaacgactatggctgtgatggcgatgaggacgacggctactgaagtgtggcctccaggcaggtgatgtcctggcagggggcctcgcgggtctcctcagcatcagacgggcttccaggaccgcagcaggcaggccccagcgccgagactcctggtgacaggtggcacctgtcccacagccctcgtcccatgtggaacttaccattgggattgtgtttctattcagcaagggaaaccggaccaagcgtctgcatgtgtgtgatcagatgtgggccgggtgtgtgcagggctgggtcccgctgcctgccgtcgactcatccaaggaccctccaaggctggcagtgtggtgttgctactattaaggaaacaggcttggggcagccccactgctggtccaagtgtgtggagggctgagtgtgctggccctgtgactcaggaccagctctggagtctccagcccaccctccgcaccgtcccctcctgagcagcactcggcgccagcagcctctgccagagtggaagccagagccctgcaggtgtccggcgcagccgtgggagctgaggatctggcacttgagaggcagcagctccttgaaggtcctctgcctccagctgtggccctgcatccagatacctgcctcgtccgaggcagacacccccacccctgcctcctccagacccccctccccgctgcctgcaccgcctggagcagcatgggggtcagacccctgctccagggccacttgagttgtgggcccaggagccctgcggctgccggcaggtgaactgagtgcccgacagctgagaccggcgcccacccgtcctgagcatagctctgtaggcagtgcgggcatagcctgcatagtgtcctggcgctgggagttccccgtggacagagccagagggcagtggcgctccctgtcagagctggatcaggccccccatcgaggagggagggcagacggaggcccgagagcctccccaggcctcttcgtgggaaggccccagtaccactcgtaggaggtctcagctctggcatggctgccccggatgtggccgagggggcttcaccctgtgtccttaggagggggtggccttgaggcagagccgtgcctcactgacccccaggggcctcatcctccccatggaatgggctgtatgtcctgccccaacttggcccgcagcaggccagacccccctacccccgcccagagctcagtagccagcctgggtcctgccagggcttctcgagggcttgggggaagaatagatttagtaaagcaggaagatctgttgttacttaacagaaa

SEQ ID NO: 3708 - DNA, 2368 bp, Homo sapiens
  source 1..2368: mol_type = unassigned DNA
ggcgacgcctctaaatgagagacagcgccaaccaggtacccgcgaggacgaccccgccccgcaggacagggcatctccaccgcgcgctggacggaggatacaaccgagtcctgcgcgccccgtgcgccgggggtcgctcccaggccgaggtctgacagtgtcgccgaacgcgaaaggaagcgtgtggtacccgagagaggaagcaccctcgtcaccccggccggcaccgcattgaggcaggtgtgcaggtgcggttgcggcgagccaggtgctggcaaaaccccgactctgggtggcggcttccacgtgaatctggggaaggagtcgagagcgcagaccctgcagaatgggaggcgccacatccaccacctggggaaccagctgcagctgaaccagcactgcctggacaccgccttcaacttcttcaagatggccgtgagcaggcacctgacccgcggccggaagatggcccacgtgattgctgcctgcctctacctggtctgccgtacggagggcacgccgcacatgctcctggacctcagcgacctgctccaggtgaatgtgtacgtgcttggaaagacgtttcttctcttggcaagagagctctgcatcaatgcgccggccatagacccgtgcctgtatattccacgctttgcgcacctgctggaattcggggagaagaaccacgaggtgtccatgactgccctgaggctcctacagaggatgaagcgggactggatgcacacaggccggcgcccctcgggcctctgcggagcagcgctcctggttgcagccagaatgcatgacttcaggaggactgtgaaggaggtcatcagtgtggtcaaagtgtgtgagtccacgctgcggaagaggctcacggaatttgaagacacccccaccagtcagttgaccattgatgagttcatgaagatcgacctggaggaggagtgcgaccccccctcgtacacagctgggcagaggaagctgcggatgaagcagcttgaacaagtcctgtcaaaaaaactggaggaggttgaaggtgaaatatccagttaccaggatgcaattgagattgaactagaaaacagccggccaaaggccaaggggggcctggccagcctggcaaaagatggctccaccgaggacaccgcgtccagcttgtgtggcgaggaggacacagaggacgaggagctggaagccgcggccagccacctgaacaaagacttataccgggagctccttggtggtgcccccggcagctcggaagcagcaggaagccccgagtggggcggcagacctccggccctggggtccctgctggaccccctccccactgcagccagcctgggcatctcagactccatccgcgaatgcatctcctctcagagcagcgaccccaaagatgcttcaggagacggtgagctggacctcagtggcattgatgacctggagattgacaggcgcgaccttagcatgccccggtgtgcgaaggctaaaagccagccccacttccctgtgctcgcccagtacatcctgaatgagtcggaagcccgcgtgaaggccgagctgtggatgagggagaacgccgagtacctgcgggaacagagggaaaaagaagcaagaatagcgaaagagaaggagctcggcatctacaaggaacacaagcccaagaagtcttgcaagcgacgggagccaattcaggccagtaccgccagggaggccatcgagaagatgctggagcagaagaagatctccagcaagatcaattatagcgtgctccggggcctcagcagcgccggcgggggcagtccgcacagggaggatgcacagcccgagcatagcgccagtgccaggaagctgtcacgaaggaggacgccggccagcagaagtggggctgaccctgtgaccagtgtggggaaaaggttgaggcctctggtgtctacgcagccagcaaagaaggtggccacgggagaggctttgctcccaagctctcccaccctcggagctgagcctgccaggccccaggcggtgctggtggagagcgggcccgtgtcataccacgccgacgaggaggctgacgaggaggagcctgacgaggaggacggggagccctgcgtcagtgccctgcagatgatgggcagcaacgactatggctgtgatggcgatgaggacgacggctactgaagtgtggcctccaggcaggtgatgtcctggcagggggcctcgcgggtctcctcagcatcagacgggcttccaggaccgcagcaggcaggccccagcgccgagactcctggtgacaggtggcacctgtcccacagccctcgtcccatgtggaacttaccattgggattgtgtttctattcagcaa

SEQ ID NO: 3709 - DNA, 2858 bp, Homo sapiens
  source 1..2858: mol_type = unassigned DNA
gtagaacatggcatagaagacggagctgccgacagccaagacgtactgggaggagaaagcgccgccgtgagcctggctctcccgcaggctgcgtgtcagccacacggcggacggggcggacggggcacgcgttccgagaggggccgccgctacccaccttgtgggcgggcaccgtcctggtcgcccccgggggccccacgacgaagtgcacgtcggccatgagctcgttgttgaacatgagcgcgttcctgcaaagcgctcctggttgcagccagaatgcatgacttcaggaggactgtgaaggaggtcatcagtgtggtcaaagtgtgtgagtccacgctgcggaagaggctcacggaatttgaagacacccccaccagtcagttgaccattgatgagttcatgaagatcgacctggaggaggagtgcgaccccccctcgtacacagctgggcagaggaagctgcggatgaagcagcttgaacaagtcctgtcaaaaaaactggaggaggttgaaggtgaaatatccagttaccaggatgcaattgagattgaactagaaaacagccggccaaaggccaaggggggcctggccagcctggcaaaagatggctccaccgaggacaccgcgtccagcttgtgtggcgaggaggacacagaggacgaggagctggaagccgcggccagccacctgaacaaagacttataccgggagctccttggtggtgcccccggcagctcggaagcagcaggaagccccgagtggggcggcagacctccggccctggggtccctgctggaccccctccccactgcagccagcctgggcatctcagactccatccgcgaatgcatctcctctcagagcagcgaccccaaagatgcttcaggagacggtgagctggacctcagtggcattgatgacctggagattgacaggtacatcctgaatgagtcggaagcccgcgtgaaggccgagctgtggatgagggagaacgccgagtacctgcgggaacagagggaaaaagaagcaagaatagcgaaagagaaggagctcggcatctacaaggaacacaagcccaagaagtcttgcaagcgacgggagccaattcaggccagtaccgccagggaggccatcgagaagatgctggagcagaagaagatctccagcaagatcaattatagcgtgctccggggcctcagcagcgccggcgggggcagtccgcacagggaggatgcacagcccgagcatagcgccagtgccaggaagctgtcacgaaggaggacgccggccagcagaagtggggctgaccctgtgaccagtgtggggaaaaggttgaggcctctggtgtctacgcagccagcaaagaaggtggccacgggagaggctttgctcccaagctctcccaccctcggagctgagcctgccaggccccaggcggtgctggtggagagcgggcccgtgtcataccacgccgacgaggaggctgacgaggaggagcctgacgaggaggacggggagccctgcgtcagtgccctgcagatgatgggcagcaacgactatggctgtgatggcgatgaggacgacggctactgaagtgtggcctccaggcaggtgatgtcctggcagggggcctcgcgggtctcctcagcatcagacgggcttccaggaccgcagcaggcaggccccagcgccgagactcctggtgacaggtggcacctgtcccacagccctcgtcccatgtggaacttaccattgggattgtgtttctattcagcaagggaaaccggaccaagcgtctgcatgtgtgtgatcagatgtgggccgggtgtgtgcagggctgggtcccgctgcctgccgtcgactcatccaaggaccctccaaggctggcagtgtggtgttgctactattaaggaaacaggcttggggcagccccactgctggtccaagtgtgtggagggctgagtgtgctggccctgtgactcaggaccagctctggagtctccagcccaccctccgcaccgtcccctcctgagcagcactcggcgccagcagcctctgccagagtggaagccagagccctgcaggtgtccggcgcagccgtgggagctgaggatctggcacttgagaggcagcagctccttgaaggtcctctgcctccagctgtggccctgcatccagatacctgcctcgtccgaggcagacacccccacccctgcctcctccagacccccctccccgctgcctgcaccgcctggagcagcatgggggtcagacccctgctccagggccacttgagttgtgggcccaggagccctgcggctgccggcaggtgaactgagtgcccgacagctgagaccggcgcccacccgtcctgagcatagctctgtaggcagtgcgggcatagcctgcatagtgtcctggcgctgggagttccccgtggacagagccagagggcagtggcgctccctgtcagagctggatcaggccccccatcgaggagggagggcagacggaggcccgagagcctccccaggcctcttcgtgggaaggccccagtaccactcgtaggaggtctcagctctggcatggctgccccggatgtggccgagggggcttcaccctgtgtccttaggagggggtggccttgaggcagagccgtgcctcactgacccccaggggcctcatcctccccatggaatgggctgtatgtcctgccccaacttggcccgcagcaggccagacccccctacccccgcccagagctcagtagccagcctgggtcctgccagggcttctcgagggcttgggggaagaatagatttagtaaagcaggaagatctgttgttacttaacag

SEQ ID NO: 3710 - DNA, 18259 bp, Homo sapiens
  source 1..18259: mol_type = unassigned DNA
ggcgacgcctctaaatgagagacagcgccaaccaggtacccgcgaggacgaccccgccccgcaggacagggcatctccaccgcgcgctggacggaggatacaaccgagtcctgcgcgccccgtgcgccgggggtcgctcccaggccgaggtctgacagtgtcgccgaacgcgaaaggaagcgtgtggtacccgagagaggaagcaccctcgtcaccccggccggcaccgcattgaggcaggtgtgcaggtgcggttgcggcgagccaggtgagcgccgcccgggagccccaaggtcccgccgggtctgagcagcaccgggtcctcggaagctgagcgcggcccccggtgctcgggacctggggggctggggccgcgcttgccggagctgcgggggggcggcggctgcacgcgtcgaaccggcgggcgggggcgcggggggcgacctgggctccgctgggggacccgggccggggatggggcgcgcagaggccgcggccaggacacccccagcaggtgcccggcgggaacaaagcgcggcgggcggcgcgtacctgggcacgcagctggggctggagccgtccacctcccaggtggcgaacaggttcatgggcacgggcgtgttgagcgcgccgggcgcgccggggaggccgaggcggcctcgctcggccatggcgccggccccgccgctccctcggcggcctggggctgcggccgggccgcggacgcgcggcgggcgggccgggcgcgcggagggcggcggcgcggtcacatggctgccgggcggcggaggggacgggccgggccccggcgtcggacaggcccgcgggcggcgacgagctgcggccgctccgccccgccccgcccggcgccccgcccgcgccccgcgcgcccccggccgccccgcgcgcgcccggcgccctccgacccgcgccggcgccgccgattggctgggcggggcgccagctcgccgcctcgggtccaatcgccgccggcgcagcgcgcgccggaagtgaggtgcgcgcgcgcttcctccggcggcgcctcacggggcgtccccgcccgccggtgcgcgagagcgcgcactcacgcgcctgcgcacagaccccgcccggggcgccccgccccgccccccgggagccgcgggcaagggccgggagagtcgtgggggtccaccgggtcccggccagcttcaggcgccgccccctaaggaaagctcatcgtcgccctggcgatgcccacctccccacgcgcggattccccggcctcgacactttcccgcctccaccccgccatgccccgagtctccccgcccccctgccctcgccgccccttgtctcctgccgacccccgctgggttggcccggctgtgcgggccccgcccgtccccgagcccctccctcgcgcccccctgcgtgggttccccgggacgcagggaggtggcaaggaggtggccgggcctggcggcggtcgcggggactcgaagccactcggggcgccaggctgccgagcttagcctccagggctccagatgaccccgggcgccctctttgcgtcccagcatccttattcagcgccgcttttcagcgttgtgctcaggacaatggagaacaaatgtctggggccaaggctggctcctggccctggggttaacagtgaacttggggacccaagcaaagaggaggcaatggctagagccgctggggcccgacgtgtaggctctggggctcagggagggtgcttcccccatctgtttggcagcggctgtggtccagcaccagatgccaagccgagatttaggaaacggttttctggcctctcttctgtttccttgtttcacagttagtttacagttgcttttctcttcgccctgtgtcttgtctacaagtagttttactgaaacaaatccagcccgagcaaattgacctggagctggtttctttcctggcccacggggcttgccaccccagtgccccgtcagctccttctgcaaaggccctcatgccgctgcttcctccgttgagagagctcagcctccagctgtaactcctgtatctagaactgcaaacagctgcgactgcttaaagtcagggtcccacttcggagagaacaagggactctgtgtttcccacgcgcccctggctcctctaaggtggtacactgagagccatgagggtctgtctgaccttggccagctgctcggcgggcagagggccggtggatctcatacctttgagacagggtagggggagaagtgactatgtccagagagggggtagccataccccaggaggacaggctgtctgtgatgggagggcaggagacaggcacccattgaccccagaactgagcgtacggcgctgctggacctggcgagcgtgcagttgcagtcagacggatgggccgcctgacacatggtgcctgtgtatgccagcgtctaacccaggcagggactacaactgggggtcaagtgaggagatgcggggtgactaagccgtgcacagcagggcttggcaccagctgccaccattgagcggtgcccctcctctgtgccaggcaccgttgtgagcccttaagggacgtgacagttctgtcccatcccaagtgacaaaagaggagatggcggcctgtgaggttatgcagctgccaggggtcgggatatgacccacacagtctgtaccagagtggcccgaagaacccgtatggtgggtctacatcaatgcttctgccaggcaggaaagcagggacacgaaacacaccatgtgtcacgcctgcgaccacgtttatgtttgtttttaaggtgggatggtggtgatgggactgtggtcttctgtattttccaagtgcacagatgtcccttgggtgatcagagtaactttttagccagaacttgttatttgcactgccctcctctgtcggaaaatgatgctgtgctggtccttctcttgagggctgtgggtcacaggaggagatcccctgaaggctgggaggcatccctccccatgctatgaccctggcatggtgtgagccctcacccccgtgtttggagcacaggtgctttctctggtagcgttttctttaaagcaggaacttggtttgagacaaacctctcggatgactggggtggctgggcacggttggggaggaggtccaagaagaggatccttcagagccctggggtctcaggaggacaacctgaaagctggtcctaccacgtgctgcccggggtccccggaggttgtgggagttattattatttaagaagttaaagcttcaaggttctgaatgcttggctaggattccattggtattaaaaagacgaagccccaacccccagtcatgggacaggatgggccgaggcctttcctctgtccgcctggcttcgctaggtccctccacctagggtgaaggctcaggcttttccagtcgggcgccaggaccatgggctgcttggaaacgcattcatctcctcagcctgggctaagatgacacagacacacagcaggccctgctgaagtcggggagtgggggaggggcctcctccagggccagcactggtcagttggcggctccagcccacagcgcccctactccttctcctgccaggagctgggctgaggaagcagccccacgtggccaggtccctgcccagcccatgctatggcagagggacagaactgccgaacccctagacaggccctgccgcatccactcccatggttggagcacatggccatgactgaggctgaggaggaatggtcacaaaaaaggtacagcagggccctcctcctggaggcattttctgggaagccatgtgggggatggccaagagctctaagaccgctgagatcgctgcacccgcagccgcacctgtggacagttcccacggtcacccttagagcagctcaactgctgagagtgaggcctggaatcaaccccggggttgtagagtagaacagggttaggtgagccatgatagaacctgatagaatattctacagctggcagaaatagtgagttaaaagtagctaaaaacaggccagtcgcaggggctcacacctgtaatcccagcactttgggaggccaaagcgcacagatcccgtgacctcaggagttcaagaccagcttgggcaatatggcaaagtcccatctctaacaaaaatacaaaaacgtacctgggcatggtggtgcgcatctgtgatcccagtgacttgggaagctgaggtgggagaatcacttgaacccaggaggtggaggttgcagtgaaccaggatcacaccactgcactccagtctgggggacagagccaggctccatctcaaaaaataaaaataaaaaggccgggcacagtggctcatgcctgtaatcttagcactttgggaggccgaagtgggtggatcacctgaggtcaggagtttgtgaccatcctggccaacatagtgaaaccccatctctactaaaaatacaaaaaattagtggggcatgatggtgcgcgcctgtaatcccagctactcgggaggctgaggcaggagaatcgcttgaacccagcaggcagaggttccattgagccaagattgtgccactgcactccagcctgggtgacaagagtgaaactctgtctcaagaaaacaaaaatgtatgtgaaaatgcatgtccatgtgcagtatgtatttacatgttagtgattatacatataaaacacctattttcaggtatagaaaaatattgataggatacaaattaatccaaagtgttaagaaagtatctctgtgtgatggggattccattgatttggtttctcctttttgcttatctttatctcctattttctccatgatgaacatgtattaattgtgtagggaaaatcaaaccacagcagggtgagctgccgctggctggagagccgggcgccatctggctggggctgcgccccgtcctgaaaaaaccaaacgtgcaaagggaaccctcacccaacgcaacaaactattgaggatgatctttgtaagaatactgaatgtttcactagggtaacattcttttttttttttttttttttttgagacagagtctcgctctgtctgtcgcccaggctggagtgcagtggtgccatctcagctcactgcaagctctgcctcccgggttcatgccattctcctgcctcagcctcctgagtaggggggactacaggcgcctgccaccacgcctggctaattttttgtatttttattagagacggggtttcaccgtgttagccaggatggtcttgatctcctgacctcatgatccgcccgcctcgacctcccaaagtgctgggattacaggcgtgagccactgtgcctggctcactagggtaacattcttaatatcaaaggaaatcatacaagtccataagaccactaaaaaattcccagtggaaaatggttagagaagctacaaaagattcacaaaagaataagtgagacagttgtcactactatcacgaattgtaaattataaaaagatgcacatggctgggtgcggtggctcatacctgtaatcccagcactttgggaggccgaggcgggtggatctccaggtcaggagttcaaaactagcctgaccaatacactgaaaccccgtctctactaaaaatacaaaaattagtcgggtgtggtggcgggcgcctgtagtcccagctagtcgggaggctgagacaggagaattgcttgaatccaggaggcggagcttgcagtgagccgagattgtgccactgcactcctgcctgggcaagagagtgagactccgtctaaaaaaaaaaaaaaaaaaaaaaaaaaaagacacacatcaccaccttctccttaatgcaggctaatctagacctaatacagacctaaggtcgtgatgacatcctcggtgtcctgcacgctgctcccctcctgggttgggcgcaggcagcgcagctccctcacacagcacctggggcaggacccagagcagctctgcagagtggcttggcagcgtcttgggagatttgcctgggctcatgggtatcccatggcatcctgcaggtgacactggaaatgtcaacagggacacaggtccaggtgtgtgagatatttcaaacagcaacacctacagaaaggaatgtccagtccaggggaaatgacaaaacttgccctggcacatccaccccatgggatgtggaataaccagcaaaacggaacgctgcctcagttttagcaacatggggaaattctcagatatgtgattgtgtgacaaatcagggtgtaaagttgaacacagcatgacctggattcaggaataaaactctcccctcttgactgtggttatcctgagccccaagattaagagggaccttgatgcataaattttaacacttctttctttcccacaatagaatatcatcacaataagccaggacataacttaaatattagaaaagaaaggaaaacacccaggccctaatacagaaatcagccaaggacattcacagacatcagaacagcaattaccgcaacacgtgtcaaccaacactcaacctcagtgctcttcgtgcaggatggatttctggttttgttaggttttgtttgtctttttctttttttttcttttgttttcttgacagggtcttgctctgtcaaccaggctggagtgcagtggtgccatcatggctcactgtaggccagatctcctggactcaaaccatcctcctgcctcagcctctcaaagtgctgggattacaagtgtgaaccactgtgctgggtccctaagggttttaaaaaattatttatttatttagagacaaagtcatggctgggcacagtggctcatgcctgtaatcccagcactttggggggctgaggcaggcggatcatgaagtcaggagttccagaccagcctggccaacatggtgaaaccctgtctctactaaaactgcaaaacttagctgggcacagtggctcatacctgtaatcccagctactcagaaggctgaggcaggagaatcacttgaacccaggaggcggaggttgcagtgagccaagattgcaccactgcactccagcccggacgacagagcaagactccatctcaaaaaaaaaaaaaaaaaaagacagaatctgcctctgtcgtgcccaggctggagtacaatggtgccatctcagctcactgcaacttctgtctcctgggctcaggcaatcctccctcttcagcctcccgagtagctgggaccacaggcatgtaccaccacacctggctaatttttgtatttttgttagagatgctgttttgccatatttcccaggctggtctcaaacacctgggctcaatcaatcctctcacctcagcctcccaaagtgctgggataacaggtgtgagccactgtgcccggcctaattgtttttttgggggggacagagtctcactctatggtccaggctggagtgctgtggtgtgatcataactcactgcagcctcagtcacctgggttcaagcgattctcctgcctcagcctcccaagtagctgaactagaggcacgcaccaccacgcacagctaatttttaaattttttgtagagacagggatctcactttgttgcccaggctggtctcgaactcctgggctcaagctatcctcccacctctgcctcccaaagtgctgggatgacaggcgtgagccactgtcctggcctggcccttgacttctgtggtggaaggtggactggagcctcaccaagtctcactcgagttgcggagaacagacaggaacagggacttgccttctgagcagtctgtctaccagacacatgtcctccatcatactccgcagtgctagggtgggctattcttatccctgttatgcagatgaggaagtagaaacctagagagattgaagcacttgcccaaggccaggcagcaggtgagaaggtgagaaggccatagaagcttgctttctcatttcccctgctgactgctgcatggggggacagggctattgagtacccaggagttattttgatcaaatgtgataagatgacagacacagagacaaccgcctttgaaagaggagtttattactcacagttcccaggaggaggggcacgtggggaagcacccagggccagtcaggacagggagggggtgaagggaaagggtgggcaagagcctttattgccattttccaggcaaggcagaggaggcaagctgagcagaattagaactgggtcatttcagtgggctctgggcttgggggtggtatctagctagctggtacctggccttggggtgatttagggcagggggctagtgttcaggaatgcaggagcctgatgaaaggaggcaggtgggactcatgatggttgctctgcatatcaaaggtatgctcagcctgcacggtggctcaagcctgggatctcagtactttgggaggctggggccaaaggatctcttgagcccagcagtttgagacgacagtgagctatgatcataccactgcactccagcctgggtgacagagtgagaccctgcctcaaaaaaaaaagaaaaaaagaaaaaataaagtaaataaggcatactcagaggcaagtggtcagctgtctctaggaattagctaaccctgggaggggagtccctctctaggtccacgagaccccaagatgtcaaagcaccacagatgagaacacgatggggcttggcacggtggctcacgcctgtaatcccagcactttgggaggccaaggcagatggatcatttgaggtcaggaattcaagacgagcctggccaacatgatggaaccctgactctactaaaaatacaaaaattagctgggcgcagtggcaggtgcctgtaatcctagctacttgggaggctgaggcaggagaattgcttgaacccgggaggtagagattgcggtacatcaagatcgtgccattgcactacagcctgggcgacacagcgagactcagtctcaaaaaaaacccccaaaaaacaggccaggtgtggtggctcatgcctataatcccagcactttgggaggttgaggtgggcagatcacgaggtcaggagatcgaggccatcctggccaacatggtgaaaccccatctctactaaaaatacaaaaaattagccgggcatggtggcatgcacctgtaatcccagctaatcgggaggctgaggcaggagaatcgcttgaacctgggaggcagaggttgcactgagtcgagatggcgccgctgcactccagcctgggggacagagcaagactgtgtctcaaaaacaaaacaaaacaaaacaaaacaaaacaaacccaaaaacaaaagacaccatgaatgaagaaagcctccaggaggggaagtttgcaggtgcctaggcgtgtccttcaaaactctaaccctgctggtcaggtcatttttctcaggccctgagaaaaggaaatccttcctggtctaagtgttacgagcacgttcagttcagattaaagcaattctctcatttcagtgcaacacctacattactttccagctctctggggcccccatgaaggaatgttcctgccccacacccccagcctgggccccgctctgctgctgtgtgctggagtcaggtctaggggcaagcccacagcctctccctgtttacagccagagcggagatcactgcacgtttccagcgtcctctttggcgcggtgcgagtgagggtcctgccttgcagggctgaatgaggagtacagaggaccctgggcacaggaagctggtgctgggtgcccagtgtgggtgctctgagggcactggtgccccttggccgcccttgcttgactctttgagcttgtcagtcagtcctaaatgtttccaagcttcctggggcgcttgcagcatggggcacctaaccggtccccagggcagttctccgcattctccctctaacctggctccattctttatgccttcacatcacgtggggagcgttactccctgcctcagttggttcacactgcaatggcaaaccaccacagtccaagtggcttataaaccactattcatttcacaggacggtgctggcagatgccgtgtctggtgagggccacttcctggttcatagacagtgccctcttcctgcatcctcacatgggggaagcagcagacaagctccctccagccacgttttttcttttttcttgtttcttttttctttgagacaggttctcaatctgtcgcccaggctggagtggagtggtgtgatctcagctcactgcagcctcaactttctgggctcaagcaatcctcctacctcagcctcccaagtagctgggactacagacacatgctaccacaaccggctaagtttttgtagtttttgtagagtcagggttttgccatgttgcttaggctggtctcaaactcctggactcaagcaatcctccctcctcagcctcccaaagtgctgagatcacagatgtgagccactgtgcccagccagccacttttctgagggcattaatcccgctcatgagggaagcagccctcatgacctcatctcccaaaggccccacctctctaaaaccatcgccttggggcaaggacgtcaacatatggactttgggggaacacacatgatatgatttggctctgtgtacccacccagatctcatcttgaattcccacatattgtggagggacctggtgggagggaattgaatcatgggggcaggtctttcccgtgctgttcttgtgattgcgaataagtctcacgagatctgacggttttataagagggagtttccctgcagaagctctctctctccctgctgccatccacgtaagacgtgacttgctcctccttgccttcctccatgattgtgaggcctctgcagccacgtggaactacaggtccaataaacctcttttgtttgttaatcgcccagtctcacgtatgtctttatcagcagtgtgaaaacagactgatacaatgcacattcagaccatagcacccctcctctgcagcccatctgagcaaaggcttagttctggcagcacgcaccttgggccattgcccagtagagcctcacccttttttatattttattttattttattttatttattgtgagatggagtttcactcttgtcgtccaggctgaagtgcaatgacgccatctcgcctcaccacaactcccgcctcccaggttcaagcaattctcctgcctcagcctcccgagtagctggaactacaggcgcccaccatcacacctgctaatttttgtattttttggaaagatgggtttcaccatgttggccaggacggtcttgatctcttgacctcgtgatctgccctcctcagcctcccaaagtgctgggattacagtcctgagccaccgagcctggctgaaaccacaccctttaaacctcttaccgttgtgggtgtggtcttccccaccctctgctcctctggccaatcctgtcctgtacagcctgactgtcctgtactgcctgactgtcctgcaccgctgtggcctgggaggcatgctgccccttgcacctgcaggcacctcacaggctttggtgagggagcacacgaaataacccctctagtctgtcaggtgagagcaaggatccagtggccacatggcctcagattggattctggctttgttacctactggctatgagatttggggctgtcacccctcacatcctcaagggctccctccataaaatggagacaacagtgtctgcaagctagtgttgccataaggatgaaatgtcatcatggacagagagcattttgcatagagatcaataatacatatttgaaaaatccccaacatttagaaacaaaacaatacacttcctaataacccttggatccgggaggaaattaagagtggagacaatcttgagctgaatgaaaatgaaaacacagcacattgaaatgtgcaggattcagctaaagtggtaattacagggagaattatagcaataaaatgcctatttataaaggaaaagagatcttaaatcaatgatttcatctttcaccttaaaaaactaggaaaaggccaggcgcgatggctcacgcccatagtcccagcactttgggagggcgagacaggtggatcacgaggtcaggagatcaagaccatcctggctaacacagtgaaaccctgtctctactaaaaatacaaaaaattagccaggcatggtggtgggcacctgtagtcccagctacttgggaggctgaggcaggagaatggcatgaacccgggaggtggaggttacagtgagccaagatcgcaccactgcattccagcctgggtgacagagcgagactccacctcaaaaaacaaaacaaaacaaaaactagaaaaaggggccgggtgcattggctcacgtgtagaatctcaacactttgggagaccaagacaggtggatcacttgaggtcaggagtttgggaccagcctagccaacatggtgaaaccccatctctactaaaaatacaaaaattagctgggcgtggtggcacatgcctgtaattccagctacttgggaggctgaagtgacagaatcacttgaacctgggaggtggaagttgcagtgagctgagatggcaccactgaactccagcctgggtgttctctatctcaaaaaaaaaaaagaactagagaaagggcggggagcagtggctcatgcctgtaatcccagcactttgggaggacagggcggggagcagtggctcatgcctgtaatcccagcactttgggaagacaaggcgggtggctcacttgagcccaggagttccagaccagcctgggcaaatgaggcaaaaacccatctctacaaaaaatattatctgggtgtggtggcacatgcctgtagttccagctactcgggaggctgaggtgggaggatcacctgagcccaggaggtagagtctgcagtgaggcttgattatgctactgcactccaccttgggtgacagaatgagacactatctcaatttttaaaaaatgaagaaactagaaaaagggaacacattgaaccaaattaagtggaaagaaggatctaacaaaaatgagagcagaaattaatgaaatagggccatgcacggtggctcatgcctgtaatcccagcactttgggaggctgaagtgggcggatcacctgaggtcgggagttcaagactggcctgaccaacatggagaaaccccgtctctactaaaaatacaaaattagccaggtgtggtggtgcatacctgtaatcccagctactcgggaggctgagagaggagaatcgcttaaacccaggaggcagaggttgcagtgagccgatatctcaccactgcactccagcctgggcaacagagcagagactccgtctcaaaaaaaaaaaaaaaagaaagaaaaaaaagagggtggggtcttccgcatttccttttttctcttttttttttttgagacagagtttcactcttgtcacccgtcacccaggctggagtgcaatggcgggatctcagctcactgcaacctccacctctcaggttcaagtggttctcctgtctcagactcgcgagtagctgggattacaggcgcccaccaccaagcctggctaatttttttgtatttttagtggagacggggtttcgccatgttggccaggctggtctcgaactcctcaccttacgtgatccgcctgccttggcctcccaaagtgctgggattacaagcgtgagccactacgcctggttacgcatttctttttaggctcattcctgggtatgtcaccggccctatggcgattgtgaacagcacctgcagatatttgagggcgtgcgcagccagggttcccgctctgggcagggggcacagcgaggtgactcacgggtaaccacaggtggccacgaatgactgctagaaagtgggaattttaggggaacagaaaacggagaatagcggggcgcacggggaggctctggaacctgggcgagcggagcggcggacgccgcaaatgcggagggcggggcagggtggcccctggcgggtgtctccacctctgcggccaggccccccagcgcagctgccctggccccgcccaccactcccagagcccggggttgggtcccaggtcgccctcaggagccaaggccccgcccaccacgctcggccccctcgcctcaagccccgcccacagttcgggtccagacccaggctccgcccccttcccccgcccacagctccagttcccttcgcaggccgtctctccacgggaggccccgccccccaccctcagccccgcatccggctgagtcctcaccccaggcctcgctcgccgctggagaccgcgctcactatccgaggaggaccctcctctgccccgcgtccagctttagtccccgactgcgttcatcgccaagggcccgcccactgccttaggtcgcgtcgccagccttgggtcccgtcgccagccttgggtcccgtccccggctgcactcaccgcgaggccccacccttagctctagtccccggtgtcgcccaccgacgaggccccgccccaaactccagtcccgggctgcgctcaccgccgtggccccgcccccaagcgccagtcctcggctgcgctcaccggtaggccccgctcgggttccgccgaagcccagcccccgcaggtcgcccctccgacgccggcgcgccgcaagggaggccagctcgctcgcagtggggaggtcgcggctccagtcctcgcgtccccgccgtggtcccggtgcctgtcccatcccgcgggcgcggccgttgcgggcggcgcggcccgggcgcgcgcggcgaatctgcggctgcgaatcggctggagcggggcctcgcgagagcggcgaggcctgggcggctgggcctgggcgggcggcgcgggctgctccggaggctcgggtggcttgagagtcttgggaggctccgggcgctgcccgcgcggtcgccggcatgacgggccgcgtgtgccgcggttgcggcggcacggacatcgagctggacgcggcgcgcggggacgcggtgtgcaccgcctgcggctcagtgctggaggacaacatcatcgtgtccgaggtgcagttcgtggagagcagcggcggcggctcctcggccgtgggccagttcgtgtccctggacggtgctggcaaaaccccgactctgggtggcggcttccacgtgaatctggggaaggagtcgagagcgcagaccctgcagaatgggaggcgccacatccaccacctggggaaccagctgcagctgaaccagcactgcctggacaccgccttcaacttcttcaagatggccgtgagcaggcacctgacccgcggccggaagatggcccacgtgattgctgcctgcctctacctggtctgccgtacggagggcacgccgcacatgctcctggacctcagcgacctgctccaggtgaatgtgtacgtgcttggaaagacgtttcttctcttggcaagagagctctgcatcaatgcgccggccatagacccgtgcctgtatattccacgctttgcgcacctgctggaattcggggagaagaaccacgaggtgtccatgactgccctgaggctcctacagaggatgaagcgggactggatgcacacaggccggcgcccctcgggcctctgcggagcagcgctcctggttgcagccagaatgcatgacttcaggaggactgtgaaggaggtcatcagtgtggtcaaagtgtgtgagtccacgctgcggaagaggctcacggaatttgaagacacccccaccagtcagttgaccattgatgagttcatgaagatcgacctggaggaggagtgcgaccccccctcgtacacagctgggcagaggaagctgcggatgaagcagcttgaacaagtcctgtcaaaaaaactggaggaggttgaaggtgaaatatccagttaccaggatgcaattgagattgaactagaaaacagccggccaaaggccaaggggggcctggccagcctggcaaaagatggctccaccgaggacaccgcgtccagcttgtgtggcgaggaggacacagaggacgaggagctggaagccgcggccagccacctgaacaaagacttataccgggagctccttggtggtgcccccggcagctcggaagcagcaggaagccccgagtggggcggcagacctccggccctggggtccctgctggaccccctccccactgcagccagcctgggcatctcagactccatccgcgaatgcatctcctctcagagcagcgaccccaaagatgcttcaggagacggtgagctggacctcagtggcattgatgacctggagattgacaggtacatcctgaatgagtcggaagcccgcgtgaaggccgagctgtggatgagggagaacgccgagtacctgcgggaacagagggaaaaagaagcaagaatagcgaaagagaaggagctcggcatctacaaggaacacaagcccaagaagtcttgcaagcgacgggagccaattcaggccagtaccgccagggaggccatcgagaagatgctggagcagaagaagatctccagcaagatcaattatagcgtgctccggggcctcagcagcgccggcgggggcagtccgcacagggaggatgcacagcccgagcatagcgccagtgccaggaagctgtcacgaaggaggacgccggccagcagaagtggggctgaccctgtgaccagtgtggggaaaaggttgaggcctctggtgtctacgcagccagcaaagaaggtggccacgggagaggctttgctcccaagctctcccaccctcggagctgagcctgccaggccccaggcggtgctggtggagagcgggcccgtgtcataccacgccgacgaggaggctgacgaggaggagcctgacgaggaggacggggagccctgcgtcagtgccctgcagatgatgggcagcaacgactatggctgtgatggcgatgaggacgacggctactgaagtgtggcctccaggcaggtgatgtcctggcagggggcctcgcgggtctcctcagcatcagacgggcttccaggaccgcagcaggcaggccccagcgccgagactcctggtgacaggtggcacctgtcccacagccctcgtcccatgtggaacttaccattgggattgtgtttctattcagcaagggaaaccggaccaagcgtctgcatgtgtgtgatcagatgtgggccgggtgtgtgcagggctgggtcccgctgcctgccgtcgactcatccaaggaccctccaaggctggcagtgtggtgttgctactattaaggaaacaggcttggggcagccccactgctggtccaagtgtgtggagggctgagtgtgctggccctgtgactcaggaccagctctggagtctccagcccaccctccgcaccgtcccctcctgagcagcactcggcgccagcagcctctgccagagtggaagccagagccctgcaggtgtccggcgcagccgtgggagctgaggatctggcacttgagaggcagcagctccttgaaggtcctctgcctccagctgtggccctgcatccagatacctgcctcgtccgaggcagacacccccacccctgcctcctccagacccccctccccgctgcctgcaccgcctggagcagcatgggggtcagacccctgctccagggccacttgagttgtgggcccaggagccctgcggctgccggcaggtgaactgagtgcccgacagctgagaccggcgcccacccgtcctgagcatagctctgtaggcagtgcgggcatagcctgcatagtgtcctggcgctgggagttccccgtggacagagccagagggcagtggcgctccctgtcagagctggatcaggccccccatcgaggagggagggcagacggaggcccgagagcctccccaggcctcttcgtgggaaggccccagtaccactcgtaggaggtctcagctctggcatggctgccccggatgtggccgagggggcttcaccctgtgtccttaggagggggtggccttgaggcagagccgtgcctcactgacccccaggggcctcatcctccccatggaatgggctgtatgtcctgccccaacttggcccgcagcaggccagacccccctacccccgcccagagctcagtagccagcctgggtcctgccagggcttctcgagggcttgggggaagaatagatttagtaaagcaggaagatctgttgttacttaacagaaa

SEQ ID NO: 3711 - DNA, 2876 bp, Homo sapiens
  source 1..2876: mol_type = unassigned DNA
tttcttttcagggctagacattctgatggttgtgaaggaggagcttggggtggtttcatttgcatttccttcaggactggaggtctttgtatatgttcatttacaccaatatgtcgtcttcgccggagtgttcagatctttttccattttttaattgggttgtgttttcttgtgaagttttgggaattcttcatctgttctagatttaagtcctttatcagttacgagatttgcagataagcctgtgggctgtcttcattgtcttaacgatgtctttcaaagggcagttcttaattttttggaaatccgttttatcagtgttttatggattctgcttttagaaccattagaaatgtttgccttatccaaggtcacaaagtttttcttttacgtttttgtctgaaatgtctgtactttaactctccccctaggtctgtgatctgctttgagctaacttccgcgtgcagtgcgaggtgtgggctgaggctcgttctttggcacctgaccgccaggcaccgtgcactgacagccgttctatgggttacctggcagcttggtagcattgttttttgtcacaaaagcgggcaccctggccctctgcctggttaacaggtggattgtgtacacctaggctccaccgaggacaccgcgtccagcttgtgtggcgaggaggacacagaggacgaggagctggaagccgcggccagccacctgaacaaagacttataccgggagctccttggtggtgcccccggcagctcggaagcagcaggaagccccgagtggggcggcagacctccggccctggggtccctgctggaccccctccccactgcagccagcctgggcatctcagactccatccgcgaatgcatctcctctcagagcagcgaccccaatgcttcaggagacggtgagctggacctcagtggcattgatgacctggagattgacaggtacatcctgaatgagtcggaagcccgcgtgaaggccgagctgtggatgagggagaacgccgagtacctgcgggaacagagggaaaaagaagcaagaatagcgaaagagaaggagctcggcatctacaaggaacacaagcccaagaagtcttgcaagcgacgggagccaattcaggccagtaccgccagggaggccatcgagaagatgctggagcagaagaagatctccagcaagatcaattatagcgtgctccggggcctcagcagcgccggcgggggcagtccgcacagggaggatgcacagcccgagcatagcgccagtgccaggaagctgtcacgaaggaggacgccggccagcagaagtggggctgaccctgtgaccagtgtggggaaaaggttgaggcctctggtgtctacgcagccagcaaagaaggtggccacgggagaggctttgctcccaagctctcccaccctcggagctgagcctgccaggccccaggcggtgctggtggagagcgggcccgtgtcataccacgccgacgaggaggctgacgaggaggagcctgacgaggaggacggggagccctgcgtcagtgccctgcagatgatgggcagcaacgactatggctgtgatggcgatgaggacgacggctactgaagtgtggcctccaggcaggtgatgtcctggcagggggcctcgcgggtctcctcagcatcagacgggcttccaggaccgcagcaggcaggccccagcgccgagactcctggtgacaggtggcacctgtcccacagccctcgtcccatgtggaacttaccattgggattgtgtttctattcagcaagggaaaccggaccaagcgtctgcatgtgtgtgatcagatgtgggccgggtgtgtgcagggctgggtcccgctgcctgccgtcgactcatccaaggaccctccaaggctggcagtgtggtgttgctactattaaggaaacaggcttggggcagccccactgctggtccaagtgtgtggagggctgagtgtgctggccctgtgactcaggaccagctctggagtctccagcccaccctccgcaccgtcccctcctgagcagcactcggcgccagcagcctctgccagagtggaagccagagccctgcaggtgtccggcgcagccgtgggagctgaggatctggcacttgagaggcagcagctccttgaaggtcctctgcctccagctgtggccctgcatccagatacctgcctcgtccgaggcagacacccccacccctgcctcctccagacccccctccccgctgcctgcaccgcctggagcagcatgggggtcagacccctgctccagggccacttgagttgtgggcccaggagccctgcggctgccggcaggtgaactgagtgcccgacagctgagaccggcgcccacccgtcctgagcatagctctgtaggcagtgcgggcatagcctgcatagtgtcctggcgctgggagttccccgtggacagagccagagggcagtggcgctccctgtcagagctggatcaggccccccatcgaggagggagggcagacggaggcccgagagcctccccaggcctcttcgtgggaaggccccagtaccactcgtaggaggtctcagctctggcatggctgccccggatgtggccgagggggcttcaccctgtgtccttaggagggggtggccttgaggcagagccgtgcctcactgacccccaggggcctcatcctccccatggaatgggctgtatgtcctgccccaacttggcccgcagcaggccagacccccctacccccgcccagagctcagtagccagcctgggtcctgccagggcttctcgagggcttgggggaagaatagatttagtaaagcaggaagatctgttgttacttaacag

SEQ ID NO: 3712 - DNA, 1970 bp, Homo sapiens
  source 1..1970: mol_type = unassigned DNA
gcaccaccacgccctgcaaattttgtatttttagtaaagatggggtttctccatgttggtcaggccggtctcgaactgcggacctcaggtgatccgcccgcctcggcccccaaagtgctgggattagaggtgtgagccaccgcgcccagcctatgagcatattttttatcgttctctttatttctagctgcgatgattgtatcttattgaaaatcattaaaaatcttagcaattgttttaaattatctaatttttttctccaaataatatctattttagcagccaaatcaccacaaatcattggtttttatctttagttgtgggtgcacagcgggtgcgtgtattttggggcatgtgaggtgtcttgatgcgttcatgcagtgtgtaacagtcacatcagggtaaatgggacatctttcacctcaagcatttatccttcgtgttatggacaccctcagctggaaaggggggctgcgtcgtgagtatgaatggatgcaagtcatagccacctgagcctggtggggcacagcagggccctgtggagtcacatcccggcctcatgctcggcataggggagcgctgcttaggtccatgcagtcgctcagggcccaggctgtgcagcgcccagcctgtcctgctccaggcactcccccgtggcactgtgccgtgctggcagaggtgcacagcgccaggcctcagtgtgcacacacagcccccgtggcaccgccatgctggtagagatgccagaagtgggccctcctctcacccatgagtgtcagctgatgccggccggctggcgacttgtgtacccagcccacgcctgtcttgctctaagagtccccggaccgttgttgcgtgtggtgctgtctgcatggtctggagggaaggctgctgggtgtgcgcccctctgtgtcctgagcagggcggccatgcagtaggagcacgctgcctggccctagcgtgtctgcagcaggctggctggcagcaggtggccagtggctctcctgggttcggtgcgatggctgccctagctgagggtcagagaggctttgtccaggggaggggaactggtggggggcctgggggcctggaaagacaagtgcaggttgccccacccctgggctgcgtgggccgcctgtgcacgtgccatggcacatggaggtgggcactgaggtgctgtgtctgccgcagacccgtgcctgtatattccacgctttgcgcacctgctggaattcggggagaagaaccacgaggtgtccatgactgccctgaggctcctacagaggatgaagcgggactggatgcacacaggccggcgcccctcgggcctctgcggagcagcgctcctggttgcagccagaatgcatgacttcaggaggactgtgaaggaggtcatcagtgtggtcaaagtgtgtgagtccacgctgcggaagaggctcacggaatttgaagacacccccaccagtcagttgaccattgatgagttcatgaagatcgacctggaggaggagtgcgaccccccctcgtacacagctgggcagaggaagctgcggatgaagcagcttgaacaagtcctgtcaaaaaaactggaggaggttgaaggtgaaatatccagttaccaggatgcaattgagattgaactagaaaacagccggccaaaggccaaggggggcctggccagcctggcaaaagatggctccaccgaggacaccgcgtccagcttgtgtggcgaggaggacacagaggacgaggagctggaagccgcggccagccacctgaacaaagacttataccgggagctccttggtggtgcccccggcagctcggaagcagcaggaagccccgagtggggcggcagacctccggccctggggtccctgctggaccccctccccactgcagccagcctgggcatctcagactccatccgcgaatgcatctcctctcagagcagcgaccccagtgagttc

SEQ ID NO: 3713 - DNA, 1040 bp, Homo sapiens
  source 1..1040: mol_type = unassigned DNA
gcggccgcggcgctggcgggagcgtagagttccgccgccatcttcgcgggcggggcggcgggggcagcctcggcgcctgtggacgccgcgccccgcgccctcgcgccgcgccggggcctcgggagcggctctgcaagcaaaagcaaggaggtcaggcactgagcgacgcggccgtgcaggcaggctaggggcagcagcatgggcggcggcggcgctgtgacccgcggggctgccacccgctcccctgccacccccgcccctgcgaccctgcccgagcccagcctagcgcagcccggccaggcccggccgcggggggcgccgtcccgcccgcccgcccgcccgagcccgtacccgccgcggcgccggtgcgtcacgctgcgtcagggccgcgccccgcgcgacgtcgctgcctcgcggccccgcccccaggcccgacatcctcgaagctgctcgagcttctgcccagcaaccggcgcgagccgcgcgctgtgcagaggtagccgtggaaggcggctcccggcgctggcaggcggccgcccccagacccgcagtgccatgcgcaggtgcttgcgcccgttcttcagttagcgatcttttggttaggaacgcaggtggacctgcttgtttggccatttgcattccggagtctgcctctggccgcggcctgtgggatggtcgttgggcttcctcgttcgttcagatgcttcgcgatttagcttgctacggacgccagcagccagcgcttgcagagagcgcggtccactctgctctgagggctttacaggggcaggcgctgctatttcccggcattttcctcgaggaaataggcacagagagacccgtgcctgtatattccacgctttgcgcacctgctggaattcggggagaagaaccacgaggtgtccatgactgccctgaggctcctacagaggatgaagcgggactggatgcacacaggccggcgcccctcgggcctctgcggagcagcgctcctggttgcagccagaatgcatgacttcaggaggactgtgaaggaggtc

SEQ ID NO: 3714 - DNA, 1362 bp, Homo sapiens
  source 1..1362: mol_type = unassigned DNA
acgctgcgtcagggccgcgccccgcgcgacgtcgctgcctcgcggccccgcccccaggcccgacatcctcgaagctgctcgagcttctgcccagcaaccggcgcgagccgcgcgctgtgcagaggtagccgtggaaggcggctcccggcgctggcaggcggccgcccccagacccgcagtgccatgcgcaggtgcttgcgcccgttcttcagttagcgatcttttggttaggaacgcaggtggacctgcttgtttggccatttgcattccggagtctgcctctggccgcggcctgtgggatggtcgttgggcttcctcgttcgttcagatgcttcgcgatttagcttgctacggacgccagcagccagcgcttgcagagagcgcggtccactctgctctgagggctttacaggggcaggcgctgctatttcccggcattttcctcgaggaaataggcacagagaggttagtcgcgcgctgaaggtcacacagccggcgggtgggcaagtcaggatctggccctgggcctgcagccctggagcttgggccccagggcgcgccctgcctctgtggctctgcctgtggatcgcagtcgcaggctcgctccttgtggggcctctagcctcccggcctggggctaatcctgggaggtgcgtggcatggggcactggctttgctgatgaggagaccagacttcagaggccgtgtcacctggcctgggccgcacagctggtgcatgccaagctcgcgtgcagacgaagctccagaggcctggctgtcaggagggttcctccccgaggacacacacgcaacctcctggaccgccaggctttagacttttaaaacttccatatgcaggaaaccccacaggacgcagccagcatctcgggtcatgggtgcacctgtcaccgcagtcctgggctaaacagtgaacaggagctctgtgtctctgtggtcgttacagttgtagtgaatgttccctgggagagtcctcttcagaagatatttgcggtattttcaacaaaggactctccaggatggaggagcaactacaagtcaggaaggaaaaggctgacaacccagttttttaaaaaacgggcaaaggacgtgaacagacaccatgcaatggcccagagtgcacaaatcatcatttctcccaggaatggggtgcccgagcccccaggcggctgaacttgagacttgtcacgtagtgttggtggaatgcagagcagctggagatcacctgctgcagacccgtgcctgtatattccacgctttgcgcacctgctggaattcggggagaagaaccacgaggtgtccatgactgccctgaggctcctacagaggatgaagcgggactgg

SEQ ID NO: 3715 - DNA, 778 bp, Homo sapiens
  source 1..778: mol_type = unassigned DNA
atagaagacggagctgccgacagccaagacgtactgggaggagaaagcgccgccgtgagcctggctctcccgcaggctgcgtgtcagccacacggcggacggggcggacggggcacgcgttccgagaggggccgccgctacccaccttgtgggcgggcaccgtcctggtcgcccccgggggccccacgacgaagtgcacgtcggccatgagctcgttgttgaacatgagcgcgttcctgcaaagacccgtgcctgtatattccacgctttgcgcacctgctggaattcggggagaagaaccacgaggtgtccatgactgccctgaggctcctacagaggatgaagcgggactggatgcacacaggccggcgcccctcgggcctctgcggagcagcgctcctggttgcagccagaatgcatgacttcaggaggactgtgaaggaggtcatcagtgtggtcaaagtgtgtgagtccacgctgcggaagaggctcacggaatttgaagacacccccaccagtcagttgaccattgatgagttcatgaagatcgacctggaggaggagtgcgaccccccctcgtacacagctgggcagaggaagctgcggatgaagcagcttgaacaagtcctgtcaaaaaaactggaggaggttgaaggtgaaatatccagttaccaggatgcaattgagattgaactagaaaacagccggccaaaggccaaggggggcctggccagcctggcaaaagatggctccaccgaggacaccgcgtccagcttgt

SEQ ID NO: 3716 - DNA, 2603 bp, Homo sapiens
  source 1..2603: mol_type = unassigned DNA
tggccggaagacgggggtgcaaccctttgaagtgtcccctcctacttcttgctgcctcacggttgctgttgcagacccaggagtctctgaaggcttccgcggctttggggccggttgtgagatgccaggcagaggccgctgcccggactgcggctccacggagctggtggaagactcgcactattcgcagagccagctggtgtgctccgactgcggctgcgtggtcaccgagggggtccttaccactaccttcagcgacgagggcaatctccgagaggtaacatattcccgaagcacaggggaaaacgaacaagttagtcgcagccagcaacgaggtctccggcgagtgagagacctttgtcgagttctgcagttgccaccaacatttgaggataccgcggttgcctactaccaacaggcatatcggcactctggcatccgagcggccaggctgcaaaagaaggaggtgttggttgggtgctgcgtcttaatcacctgccgacagcataactggcccctaacaatgggggccatctgcacgctgttgtatgcagatttggatgtgttttctagcacttacatgcagatagtgaagctcctgggactggatgtgccatctctgtgcttggcagaactggtgaagacctattgcagcagcttcaaactgttccaagcttcaccttctgtgccagccaaatacgtggaagacaaagagaagatgctgtctcgaacaatgcagttggtggagctggcaaatgagacgtggctggtgaccgggaggcatcccttgcccgtcatcactgctgcgactttcctggcttggcagtcgctgcagcctgcagatcggctttcatgttcccttgcccgattttgtaaattggcaaatgtggacctgccctacccggcgtcctcccgcctgcaggagctgctggctgtgctgctgcggatggctgagcagctggcctggttacgagttctgagacttgacaaacggtctgtggtgaagcacatcggtgaccttctccagcaccgccagtcactggtccgctctgcctttcgggatgggacagcagaagtggagacccgagagaaggagccaccggggtggggacaggggcaaggagaaggggaggtgggaaataattccttaggtttaccccaggggaagcggccggccagtcctgcccttctcttgccaccctgcatgttgaagtccccgaagcggatctgccctgtaccccctgtctccactgtcactggagatgagaacatttctgatagtgaaatagaacagtatttgcgtacccctcaggaagttagggactttcagagagcccaggctgctagacaggctgccacgagtgtccctaaccctccctgatggatatccactgggagcacttcatcctgttctgacagcttgataacattcctgttataaccaaggatggaagtgtacaccagtccgtaggtattgcttttcttgtttgaaggaaccaagaggggctctgccattagttggaccctgggtcctggagtaaagtcaggagtgcagggatgactataggtaggagagattcccatcccttggtgtgggagagcaagttgcctatgtccatgttctgtgagatggctttcctcatagatggatgggaaaatgtcaggctctttgctgctggtttgaattggacacactgctgcggctcctcctgcaggcctgagggggcttccctctgcttgtggagtggttggcattcccagcagtatcaaccctcagaggagcgggaactggggaattctggccctacgtgcattcacaggcaatgatgggtttgtgtgtatggtgtcatgagatcctctacctcataacaaaaggacagtgggtagactaaggcagtagctcaaagggctttgcaaaattttaatatattaaaacaagaggcatctgctagaaaacattctattgtataaaacccgagttcttaaaaacatgttttctttggcactttcattccctccctcccctttccccagcatattgcaaaaagctctccagtgctaaggcattggcagggtgtgtaaacagcagccagcatatgtggaagaataatacaaagcttttttttttcttctaatatgtctgtgcagcaagcataaataacaggacccattccaaggagtgtgtgtgggttttccccctcccctgtgtcctctgtcaccttggtgatgaggccagagtgatgtgaagactgggagggaaccctaggtcagaccttggtttcctgttgttcttcccaagacccagggttccctcggtttccatttggtcctgtagtgaaatgctggtggttggttttaggttggggaaaagacgggtgctggtgtttaaaaggagtaaaggcataggcccctcatgacctgcagggaccccagccactgcctctgggcttggcttgagctcctgggagtcgggaagctggtttgacattttgtaggtttctctctactgtggagctggagatcaaatgattgggatggttcttcctctggccttacggaggcaaggaagtgctcttccttagtcccgtggtgttgtaaggctg

SEQ ID NO: 3717 - DNA, 1410 bp, Homo sapiens
  source 1..1410: mol_type = unassigned DNA
ctcccagcggagggaaccgcctatgcctccgtcgcgctggccggaagacgggggtgcaaccctttgaagtgtcccctcctacttcttgctgcctcacggttgctgttgcagacccaggagtctctgaaggcttccgcggctttggggccggttgtgagatgccaggcagaggccgctgcccggactgcgtggtcaccgagggggtccttaccactaccttcagcgacgagggcaatctccgagaggtaacatattcccgaagcacaggggaaaacgaacaagttagtcgcagccagcaacgaggtctccggcgagtgagagacctttgtcgagttctgcagttgccaccaacatttgaggataccgcggttgcctactaccaacaggcatatcggcactctggcatccgagcggccaggctgcaaaagaaggaggtgttggttgggtgctgcgtcttaatcacctgccgacagcataactggcccctaacaatgggggccatctgcacgctgttgtatgcagatttggatgtgttttctagcacttacatgcagatagtgaagctcctgggactggatgtgccatctctgtgcttggcagaactggtgaagacctattgcagcagcttcaaactgttccaagcttcaccttctgtgccagccaaatacgtggaagacaaagagaagatgctgtctcgaacaatgcagttggtggagctggcaaatgagacgtggctggtgaccgggaggcatcccttgcccgtcatcactgctgcgactttcctggcttggcagtcgctgcagcctgcagatcggctttcatgttcccttgcccgattttgtaaattggcaaatgtggacctgccctacccggcgtcctcccgcctgcaggagctgctggctgtgctgctgcggatggctgagcagctggcctggttacgagttctgagacttgacaaacggtctgtggtgaagcacatcggtgaccttctccagcaccgccagtcactggtccgctctgcctttcgggatgggacagcagaagtggagacccgagagaaggagccaccggggtggggacaggggcaaggagaaggggaggtgggaaataattccttaggtttaccccaggggaagcggccggccagtcctgcccttctcttgccaccctgcatgttgaagtccccgaagcggatctgccctgtaccccctgtctccactgtcactggagatgagaacatttctgatagtgaaatagaacagtatttgcgtacccctcaggaagttagggactttcagagagcccaggctgctagacaggctgccacgagtgtccctaaccctccctgatggatatccactgggagcacttcatcctgttctgacagcttgataacattcctgttataac

SEQ ID NO: 3718 - DNA, 2210 bp, Homo sapiens
  source 1..2210: mol_type = unassigned DNA
agaaaaccacagggcgcggggccagggcggcggcccccagggagttggcaggatggcagagggcaaggcaggcggcgcggccggcctcttcgccaagcaggtgcagaagaagtttagcagggcccaggagaaggtgctgcagaaattggggaaagctgtagaaaccaaagatgaacgatttgaacaaagcgctagcaacttctaccaacaacaggcagaaggccacaagctgtacaaggacctgaagaacttccttagtgcagtcaaagtgatgcatgaaagttcaaaaagagtgtcagaaaccctgcaggagatctacagcagcgagtgggacggtcatgaggagctgaaggccatcgtatggaataatgatctcctttgggaagactacgaggagaaactggctgaccaggctgtaaggaccatggaaatctatgttgcccagttcagtgaaattaaggagagaattgccaagcggggtcggaaactcgtggactatgacagtgcccgacaccacctggaggcagtgcagaatgccaagaagaaagatgaggccaagactgccaaggcagaggaagagttcaacaaagcccagactgtgtttgaagatctgaaccaagaactactagaggagctgcctattctttataatagtcgtattggctgctatgtgaccatcttccaaaacatttccaacttgagggatgtcttctacagggaaatgagcaagctgaaccacaatctctacgaggtgatgagcaaactggagaagcaacattccaataaagtctttgtggtgaagggactgtcaagcagcagcaggcgctctttagtcatttctcccccagttcgaacagctacagtctccagtcctcttacctcacctactagtccctctacactttccttgaagagtgagagtgaatctgtctcagcaactgaagatctggcacctgatgcagcccaaggggaagacaattctgagatcaaggagctcttagaagaggaggaaatagagaaggaaggatctgaagcaagctcctctgaggaagatgagcctctaccagcctgcaatggccccgcccaggcccagccctctcctaccactgaaagggccaagtcccaggaggaagttctccccagctccacaactccatcaccaggcggagccctgagcccttcagggcagccttcatcatctgccacagaagtagtcctccgaacccgcaccgcaagtgaaggatctgaacaaccaaagaagagagcctctatccagaggacctcagcaccccctagtaggcctcctccacccagagccactgcaagccccaggccctcctcagggaacataccttccagccctacagcctctggagggggttcacccaccagccctagggcctccttggggactgggactgcaagtcctaggacctccctagaggtctctcctaatccagaaccaccagagaagccagtaagaactcctgaggccaaagaaaatgaaaacatccacaatcagaaccctgaagaactttgtacttcccccaccttaatgacatctcaggttgcttcagagcctggagaggcaaagaagatggaagacaaggaaaaggataataagcttatctcagctaactcctcggagggccaagaccagcttcaagtctccatggtaccagaaaacaacaacctcacagcacctgaacctcaagaagaggtatccacaagtgaaaatccacaactctgaagagaaactaccaagactcctcctgccccaaacctcgccagagaagctcttcaaccagagggtataggtcagagggatataagagccagcatccatccctgggttctcagtaggaatgctggtgctgtctaaagacctggcattaatggaggcggaggagcagccttacgggagggatggagggaggcaggctggggagaagagaacattagactcagggaatatttaattctggttttagcattattagaataagactttatacattaactaaagtggagctttaatcactataaaaagcaaaagtatctatagacacagacacttgcctatacagagacataaccacacacactcagaggatagtgaacaaatctgtctttgacttacgacccattttgcaagacttaaagccggaagaacacattttcagattgttaaataaagtctgattctgact

SEQ ID NO: 3719 - DNA, 2124 bp, Homo sapiens
  source 1..2124: mol_type = unassigned DNA
cgggggcctcagaaaaccacagggcgcggggccagggcggcggcccccagggagttggcaggatggcagagggcaaggcaggcggcgcggccggcctcttcgccaagcaggtgcagaagaagtttagcagggcccaggagaaggtgctgcagaaattggggaaagctgtagaaaccaaagatgaacgatttgaacaaagcgctagcaacttctaccaacaacaggcagaaggccacaagctgtacaaggacctgaagaacttccttagtgcagtcaaagtgatgcatgaaagttcaaaaagagtgtcagaaaccctgcaggagatctacagcagcgagtgggacggtcatgaggagctgaaggccatcgtatgggagagaattgccaagcggggtcggaaactcgtggactatgacagtgcccgacaccacctggaggcagtgcagaatgccaagaagaaagatgaggccaagactgccaaggcagaggaagagttcaacaaagcccagactgtgtttgaagatctgaaccaagaactactagaggagctgcctattctttataatagtcgtattggctgctatgtgaccatcttccaaaacatttccaacttgagggatgtcttctacagggaaatgagcaagctgaaccacaatctctacgaggtgatgagcaaactggagaagcaacattccaataaagtctttgtggtgaagggactgtcaagcagcagcaggcgctctttagtcatttctcccccagttcgaacagctacagtctccagtcctcttacctcacctactagtccctctacactttccttgaagagtgagagtgaatctgtctcagcaactgaagatctggcacctgatgcagcccaaggggaagacaattctgagatcaaggagctcttagaagaggaggaaatagagaaggaaggatctgaagcaagctcctctgaggaagatgagcctctaccagcctgcaatggccccgcccaggcccagccctctcctaccactgaaagggccaagtcccaggaggaagttctccccagctccacaactccatcaccaggcggagccctgagcccttcagggcagccttcatcatctgccacagaagtagtcctccgaacccgcaccgcaagtgaaggatctgaacaaccaaagaagagagcctctatccagaggacctcagcaccccctagtaggcctcctccacccagagccactgcaagccccaggccctcctcagggaacataccttccagccctacagcctctggagggggttcacccaccagccctagggcctccttggggactgggactgcaagtcctaggacctccctagaggtctctcctaatccagaaccaccagagaagccagtaagaactcctgaggccaaagaaaatgaaaacatccacaatcagaaccctgaagaactttgtacttcccccaccttaatgacatctcaggttgcttcagagcctggagaggcaaagaagatggaagacaaggaaaaggataataagcttatctcagctaactcctcggagggccaagaccagcttcaagtctccatggtaccagaaaacaacaacctcacagcacctgaacctcaagaagaggtatccacaagtgaaaatccacaactctgaagagaaactaccaagactcctcctgccccaaacctcgccagagaagctcttcaaccagagggtataggtcagagggatataagagccagcatccatccctgggttctcagtaggaatgctggtgctgtctaaagacctggcattaatggaggcggaggagcagccttacgggagggatggagggaggcaggctggggagaagagaacattagactcagggaatatttaattctggttttagcattattagaataagactttatacattaactaaagtggagctttaatcactataaaaagcaaaagtatctatagacacagacacttgcctatacagagacataaccacacacactcagaggatagtgaacaaatctgtctttgacttacgacccattttgcaagacttaaagccggaagaacacattttcagattgttaaataaagtctgattctgact

SEQ ID NO: 3720 - DNA, 1990 bp, Homo sapiens
  source 1..1990: mol_type = unassigned DNA
ctgtttctctctttcaagcccggctcgggtgtcctgcctgctttctgcactctatccctaccagttccaggcttagagcctacctggagcaagaaacgcagtgtacatggcggcttcgcatgcatactcagagaacctaaacgtgttttcgatatggtgctgcagaaattggggaaagctgtagaaaccaaagatgaacgatttgaacaaagcgctagcaacttctaccaacaacaggcagaaggccacaagctgtacaaggacctgaagaacttccttagtgcagtcaaagtgatgcatgaaagttcaaaaagagtgtcagaaaccctgcaggagatctacagcagcgagtgggacggtcatgaggagctgaaggccatcgtatggaataatgatctcctttgggaagactacgaggagaaactggctgaccaggctgtaaggaccatggaaatctatgttgcccagttcagtgaaattaaggagagaattgccaagcggggtcggaaactcgtggactatgacagtgcccgacaccacctggaggcagtgcagaatgccaagaagaaagatgaggccaagactgccaaggcagaggaagagttcaacaaagcccagactgtgtttgaagatctgaaccaagaactactagaggagctgcctattctttataatagtcgtattggctgctatgtgaccatcttccaaaacatttccaacttgagggatgtcttctacagggaaatgagcaagctgaaccacaatctctacgaggtgatgagcaaactggagaagcaacattccaataaagtctttgtggtgaagggactgtcaagcagcagcaggcgctctttagtcatttctcccccagttcgaacagctacagtctccagtcctcttacctcacctactagtccctctacactttccttgaagagtgagagtgaatctgtctcagcaactgaagatctggcacctgatgcagcccaaggggaagacaattctgagatcaaggagctcttagaagaggaggaaatagagaaggaaggatctgaagcaagctcctctgaggaagatgagcctctaccagcctgcaatggccccgcccaggcccagccctctcctaccactgaaagggccaagtcccaggaggaagttctccccagctccacaactccatcaccaggcggagccctgagcccttcagggcagccttcatcatctgccacagaagtagtcctccgaacccgcaccgcaagtgaaggatctgaacaaccaaagaagagagcctctatccagaggacctcagcaccccctagtaggcctcctccacccagagccactgcaagccccaggccctcctcagggaacataccttccagccctacagcctctggagggggttcacccaccagccctagggcctccttggggactgggactgcaagtcctaggacctccctagaggtctctcctaatccagaaccaccagagaagccagtaagaactcctgaggccaaagaaaatgaaaacatccacaatcagaaccctgaagaactttgtacttcccccaccttaatgacatctcaggttgcttcagagcctggagaggcaaagaagatggaagacaaggaaaaggataataagcttatctcagctaactcctcggagggccaagaccagcttcaagtctccatggtaccagaaaacaacaacctcacagcacctgaacctcaagaagaggtatccacaagtgaaaatccacaactctgaagagaaactaccaagactcctcctgccccaaacctcgccagagaagctcttcaaccagagggtataggtcagagggatataagagccagcatccatccctgggttctcagtaggaatgctggtgctgtctaaagacctggcattaatggaggcggaggagcagccttacgggagggatggagggaggcaggctggggagaagagaacattagactca

SEQ ID NO: 3721 - DNA, 1835 bp, Homo sapiens
  source 1..1835: mol_type = unassigned DNA
aatccggaagtgaccctagagaaacgagttgtggctgaggaccccggcggcagacgcaggttcgggaccatgagctggattccttttaagattgggcagcccaagaaacagattgtgcccaaaacagtggagagagactttgaaagggagtatggaaaacttcagcagctggaagagcagacccggaggctgcagaaagacatgaagaagagcaccgacgcagacctggccatgtcaaaatctgccgtgaagatatccttggacttactctccaatcccctctgtgagcaagaccaggaccttctgaacatggtgacggccctggacacggccatgaagcggatggatgccttcaatcaggaaaaggtgaaccagatccagaagactgtgatcgagcccttaaaaaagttcggcagtgtcttcccgagcctcaacatggctgtgaagaggcgggaacaggccttgcaggactacaggaggctgcaggccaaggtggagaagtatgaggaaaaggagaagacggggccagtgctggccaagctccaccaggcacgagaggagctgcggcctgtgcgggaggactttgaagccaagaacaggcagctgctggaggagatgccgcgcttctacggcagccgcctcgactacttccagcccagctttgagtccctcatccgagctcaggttgtgtactactcggaaatgcacaagatctttggagacctgtcccatcagcttgaccagccaggccactccgatgagcagcgggagcgggagaacgaggccaaactcagtgagctccgggccctctccattgtggccgatgactgaatccccgtcactcttggaggactcctgtgacgtggtcagcctcattcatccttgcccttctcagggctagctgctcctctcacaggctggggacagaggtggccctggttcacttgccggccctttgcaatgaatgactcttcctgagcctggcaccaggagccctaggcaggccgccgtctccccactcacagccccagcaggtaagcagtgtagacaaacccttggggcttttttatttggagaaccgtccagcatgcatcctggcccacggcctgagcaagctgcagcccttctgaggccatgggcttcgttggctaagttgggggtcttagccttgcatgcgttgtgggcatcaaatctacctccaaaagacccatcctggggagccctctggcccctcgttgccttttcacttcaaaacctcttttttctgggagaggccctgaaccctgtgcgggagagctggtcctccagccctggcaggccctcagccagcttcccagcaagacaaagggcacccttgtggctttgggacctaagtggttggggttcccgaggtcactgaggactggtacctcgggaacgcaagctgtcagtggaactgtcccacaagaattcacaggtctcaaagcaggaacagtgggtttgtgtctcacctgagtatctggaattttattttttcaagtaaaattttcaatgaaacgtccacatagtattgtgctgtaacttaggcgagcagaggaaaccccttcctgggcctgctgccctccacggagcagcagcaccctccagcaggcagcccagcatgccaggggtgtgtgcgcacctccccggccctggcccaccttctggagcgaactgcaccgtggtccagcagaggcgctgggtgggagggcacgcgggcaagcctaggagagtaggaagagctgtggaggacacactctcagtttgtttttgactttggtttatttaaaaaacaagccaaaaaaaaaaaaaaaaaa

SEQ ID NO: 3722 - DNA, 1431 bp, Homo sapiens
  source 1..1431: mol_type = unassigned DNA
aagtgaccctagagaaacgagttgtggctgaggaccccggcggcagacgcaggttcgggaccatgagctggattccttttaagattgggcagcccaagaaacagattgtgcccaaaacaccatgtcaaaatctgccgtgaagatatccttggacttactctccaatcccctctgtgagcaagaccaggaccttctgaacatggtgacggccctggacacggccatgaagcggatggatgccttcaatcaggaaaaggtgaaccagatccagaagactgtgatcgagcccttaaaaaagttcggcagtgtcttcccgagcctcaacatggctgtgaagaggcgggaacaggccttgcaggactacaggaggctgcaggccaaggtggagaagtatgaggaaaaggagaagacggggccagtgctggccaagctccaccaggcacgagaggagctgcggcctgtgcgggaggactttgaagccaagaacaggcagctgctggaggagatgccgcgcttctacggcagccgcctcgactacttccagcccagctttgagtccctcatccgagctcaggttgtgtactactcggaaatgcacaagatctttggagacctgtcccatcagcttgaccagccaggccactccgatgagcagcgggagcgggagaacgaggccaaactcagtgagctccgggccctctccattgtggccgatgactgaatccccgtcactcttggaggactcctgtgacgtggtcagcctcattcatccttgcccttctcagggctagctgctcctctcacaggctggggacagaggtggccctggttcacttgccggccctttgcaatgaatgactcttcctgagcctggcaccaggagccctaggcaggccgccgtctccccactcacagccccagcaggtaagcagtgtagacaaacccttggggcttttttatttggagaaccgtccagcatgcatcctggcccacggcctgagcaagctgcagcccttctgaggccatgggcttcgttggctaagttgggggtcttagccttgcatgcgttgtgggcatcaaatctacctccaaaagacccatcctggggagccctctggcccctcgttgccttttcacttcaaaacctcttttttctgggagaggccctgaaccctgtgcgggagagctggtcctccagccctggcaggccctcagccagcttcccagcaagacaaagggcacccttgtggctttgggacctaagtggttggggttcccgaggtcactgaggactggtacctcgggaacgcaagctgtcagtggaactgtcccacaagaattcacaggtctcaaagcaggaacagtgggtttgtgtctcacctgagtatctggaattttattttttcaagtaaaattttcaatgaaacgtcc

SEQ ID NO: 3723 - DNA, 4526 bp, Homo sapiens
  source 1..4526: mol_type = unassigned DNA
cagcccggccggggcctgcgggcgcccagagccgcgccgtccgcgccgcccgttctggttggaagtactccatgacacacactcggagaaagtcccttcccatgctgagttcgggcctcactggccgccgagagcccctgcagatggaagacagcaacatggagcagggggttgagggtgtggagccaggcatgcccgagagcccaggtcacctcacagggcgccgcaagaattacccacttcgtaagcgcccattggttcctgagaagcccaaggcctgcaaagtgctgctgactcgcctggagaatgtggccggtccccggagtgcagatgaggctgatgagctaccgcctgacctgcccaagccccccagcccggccccatccagtgaagaccctggccttgcccagccccgcaagcggcgcctggcctccctcaatgctgaagctctcaataacctgctgctggagcgagaggacaccagcagcctggcaggcacccgccgcagtcgagcaggggatccccaccgcagccgtgaccgtgatcgtgctactgggggctggtcctcctccaagaagcggccccggctgggggaccttggaggaggaagtcgggacctgtctccagagccagcacccgatgaaggtccccgccgagatggagacccagctcccaagagactggctagcctgaacgcagctgctttcctaaaactgagccaggagcgggagctacccctgcggctgcctcgtgcccatgcagaagtagatgggcgctccactgagcccccagcacccaaggccccgaggccaaagtggcccaaggtcaatggcaagaactatcccaaggcttggcagggggccagctctggggaggctgcaggcccacctggctggcaaggctgccctgatgaaccatggccatctgcaactccttgtgggccatccgtccagccatctcatcagcccctgagcaaggctctggagagccctttggggctgcgccctcacctgcccctgctgatgggtggacaggcggctctgaagccggagcctgggcgcccaggcgaggagtcacctgcccctaagcaggaactgcatcagccctctttccccacacctcagctgtcgccgctgccgatgcctggcaaccccgccgactacaatggcctgtgtgttgggcctgagctcactgcactaggcagcttctacctgtactgtggccaagaggggctgcagtgtgggggctactcgccctgccccatgcttcctgagggcaagctgtccccagtggctgcacctcacgaggaggggctcctcttagctccgagctcagtgccctcaggcacccctttccagcaccctccctggggctcctctcgctactgctctagcgaggacactggagtgaatggctacagcatctgcggagtgttgcccctgtctgttacccacgctggcactacctgtggcggctgcccatacaaaatgccttttgcagcagaaggctgcagatccctgggccagttggaatttcctctcccggaagctggccacccagcctcacccgcccacccactcctggggtgccctgtacccagtgtgccacctgcagcagagcccgtcccccatcttcagacacccacctcggagccccagacagtagcccgtgcgtgccctcagagcgccaaacctcccagcggttctaagtcaggtctgcgcacaggctccagctgcaggcacactgcaaggagcaaggctgcccgcaggcctagccaccccaagcagccacgtgtccagcgcccacgccctcgccgccgccgtcgccgccgcactaatggctgggtacctgttggggctgcgtgtgagaaggctgtgtatgtcttggatgagccggagccagccatccgaaagagctaccaggcggtagagcggcatggggagacaatccgagtccgggacaccgtccttctcaaatcaggcccacgaaagacctccacaccttatgtggccaagatctctgccctctgggagaaccccgagtcaggagagctgatgatgagcctcctgtggtattacagacctgagcacttacagggaggccgcagtcccagcatgcacgagcccttgcagaatgaagtgtttgcatcgcgacatcaggaccagaacagtgtggcctgcattgaggagaagtgctatgtgctgacttttgccgagtactgcaggttctgtgccatggccaagcgccgaggtgaaggcctccccagccgaaagacagcactggttcccccctctgcagactattccaccccaccccaccgcacagtgccagaggacacggaccctgagctggtgttcctttgccgccatgtctatgacttccgccacgggcgcatccttaagaacccccagtagcctcctcatgcccatgctggggctacccatgggcaagtggggctcggggtagggggcactgcttgaagcacagcacttggttagggggccacagaggcctaagtttgctggcctgtggttttcttgggggggagggcaggggcccctgtgggttctgggctccaggggagggagctggggaggccagggtataagaaaagcatcagaactctcagcttggcccaaggtaccttctgtggttcccctgggtggagatttccgaaaagtagtcttctctgaggctgggccaagcctgagggaaatggggccctaggagggtgggggcgggaaggaggggcaaggtctttcaggaaccagacccaacaggcccttctgtagcctcccccttgccctcaaagggggagtgggggccagctttacctcacccactgtgacccgccgcttccccttcagcctgggaccaggctttcctagatcccagcacagctctgagcttgttcctttgaggcatagagagccagagtctggcttccagagcattgacttcctcttcctagacttgaggccttttctctggctttcctcctttgccctgcagtagcaactggtgctgggacaagttgacccacctctcacagtcatgggtgtggcccacttgtgggagtctcctgtccacctcccagagacggccacccagcgggtctggcttcccagaaagttaactgatgattgtggggtttgtcatatctgggagggaagatgggtgctgggagagggttgggggcagggggcaaggaaaattgctacctgatttgttgaagatttttcctcttgccttacacatggaggttccaggaaacctcttgcagaacttcacacgtgattcttcaagccacacccacctgaaatcaaaccaaaggagtgctgtggctccccttgccctgccaccctttccctagtcttttgtagattgcactaatttacatcctagcaagaatcaacactgtatcagtccacggacctgctgagctgcagccacttgctctaggagctaaggacttgcattttcagtttgttcctgttgcccagaggccctgttctcacctcatgctgctccccagagtagactaacaggctcagtcccctgttgtccttgtggagactaggccttggccctggccctgagactctgtgagggggctggagcagcctggttatttcctatctgtaccaaagaggagtatggtgggagagggagtggagtgcagtgtggcttgggcctggtgctgggaacctgctagctgagcacttccacaagggcatacccctgggggcaggggctggggctgagaactgcagccctgggtcttcccttagggaggaagggcagatgaacccagcaggcttaggaggtggcactgggtgaggacagctgggcaggggctgcagagggaggtggaaatgaaccctgagggctcccccaacttgccatgccctgtcccttagtagatgagttgctcctgattggtcattgggtttgggtgaggcctggaggcttcagaggtgaatttatgcttgggaagcctgatcccaaacctgaagggaagggacttggatctccttatattgaataagctgtttggaggaaggtgtctgtctgggaggatggggcagtaaatgaggttggcagagtggcagtgggggctctgcagagccagccttggagcctgctcattctgggcccttgctgccaaggagcccagcctcacctagcaggaaaggagatgaaggccctcctcccaggaggtagggtcttggctgccccgaacttaaatgcttttgaaatctcttagatgtggaaatattttttcgaacctgaaaatgcagctggtagaatttcaatggaagcataatccatgtaaaatatattttagttgatattttgtaaaatgcactttttgtgtgtgttgatcctggtttcccagatctgtatttcagtgtttacaagggaggaaggacctttcctcacctcccttttgacagagattagaagtacttctttaagaaaaaaataaatttgagaaattgtattgatttagaaaaggatcgttt

SEQ ID NO: 3724 - DNA, 4698 bp, Homo sapiens
  source 1..4698: mol_type = unassigned DNA
tttctcgagaacctactgtgtgcatatcccgggcttagtgaagtcctaggcgggctctggcaccaccaggtgcccaagacacagctccttcccgcacctaacagggacttcccatctctctctgtgcccttagcctgctgtgcccacccaccccactgaccccgcgagcgtgctcgggcttgggagggcacgtctgtgggggtgagagacggagccacagcatttggtgactagggggaagccaggttggaagtactccatgacacacactcggagaaagtcccttcccatgctgagttcgggcctcactggccgccgagagcccctgcagatggaagacagcaacatggagcagggggttgagggtgtggagccaggcatgcccgagagcccaggtcacctcacagggcgccgcaagaattacccacttcgtaagcgcccattggttcctgagaagcccaaggcctgcaaagtgctgctgactcgcctggagaatgtggccggtccccggagtgcagatgaggctgatgagctaccgcctgacctgcccaagccccccagcccggccccatccagtgaagaccctggccttgcccagccccgcaagcggcgcctggcctccctcaatgctgaagctctcaataacctgctgctggagcgagaggacaccagcagcctggcaggcacccgccgcagtcgagcaggggatccccaccgcagccgtgaccgtgatcgtgctactgggggctggtcctcctccaagaagcggccccggctgggggaccttggaggaggaagtcgggacctgtctccagagccagcacccgatgaaggtccccgccgagatggagacccagctcccaagagactggctagcctgaacgcagctgctttcctaaaactgagccaggagcgggagctacccctgcggctgcctcgtgcccatgcagaagtagatgggcgctccactgagcccccagcacccaaggccccgaggccaaagtggcccaaggtcaatggcaagaactatcccaaggcttggcagggggccagctctggggaggctgcaggcccacctggctggcaaggctgccctgatgaaccatggccatctgcaactccttgtgggccatccgtccagccatctcatcagcccctgagcaaggctctggagagccctttggggctgcgccctcacctgcccctgctgatgggtggacaggcggctctgaagccggagcctgggcgcccaggcgaggagtcacctgcccctaagcaggaactgcatcagccctctttccccacacctcagctgtcgccgctgccgatgcctggcaaccccgccgactacaatggcctgtgtgttgggcctgagctcactgcactaggcagcttctacctgtactgtggccaagaggggctgcagtgtgggggctactcgccctgccccatgcttcctgagggcaagctgtccccagtggctgcacctcacgaggaggggctcctcttagctccgagctcagtgccctcaggcacccctttccagcaccctccctggggctcctctcgctactgctctagcgaggacactggagtgaatggctacagcatctgcggagtgttgcccctgtctgttacccacgctggcactacctgtggcggctgcccatacaaaatgccttttgcagcaggctgcagatccctgggccagttggaatttcctctcccggaagctggccacccagcctcacccgcccacccactcctggggtgccctgtacccagtgtgccacctgcagcagagcccgtcccccatcttcagacacccacctcggagccccagacagtagcccgtgcgtgccctcagagcgccaaacctcccagcggttctaagtcaggtctgcgcacaggctccagctgcaggcacactgcaaggagcaaggctgcccgcaggcctagccaccccaagcagccacgtgtccagcgcccacgccctcgccgccgccgtcgccgccgcactaatggctgggtacctgttggggctgcgtgtgagaaggctgtgtatgtcttggatgagccggagccagccatccgaaagagctaccaggcggtagagcggcatggggagacaatccgagtccgggacaccgtccttctcaaatcaggcccacgaaagacctccacaccttatgtggccaagatctctgccctctgggagaaccccgagtcaggagagctgatgatgagcctcctgtggtattacagacctgagcacttacagggaggccgcagtcccagcatgcacgagcccttgcagaatgaagtgtttgcatcgcgacatcaggaccagaacagtgtggcctgcattgaggagaagtgctatgtgctgacttttgccgagtactgcaggttctgtgccatggccaagcgccgaggtgaaggcctccccagccgaaagacagcactggttcccccctctgcagactattccaccccaccccaccgcacagtgccagaggacacggaccctgagctggtgttcctttgccgccatgtctatgacttccgccacgggcgcatccttaagaacccccagtagcctcctcatgcccatgctggggctacccatgggcaagtggggctcggggtagggggcactgcttgaagcacagcacttggttagggggccacagaggcctaagtttgctggcctgtggttttcttgggggggagggcaggggcccctgtgggttctgggctccaggggagggagctggggaggccagggtataagaaaagcatcagaactctcagcttggcccaaggtaccttctgtggttcccctgggtggagatttccgaaaagtagtcttctctgaggctgggccaagcctgagggaaatggggccctaggagggtgggggcgggaaggaggggcaaggtctttcaggaaccagacccaacaggcccttctgtagcctcccccttgccctcaaagggggagtgggggccagctttacctcacccactgtgacccgccgcttccccttcagcctgggaccaggctttcctagatcccagcacagctctgagcttgttcctttgaggcatagagagccagagtctggcttccagagcattgacttcctcttcctagacttgaggccttttctctggctttcctcctttgccctgcagtagcaactggtgctgggacaagttgacccacctctcacagtcatgggtgtggcccacttgtgggagtctcctgtccacctcccagagacggccacccagcgggtctggcttcccagaaagttaactgatgattgtggggtttgtcatatctgggagggaagatgggtgctgggagagggttgggggcagggggcaaggaaaattgctacctgatttgttgaagatttttcctcttgccttacacatggaggttccaggaaacctcttgcagaacttcacacgtgattcttcaagccacacccacctgaaatcaaaccaaaggagtgctgtggctccccttgccctgccaccctttccctagtcttttgtagattgcactaatttacatcctagcaagaatcaacactgtatcagtccacggacctgctgagctgcagccacttgctctaggagctaaggacttgcattttcagtttgttcctgttgcccagaggccctgttctcacctcatgctgctccccagagtagactaacaggctcagtcccctgttgtccttgtggagactaggccttggccctggccctgagactctgtgagggggctggagcagcctggttatttcctatctgtaccaaagaggagtatggtgggagagggagtggagtgcagtgtggcttgggcctggtgctgggaacctgctagctgagcacttccacaagggcatacccctgggggcaggggctggggctgagaactgcagccctgggtcttcccttagggaggaagggcagatgaacccagcaggcttaggaggtggcactgggtgaggacagctgggcaggggctgcagagggaggtggaaatgaaccctgagggctcccccaacttgccatgccctgtcccttagtagatgagttgctcctgattggtcattgggtttgggtgaggcctggaggcttcagaggtgaatttatgcttgggaagcctgatcccaaacctgaagggaagggacttggatctccttatattgaataagctgtttggaggaaggtgtctgtctgggaggatggggcagtaaatgaggttggcagagtggcagtgggggctctgcagagccagccttggagcctgctcattctgggcccttgctgccaaggagcccagcctcacctagcaggaaaggagatgaaggccctcctcccaggaggtagggtcttggctgccccgaacttaaatgcttttgaaatctcttagatgtggaaatattttttcgaacctgaaaatgcagctggtagaatttcaatggaagcataatccatgtaaaatatattttagttgatattttgtaaaatgcactttttgtgtgtgttgatcctggtttcccagatctgtatttcagtgtttacaagggaggaaggacctttcctcacctcccttttgacagagattagaagtacttctttaagaaaaaaataaatttgagaaattgtattgatttag

SEQ ID NO: 3725 - DNA, 5920 bp, Homo sapiens
  source 1..5920: mol_type = unassigned DNA
cttttcccatcgtgtagtcaagagtctgtgccagacttgaaggctttactttgttagccatgtgtttatgaacccccagcgctttccctagatcttttggctgataatctcaaacatggaggatgcttctgaatcttcacgaggggttgctccattaattaataatgtagttctcccaggctctccgctgtctcttcctgtatcagtgacaggctgtaaaagtcatcgagtagccaataaaaaggtagaagcgaggagtgaaaagctcctcccaacagctcttcctccttcagagccgaaagtagatcagaaacttcccaggagctccgagaggcggggaagtggcggtgggacgcaattccccgcgcggagtcgggcagtggcagcgggagaagcggcagccaggggcgcggcggggccggagagaggcggtcccctgggaggacggggtctcccctcgttgcctttgtagtggagaaggtggacaagtggcagtcggcgtgatcgcagggaagcggggccggcgcgggcggccgagggtccaggcgagcccgcgggcggacgggagatgccgctgctacaccgaaagccgtttgtgagacagaagccgcccgcggacctgcggcccgacgaggaagttttctactgtaaagtcaccaacgagatcttccgccactacgatgacttttttgaacgaaccattctgtgcaacagccttgtgtggagttgtgctgtgacgggtagacctggactgacgtatcaggaagcacttgagtcagaaaaaaaagcaagacagaatcttcagagttttccagaaccactaattattccagttttatacttgaccagccttacccatcgttcgcgcttacatgaaatttgtgatgatatctttgcatatgtcaaggatcgatattttgtcgaagaaactgtggaagtcattaggaacaatggtgcaaggttgcagtgtaggattttggaagtcctccctccatcacatcaaaatggttttgctaatggacatgttaacagtgtggatggagaaactattatcatcagtgatagtgatgattcagaaacacaaagctgttcttttcaaaatgggaagaaaaaagatgcaattgatcccttactattcaagtataaagtgcaacccactaaaaaagaattacatgagtctgctattgttaaagcaacacaaatcagccggagaaaacacctattttctcgtgataaactaaagctttttctgaagcaacactgtgaaccacaagatggagtcattaaaataaaggcatcatctctttcaacgtataaaatagcagaacaagatttttcttatttcttccctgatgatccacccacatttatcttcagtcctgctaacagacgaagagggagacctcccaaacgaatacatattagtcaagaggacaatgttgctaataaacagactcttgcaagttataggagcaaagctactaaagaaagagataaacttttgaaacaagaagaaatgaagtcactggcttttgaaaaggctaaattaaaaagagaaaaagcagatgccctagaagcgaagaaaaaagaaaaagaagataaagagaaaaagagggaagaattgaaaaaaattgttgaagaagagagactaaagaaaaaagaagaaaaagagaggcttaaagtagaaagagaaaaggaaagagagaagttacgtgaagaaaagcgaaagtatgtggaatacttaaaacagtggagtaaacctagagaagatatggaatgtgatgaccttaaggaacttccagaaccaacaccagtgaaaactagactacctcctgaaatctttggtgatgctctgatggttttggagttccttaatgcatttggggaactttttgatcttcaagatgagtttcctgatggagtaaccctagaagtattagaggaagctcttgtaggaaatgacagtgaaggcccactgtgtgaattgctttttttcttcctgactgcaatcttccaggcaatagctgaagaagaagaggaagtagccaaagagcaactaactgatgctgacaccaaaggctgcagtttgaaaagtttggatcttgatagctgcactctttcagaaatcctcagactgcacatcttagcttcaggtgctgatgtaacatcagcaaatgcaaagtatagatatcaaaaacgaggaggatttgatgctacagatgatgcttgtatggagcttcgtttgagcaatcccagtctagtgaagaaactgtcaagcacctcagtgtatgatttgacaccaggagaaaaaatgaagatactccatgctctctgtggaaagctactgaccctagtttcaactagggattttattgaagattatgttgatatattacgacaggcaaagcaggagttccgggaattaaaagcagaacaacatcgaaaagagagggaagaagcagctgccagaattcgtaaaaggaaggaagaaaaacttaaggagcaagaacaaaaaatgaaagagaaacaagaaaaactgaaagaagatgagcaaagaaattcaacggcagatatatctattggggaggaagaaagggaagattttgatactagcattgagagcaaagacacagagcaaaaggaattagatcaagatatggtcactgaagatgaagatgacccaggatcacataaaagaggcagaagggggaaaagaggacaaaatggatttaaagaatttacaaggcaagaacagatcaactgtgtaacaagagagcctcttactgctgatgaggaagaagcattaaaacaggaacaccaacgaaaagagaaagagctcttagaaaaaatccaaagtgccatagcctgtaccaatatctttcccttgggtcgcgaccgcatgtatagacgatactggattttcccttctattcctggactctttattgaagaggattattctggtcttactgaagacatgctgttgcctagaccttcatcatttcagaataatgtacagtctcaagatcctcaggtatccactaaaactggagagcctttgatgtctgaatctacctccaacattgaccaaggtccacgtgaccattctgtgcagctgccaaaaccagtgcataagccaaatcggtggtgcttttacagttcttgtgaacagctagaccagcttattgaagctcttaattctagaggacatagagaaagtgccttaaaagaaactttgttacaagagaaaagcagaatatgtgcacagctagcccgtttttctgaagagaaatttcatttttcagacaaacctcagcctgatagcaaaccaacatatagtcggggaagatcttccaatgcatatgatccatctcagatgtgtgcagaaaagcaacttgaactaaggctgagagattttcttttagatattgaagatagaatctaccaaggaacattaggagccatcaaggttacagatcgacatatctggagatcagcattagaaagtggacggtatgagctgttaagtgaggaaaacaaggaaaatgggataattaaaactgtgaatgaagacgtagaagagatggaaattgatgaacaaacaaaggtcatagtaaaagacagacttttggggataaaaacagaaactccaagtactgtatcaacaaatgcaagtacaccacaatcagtgagcagtgtggttcattatctggcaatggcactctttcaaatagagcagggcattgagcggcgttttctgaaagctccacttgatgccagtgacagtgggcgttcttataaaacagttctggaccgttggagagagtctctcctttcttctgctagtctatcccaagtttttcttcacctatccaccttggatcgtagcgtgatatggtctaaatctatactgaatgcgcgttgcaagatatgtcgaaagaaaggcgatgctgaaaacatggttctttgtgatggctgtgataggggtcatcatacctactgtgttcgaccaaagctcaagactgtgcctgaaggagactggttttgtccagaatgtcgaccaaagcaacgttctagaagactctcctctagacagagaccatccttggaaagtgatgaagatgtggaagacagtatgggaggtgaggatgatgaagttgatggcgatgaagaagaaggtcaaagtgaggaggaagagtatgaggtagaacaagatgaagatgactctcaagaagaggaagaagtcagcctacccaaacgaggaagaccacaagttagattgccagttaaaacaagagggaaacttagctcttctttctcaagtcgtggccaacaacaagaacctggaagatacccttcaaggagtcagcagagcacacccaaaacaactgtttcttctaaaactggtagaagcctaagaaagataaactctgctcctcctacagaaacaaaatctttaagaattgccagtcgttctactcgccacagtcatggcccactgcaagcagatgtatttgtggaattgcttagtcctcgtagaaaacgcagaggcaggaaaagtgctaataatacaccagaaaatagtcccaacttccctaacttcagagtcattgccacaaagtcaagtgaacagtcaagatctgtaaatattgcttcaaaactttctctccaagagagtgaatccaaaagaagatgcagaaaaagacaatctccagagccatcgcctgtgacactgggtcgaaggagttctggccgacagggaggagttcatgaattgtctgcttttgaacaacttgttgtagaattggtacgacatgatgacagctggccttttttgaaacttgtttctaaaatccaggtcccagactactatgacatcatcaaaaagcccattgccttaaatataattcgtgaaaaagtgaataagtgtgaatataaattagcatctgagtttattgatgacattgagttaatgttttcgaactgctttgaatacaaccctcgtaacacaagtgaagcaaaagctggaactaggcttcaagcattttttcatattcaggctcaaaagcttggactccacgtcacacccagtaatgtggaccaagttagcacaccaccggctgcgaaaaagtcacgaatctgactttgtccttctaaaggatatatttgaagaaaaacaaattgttcatgaaaatggaacattaaatcatgctgtataaagcaataacaattgattgaccacatgaaagtgtggcctgcactatattctcaattttaatattaagcactcaggagaatgtaggaaagatatcctttgctacagttttgttcagtatctaataagtttgatagatgtattggatacagtactggtttacagaggtttttgtacatttttgagatcattcatgtgtccagagatcttggaaaatattttttcacccacgatttattttgttattgatgatttttttttaaagtggtggtattaagggagagttatctacatggatgagtcttccgctatagcacagtttagaaaaggtgtttatgtcttaattaattgtttgagtacattctttcaacactacacatgaatgaatccaatcttataaccttgaagtgctgtaccagtgctggctgcaggtattaagtccaagtttattaactagatatttatttagtattgagagtaatttgtgaatttgttttgtatttataaaatttatacctgaaaaatgttccttaatgttttaaaccttttactgtgtttttattcctctaacttccttaatgatcaatcaaaaaaagtaacaccctccctttttcctgacagttctttcagctttacagaactgtattataagtttctatgtataactttttaactgtacaaataaaataacattttttcaaataa

SEQ ID NO: 3726 - DNA, 6010 bp, Homo sapiens
  source 1..6010: mol_type = unassigned DNA
cttttcccatcgtgtagtcaagagtctgtgccagacttgaaggctttactttgttagccatgtgtttatgaacccccagcgctttccctagatcttttggctgataatctcaaacatggaggatgcttctgaatcttcacgaggggttgctccattaattaataatgtagttctcccaggctctccgctgtctcttcctgtatcagtgacaggctgtaaaagtcatcgagtagccaataaaaaggtagaagcgaggagtgaaaagctcctcccaacagctcttcctccttcagagccgaaagtagatcagaaacttcccaggagctccgagaggcggggaagtggcggtgggacgcaattccccgcgcggagtcgggcagtggcagcgggagaagcggcagccaggggcgcggcggggccggagagaggcggtcccctgggaggacggggtctcccctcgttgcctttgtagtggagaaggtggacaagtggcagtcggcgtgatcgcagggaagcggggccggcgcgggcggccgagggtccaggcgagcccgcgggcggacgggagatgccgctgctacaccgaaagccgtttgtgagacagaagccgcccgcggacctgcggcccgacgaggaagttttctactgtaaagtcaccaacgagatcttccgccactacgatgacttttttgaacgaaccattctgtgcaacagccttgtgtggagttgtgctgtgacgggtagacctggactgacgtatcaggaagcacttgagtcagaaaaaaaagcaagacagaatcttcagagttttccagaaccactaattattccagttttatacttgaccagccttacccatcgttcgcgcttacatgaaatttgtgatgatatctttgcatatgtcaaggatcgatattttgtcgaagaaactgtggaagtcattaggaacaatggtgcaaggttgcagtgtaggattttggaagtcctccctccatcacatcaaaatggttttgctaatggacatgttaacagtgtggatggagaaactattatcatcagtgatagtgatgattcagaaacacaaagctgttcttttcaaaatgggaagaaaaaagatgcaattgatcccttactattcaagtataaagtgcaacccactaaaaaagaattacatgagtctgctattgttaaagcaacacaaatcagccggagaaaacacctattttctcgtgataaactaaagctttttctgaagcaacactgtgaaccacaagatggagtcattaaaataaaggcatcatctctttcaacgtataaaatagcagaacaagatttttcttatttcttccctgatgatccacccacatttatcttcagtcctgctaacagacgaagagggagacctcccaaacgaatacatattagtcaagaggacaatgttgctaataaacagactcttgcaagttataggagcaaagctactaaagaaagagataaacttttgaaacaagaagaaatgaagtcactggcttttgaaaaggctaaattaaaaagagaaaaagcagatgccctagaagcgaagaaaaaagaaaaagaagataaagagaaaaagagggaagaattgaaaaaaattgttgaagaagagagactaaagaaaaaagaagaaaaagagaggcttaaagtagaaagagaaaaggaaagagagaagttacgtgaagaaaagcgaaagtatgtggaatacttaaaacagtggagtaaacctagagaagatatggaatgtgatgaccttaaggaacttccagaaccaacaccagtgaaaactagactacctcctgaaatctttggtgatgctctgatggttttggagttccttaatgcatttggggaactttttgatcttcaagatgagtttcctgatggagtaaccctagaagtattagaggaagctcttgtaggaaatgacagtgaaggcccactgtgtgaattgctttttttcttcctgactgcaatcttccaggcaatagctgaagaagaagaggaagtagccaaagagcaactaactgatgctgacaccaaagatttaacagaggctttggatgaagatgcagaccccacaaaatctgcactgtctgcagttgcatctttggcagctgcatggccacagttacaccagggctgcagtttgaaaagtttggatcttgatagctgcactctttcagaaatcctcagactgcacatcttagcttcaggtgctgatgtaacatcagcaaatgcaaagtatagatatcaaaaacgaggaggatttgatgctacagatgatgcttgtatggagcttcgtttgagcaatcccagtctagtgaagaaactgtcaagcacctcagtgtatgatttgacaccaggagaaaaaatgaagatactccatgctctctgtggaaagctactgaccctagtttcaactagggattttattgaagattatgttgatatattacgacaggcaaagcaggagttccgggaattaaaagcagaacaacatcgaaaagagagggaagaagcagctgccagaattcgtaaaaggaaggaagaaaaacttaaggagcaagaacaaaaaatgaaagagaaacaagaaaaactgaaagaagatgagcaaagaaattcaacggcagatatatctattggggaggaagaaagggaagattttgatactagcattgagagcaaagacacagagcaaaaggaattagatcaagatatggtcactgaagatgaagatgacccaggatcacataaaagaggcagaagggggaaaagaggacaaaatggatttaaagaatttacaaggcaagaacagatcaactgtgtaacaagagagcctcttactgctgatgaggaagaagcattaaaacaggaacaccaacgaaaagagaaagagctcttagaaaaaatccaaagtgccatagcctgtaccaatatctttcccttgggtcgcgaccgcatgtatagacgatactggattttcccttctattcctggactctttattgaagaggattattctggtcttactgaagacatgctgttgcctagaccttcatcatttcagaataatgtacagtctcaagatcctcaggtatccactaaaactggagagcctttgatgtctgaatctacctccaacattgaccaaggtccacgtgaccattctgtgcagctgccaaaaccagtgcataagccaaatcggtggtgcttttacagttcttgtgaacagctagaccagcttattgaagctcttaattctagaggacatagagaaagtgccttaaaagaaactttgttacaagagaaaagcagaatatgtgcacagctagcccgtttttctgaagagaaatttcatttttcagacaaacctcagcctgatagcaaaccaacatatagtcggggaagatcttccaatgcatatgatccatctcagatgtgtgcagaaaagcaacttgaactaaggctgagagattttcttttagatattgaagatagaatctaccaaggaacattaggagccatcaaggttacagatcgacatatctggagatcagcattagaaagtggacggtatgagctgttaagtgaggaaaacaaggaaaatgggataattaaaactgtgaatgaagacgtagaagagatggaaattgatgaacaaacaaaggtcatagtaaaagacagacttttggggataaaaacagaaactccaagtactgtatcaacaaatgcaagtacaccacaatcagtgagcagtgtggttcattatctggcaatggcactctttcaaatagagcagggcattgagcggcgttttctgaaagctccacttgatgccagtgacagtgggcgttcttataaaacagttctggaccgttggagagagtctctcctttcttctgctagtctatcccaagtttttcttcacctatccaccttggatcgtagcgtgatatggtctaaatctatactgaatgcgcgttgcaagatatgtcgaaagaaaggcgatgctgaaaacatggttctttgtgatggctgtgataggggtcatcatacctactgtgttcgaccaaagctcaagactgtgcctgaaggagactggttttgtccagaatgtcgaccaaagcaacgttctagaagactctcctctagacagagaccatccttggaaagtgatgaagatgtggaagacagtatgggaggtgaggatgatgaagttgatggcgatgaagaagaaggtcaaagtgaggaggaagagtatgaggtagaacaagatgaagatgactctcaagaagaggaagaagtcagcctacccaaacgaggaagaccacaagttagattgccagttaaaacaagagggaaacttagctcttctttctcaagtcgtggccaacaacaagaacctggaagatacccttcaaggagtcagcagagcacacccaaaacaactgtttcttctaaaactggtagaagcctaagaaagataaactctgctcctcctacagaaacaaaatctttaagaattgccagtcgttctactcgccacagtcatggcccactgcaagcagatgtatttgtggaattgcttagtcctcgtagaaaacgcagaggcaggaaaagtgctaataatacaccagaaaatagtcccaacttccctaacttcagagtcattgccacaaagtcaagtgaacagtcaagatctgtaaatattgcttcaaaactttctctccaagagagtgaatccaaaagaagatgcagaaaaagacaatctccagagccatcgcctgtgacactgggtcgaaggagttctggccgacagggaggagttcatgaattgtctgcttttgaacaacttgttgtagaattggtacgacatgatgacagctggccttttttgaaacttgtttctaaaatccaggtcccagactactatgacatcatcaaaaagcccattgccttaaatataattcgtgaaaaagtgaataagtgtgaatataaattagcatctgagtttattgatgacattgagttaatgttttcgaactgctttgaatacaaccctcgtaacacaagtgaagcaaaagctggaactaggcttcaagcattttttcatattcaggctcaaaagcttggactccacgtcacacccagtaatgtggaccaagttagcacaccaccggctgcgaaaaagtcacgaatctgactttgtccttctaaaggatatatttgaagaaaaacaaattgttcatgaaaatggaacattaaatcatgctgtataaagcaataacaattgattgaccacatgaaagtgtggcctgcactatattctcaattttaatattaagcactcaggagaatgtaggaaagatatcctttgctacagttttgttcagtatctaataagtttgatagatgtattggatacagtactggtttacagaggtttttgtacatttttgagatcattcatgtgtccagagatcttggaaaatattttttcacccacgatttattttgttattgatgatttttttttaaagtggtggtattaagggagagttatctacatggatgagtcttccgctatagcacagtttagaaaaggtgtttatgtcttaattaattgtttgagtacattctttcaacactacacatgaatgaatccaatcttataaccttgaagtgctgtaccagtgctggctgcaggtattaagtccaagtttattaactagatatttatttagtattgagagtaatttgtgaatttgttttgtatttataaaatttatacctgaaaaatgttccttaatgttttaaaccttttactgtgtttttattcctctaacttccttaatgatcaatcaaaaaaagtaacaccctccctttttcctgacagttctttcagctttacagaactgtattataagtttctatgtataactttttaactgtacaaataaaataacattttttc

SEQ ID NO: 3727 - DNA, 5775 bp, Homo sapiens
  source 1..5775: mol_type = unassigned DNA
cccgcactgccccccgcggcggggcgtcctgccccattgtgaggcggcggcaggacgagaggaggtagggcgcgctcggggggcaggggcggcggcggctccgctcgctcgacacccgggcagcggcaggaacgaactcggctccggtagcggccgcggcgcgtcagtcacacaaaaggcagccgagcttctcccagcgcgcggaccggcccacgctgccgccgagggctccccaccttaccggctttcctttccctccaattttgatagggaagcggggccggcgcgggcggccgagggtccaggcgagcccgcgggcggacgggagatgccgctgctacaccgaaagccgtttgtgagacagaagccgcccgcggacctgcggcccgacgaggaagttttctactgtaaagtcaccaacgagatcttccgccactacgatgacttttttgaacgaaccattctgtgcaacagccttgtgtggagttgtgctgtgacgggtagacctggactgacgtatcaggaagcacttgagtcagaaaaaaaagcaagacagaatcttcagagttttccagaaccactaattattccagttttatacttgaccagccttacccatcgttcgcgcttacatgaaatttgtgatgatatctttgcatatgtcaaggatcgatattttgtcgaagaaactgtggaagtcattaggaacaatggtgcaaggttgcagtgtaggattttggaagtcctccctccatcacatcaaaatggttttgctaatggacatgttaacagtgtggatggagaaactattatcatcagtgatagtgatgattcagaaacacaaagctgttcttttcaaaatgggaagaaaaaagatgcaattgatcccttactattcaagtataaagtgcaacccactaaaaaagaattacatgagtctgctattgttaaagcaacacaaatcagccggagaaaacacctattttctcgtgataaactaaagctttttctgaagcaacactgtgaaccacaagatggagtcattaaaataaaggcatcatctctttcaacgtataaaatagcagaacaagatttttcttatttcttccctgatgatccacccacatttatcttcagtcctgctaacagacgaagagggagacctcccaaacgaatacatattagtcaagaggacaatgttgctaataaacagactcttgcaagttataggagcaaagctactaaagaaagagataaacttttgaaacaagaagaaatgaagtcactggcttttgaaaaggctaaattaaaaagagaaaaagcagatgccctagaagcgaagaaaaaagaaaaagaagataaagagaaaaagagggaagaattgaaaaaaattgttgaagaagagagactaaagaaaaaagaagaaaaagagaggcttaaagtagaaagagaaaaggaaagagagaagttacgtgaagaaaagcgaaagtatgtggaatacttaaaacagtggagtaaacctagagaagatatggaatgtgatgaccttaaggaacttccagaaccaacaccagtgaaaactagactacctcctgaaatctttggtgatgctctgatggttttggagttccttaatgcatttggggaactttttgatcttcaagatgagtttcctgatggagtaaccctagaagtattagaggaagctcttgtaggaaatgacagtgaaggcccactgtgtgaattgctttttttcttcctgactgcaatcttccaggcaatagctgaagaagaagaggaagtagccaaagagcaactaactgatgctgacaccaaagatttaacagaggctttggatgaagatgcagaccccacaaaatctgcactgtctgcagttgcatctttggcagctgcatggccacagttacaccagggctgcagtttgaaaagtttggatcttgatagctgcactctttcagaaatcctcagactgcacatcttagcttcaggtgctgatgtaacatcagcaaatgcaaagtatagatatcaaaaacgaggaggatttgatgctacagatgatgcttgtatggagcttcgtttgagcaatcccagtctagtgaagaaactgtcaagcacctcagtgtatgatttgacaccaggagaaaaaatgaagatactccatgctctctgtggaaagctactgaccctagtttcaactagggattttattgaagattatgttgatatattacgacaggcaaagcaggagttccgggaattaaaagcagaacaacatcgaaaagagagggaagaagcagctgccagaattcgtaaaaggaaggaagaaaaacttaaggagcaagaacaaaaaatgaaagagaaacaagaaaaactgaaagaagatgagcaaagaaattcaacggcagatatatctattggggaggaagaaagggaagattttgatactagcattgagagcaaagacacagagcaaaaggaattagatcaagatatggtcactgaagatgaagatgacccaggatcacataaaagaggcagaagggggaaaagaggacaaaatggatttaaagaatttacaaggcaagaacagatcaactgtgtaacaagagagcctcttactgctgatgaggaagaagcattaaaacaggaacaccaacgaaaagagaaagagctcttagaaaaaatccaaagtgccatagcctgtaccaatatctttcccttgggtcgcgaccgcatgtatagacgatactggattttcccttctattcctggactctttattgaagaggattattctggtcttactgaagacatgctgttgcctagaccttcatcatttcagaataatgtacagtctcaagatcctcaggtatccactaaaactggagagcctttgatgtctgaatctacctccaacattgaccaaggtccacgtgaccattctgtgcagctgccaaaaccagtgcataagccaaatcggtggtgcttttacagttcttgtgaacagctagaccagcttattgaagctcttaattctagaggacatagagaaagtgccttaaaagaaactttgttacaagagaaaagcagaatatgtgcacagctagcccgtttttctgaagagaaatttcatttttcagacaaacctcagcctgatagcaaaccaacatatagtcggggaagatcttccaatgcatatgatccatctcagatgtgtgcagaaaagcaacttgaactaaggctgagagattttcttttagatattgaagatagaatctaccaaggaacattaggagccatcaaggttacagatcgacatatctggagatcagcattagaaagtggacggtatgagctgttaagtgaggaaaacaaggaaaatgggataattaaaactgtgaatgaagacgtagaagagatggaaattgatgaacaaacaaaggtcatagtaaaagacagacttttggggataaaaacagaaactccaagtactgtatcaacaaatgcaagtacaccacaatcagtgagcagtgtggttcattatctggcaatggcactctttcaaatagagcagggcattgagcggcgttttctgaaagctccacttgatgccagtgacagtgggcgttcttataaaacagttctggaccgttggagagagtctctcctttcttctgctagtctatcccaagtttttcttcacctatccaccttggatcgtagcgtgatatggtctaaatctatactgaatgcgcgttgcaagatatgtcgaaagaaaggcgatgctgaaaacatggttctttgtgatggctgtgataggggtcatcatacctactgtgttcgaccaaagctcaagactgtgcctgaaggagactggttttgtccagaatgtcgaccaaagcaacgttctagaagactctcctctagacagagaccatccttggaaagtgatgaagatgtggaagacagtatgggaggtgaggatgatgaagttgatggcgatgaagaagaaggtcaaagtgaggaggaagagtatgaggtagaacaagatgaagatgactctcaagaagaggaagaagtcagcctacccaaacgaggaagaccacaagttagattgccagttaaaacaagagggaaacttagctcttctttctcaagtcgtggccaacaacaagaacctggaagatacccttcaaggagtcagcagagcacacccaaaacaactgtttcttctaaaactggtagaagcctaagaaagataaactctgctcctcctacagaaacaaaatctttaagaattgccagtcgttctactcgccacagtcatggcccactgcaagcagatgtatttgtggaattgcttagtcctcgtagaaaacgcagaggcaggaaaagtgctaataatacaccagaaaatagtcccaacttccctaacttcagagtcattgccacaaagtcaagtgaacagtcaagatctgtaaatattgcttcaaaactttctctccaagagagtgaatccaaaagaagatgcagaaaaagacaatctccagagccatcgcctgtgacactgggtcgaaggagttctggccgacagggaggagttcatgaattgtctgcttttgaacaacttgttgtagaattggtacgacatgatgacagctggccttttttgaaacttgtttctaaaatccaggtcccagactactatgacatcatcaaaaagcccattgccttaaatataattcgtgaaaaagtgaataagtgtgaatataaattagcatctgagtttattgatgacattgagttaatgttttcgaactgctttgaatacaaccctcgtaacacaagtgaagcaaaagctggaactaggcttcaagcattttttcatattcaggctcaaaagcttggactccacgtcacacccagtaatgtggaccaagttagcacaccaccggctgcgaaaaagtcacgaatctgactttgtccttctaaaggatatatttgaagaaaaacaaattgttcatgaaaatggaacattaaatcatgctgtataaagcaataacaattgattgaccacatgaaagtgtggcctgcactatattctcaattttaatattaagcactcaggagaatgtaggaaagatatcctttgctacagttttgttcagtatctaataagtttgatagatgtattggatacagtactggtttacagaggtttttgtacatttttgagatcattcatgtgtccagagatcttggaaaatattttttcacccacgatttattttgttattgatgatttttttttaaagtggtggtattaagggagagttatctacatggatgagtcttccgctatagcacagtttagaaaaggtgtttatgtcttaattaattgtttgagtacattctttcaacactacacatgaatgaatccaatcttataaccttgaagtgctgtaccagtgctggctgcaggtattaagtccaagtttattaactagatatttatttagtattgagagtaatttgtgaatttgttttgtatttataaaatttatacctgaaaaatgttccttaatgttttaaaccttttactgtgtttttattcctctaacttccttaatgatcaatcaaaaaaagtaacaccctccctttttcctgacagttctttcagctttacagaactgtattataagtttctatgtataactttttaactgtacaaataaaataacattttttcaaata

SEQ ID NO: 3728 - DNA, 5218 bp, Homo sapiens
  source 1..5218: mol_type = unassigned DNA
cttttcccatcgtgtagtcaagagtctgtgccagacttgaaggctttactttgttagccatgtgtttatgaacccccagcgctttccctagatcttttggctgataatctcaaacatggaggatgcttctgaatcttcacgaggggttgctccattaattaataatgtagttctcccaggctctccgctgtctcttcctgtatcagtgacaggctgtaaaagtcatcgagtagccaataaaaaggtagaagcgaggagtgaaaagctcctcccaacagctcttcctccttcagagccgaaagtagatcagaaacttcccaggagctccgagaggcggggaagtggcggtgggacgcaattccccgcgcggagtcgggcagtggcagcgggagaagcggcagccaggggcgcggcggggccggagagaggcggtcccctgggaggacggggtctcccctcgttgcctttgtagtggagaaggtggacaagtggcagtcggcgtgatcgcagggaagcggggccggcgcgggcggccgagggtccaggcgagcccgcgggcggacgggagatgccgctgctacaccgaaagccgtttgtgagacagaagccgcccgcggacctgcggcccgacgaggaagttttctactgtaaagtcaccaacgagatcttccgccactacgatgacttttttgaacgaaccattctgtgcaacagccttgtgtggagttgtgctgtgacgggtagacctggactgacgtatcaggaagcacttgagtcagaaaaaaaagcaagacagaatcttcagagttttccagaaccactaattattccagttttatacttgaccagccttacccatcgttcgcgcttacatgaaatttgtgatgatatctttgcatatgtcaaggatcgatattttgtcgaagaaactgtggaagtcattaggaacaatggtgcaaggttgcagtgtaggattttggaagtcctccctccatcacatcaaaatggttttgctaatggacatgttaacagtgtggatggagaaactattatcatcagtgatagtgatgattcagaaacacaaagctgttcttttcaaaatgggaagaaaaaagatgcaattgatcccttactattcaagtataaagtgcaacccactaaaaaagaattacatgagtctgctattgttaaagcaacacaaatcagccggagaaaacacctattttctcgtgataaactaaagctttttctgaagcaacactgtgaaccacaagatggagtcattaaaataaaggcatcatctctttcaacgtataaaatagcagaacaagatttttcttatttcttccctgatgatccacccacatttatcttcagtcctgctaacagacgaagagggagacctcccaaacgaatacatattagtcaagaggacaatgttgctaataaacagactcttgcaagttataggagcaaagctactaaagaaagagataaacttttgaaacaagaagaaatgaagtcactggcttttgaaaaggctaaattaaaaagagaaaaagcagatgccctagaagcgaagaaaaaagaaaaagaagataaagagaaaaagagggaagaattgaaaaaaattgttgaagaagagagactaaagaaaaaagaagaaaaagagaggcttaaagtagaaagagaaaaggaaagagagaagttacgtgaagaaaagcgaaagtatgtggaatacttaaaacagtggagtaaacctagagaagatatggaatgtgatgaccttaaggaacttccagaaccaacaccagtgaaaactagactacctcctgaaatctttggtgatgctctgatggttttggagttccttaatgcatttggggaactttttgatcttcaagatgagtttcctgatggagtaaccctagaagtattagaggaagctcttgtaggaaatgacagtgaaggcccactgtgtgaattgctttttttcttcctgactgcaatcttccaggcaatagctgaagaagaagaggaagtagccaaagagcaactaactgatgctgacaccaaaggctgcagtttgaaaagtttggatcttgatagctgcactctttcagaaatcctcagactgcacatcttagcttcaggtgctgatgtaacatcagcaaatgcaaagtatagatatcaaaaacgaggaggatttgatgctacagatgatgcttgtatggagcttcgtttgagcaatcccagtctagtgaagaaactgtcaagcacctcagtgtatgatttgacaccaggagaaaaaatgaagatactccatgctctctgtggaaagctactgaccctagtttcaactagggattttattgaagattatgttgatatattacgacaggcaaagcaggagttccgggaattaaaagcagaacaacatcgaaaagagagggaagaagcagctgccagaattcgtaaaaggaaggaagaaaaacttaaggagcaagaacaaaaaatgaaagagaaacaagaaaaactgaaagaagatgagcaaagaaattcaacggcagatatatctattggggaggaagaaagggaagattttgatactagcattgagagcaaagacacagagcaaaaggaattagatcaagatatggtcactgaagatgaagatgacccaggatcacataaaagaggcagaagggggaaaagaggacaaaatggatttaaagaatttacaaggcaagaacagatcaactgtgtaacaagagagcctcttactgctgatgaggaagaagcattaaaacaggaacaccaacgaaaagagaaagagctcttagaaaaaatccaaagtgccatagcctgtaccaatatctttcccttgggtcgcgaccgcatgtatagacgatactggattttcccttctattcctggactctttattgaagaggattattctggtcttactgaagacatgctgttgcctagaccttcatcatttcagaataatgtacagtctcaagatcctcaggtatccactaaaactggagagcctttgatgtctgaatctacctccaacattgaccaaggtccacgtgaccattctgtgcagctgccaaaaccagtgcataagccaaatcggtggtgcttttacagttcttgtgaacagctagaccagcttattgaagctcttaattctagaggacatagagaaagtgccttaaaagaaactttgttacaagagaaaagcagaatatgtgcacagctagcccgtttttctgaagagaaatttcatttttcagacaaacctcagcctgatagcaaaccaacatatagtcggggaagatcttccaatgcatatgatccatctcagatgtgtgcagaaaagcaacttgaactaaggctgagagattttcttttagatattgaagatagaatctaccaaggaacattaggagccatcaaggttacagatcgacatatctggagatcagcattagaaagtggacggtatgagctgttaagtgaggaaaacaaggaaaatgggataattaaaactgtgaatgaagacgtagaagagatggaaattgatgaacaaacaaaggtcatagtaaaagacagacttttggggataaaaacagaaactccaagtactgtatcaacaaatgcaagtacaccacaatcagtgagcagtgtggttcattatctggcaatggcactctttcaaatagagcagggcattgagcggcgttttctgaaagctccacttgatgccagtgacagtgggcgttcttataaaacagttctggaccgttggagagagtctctcctttcttctgctagtctatcccaagtttttcttcacctatccaccttggatcgtagcgtgatatggtctaaatctatactgaatgcgcgttgcaagatatgtcgaaagaaaggcgatgctgaaaacatggttctttgtgatggctgtgataggggtcatcatacctactgtgttcgaccaaagctcaagactgtgcctgaaggagactggttttgtccagaatgtcgaccaaagcaacgttctagaagactctcctctagacagagaccatccttggaaagtgatgaagatgtggaagacagtatgggaggtgaggatgatgaagttgatggcgatgaagaagaaggtcaaagtgaggaggaagagtatgaggtagaacaagatgaagatgactctcaagaagaggaagaagtcagcctacccaaacgaggaagaccacaagttagattgccagttaaaacaagagggaaacttagctcttctttctcaagtcgtggccaacaacaagaacctggaagatacccttcaaggagtcagcagagcacacccaaaacaactgtttcttctaaaactggtagaagcctaagaaagataaactctgctcctcctacagaaacaaaatctttaagaattgccagtcgttctactcgccacagtcatggcccactgcaagcagatgtatttgtggaattgcttagtcctcgtagaaaacgcagaggcaggaaaagtgctaataatacaccagaaaatagtcccaacttccctaacttcagagtcattgccacaaagtcaagtgaacagtcaagatctgtaaatattgcttcaaaactttctctccaagagagtgaatccaaaagaagatgcagaaaaagacaatctccagagccatcgcctgtgacactgggtcgaaggagttctggccgacagggaggagttcatgaattgtctgcttttgaacaacttgttgtagaattggtacgacatgatgacagctggccttttttgaaacttgtttctaaaatccaggtcccagactactatgacatcatcaaaaagcccattgccttaaatataattcgtgaaaaagtgaataagtgtgaatataaattagcatctgagtttattgatgacattgagttaatgttttcgaactgctttgaatacaaccctcgtaacacaagtgaagcaaaagctggaactaggcttcaagcattttttatattcaggctcaaaagcttggactccacgtcacacccagtaatgtggaccaagttagcacaccaccggctgcgaaaaagtcacgaatctgactttgtccttctaaaggatatatttgaagaaaaacaaattgttcatgaaaatggaacattaaatcatgctgtataa

SEQ ID NO: 3729 - DNA, 6102 bp, Homo sapiens
  source 1..6102: mol_type = unassigned DNA
cgggggaggaggggaatctcccgccatttttcaataatttcctccggtgctgctgaggaggagtcgtgactgccggccgccgggacccgaagcggaggtcggcggggggctgctgggaggcgcggcggtgtgcgcgggagctctgcgccgtggcgttccgctccatgactgtcgcgcggccgcgccggcggtgagggagccggagttcgcgccgccctctcacccctcccttcccccaccccacccccgggcgcctggcgctcgctccgggccgcggggcctagtgctgcgccgcggggccggccccagcagccgccagtccccaccgccgccgccgcgatggcgccgctcctgggccgcaagcccttcccgctggtgaagccgttgcccggagaggagccgctcttcaccatcccgcacactcaggaggccttccgcacccgggaagagtatgaagcccgcttggaaaggtacagtgagcgcatttggacgtgcaagagtactggaagcagtcagctaacacacaaggaagcctgggaggaagaacaggaagttgctgagcttttgaaggaggagtttcctgcctggtatgagaagcttgttctggaaatggttcaccataacacagcctccttagagaagttagtagatactgcttggttggagatcatgaccaaatatgctgtgggagaagagtgtgacttcgaggttgggaaggagaaaatgctcaaggtgaagattgtgaagattcatcctttggagaaagtggatgaagaggccactgagaagaaatctgatggtgcctgtgattctccatcaagtgacaaagagaactccagtcagattgctcaggaccatcagaagaaggagacagttgtgaaagaggatgaaggaaggagagagagtattaatgacagagcacgtagatcgccacgaaaacttcctacttcattaaaaaaaggagaaaggaaatgggctcctccaaaatttctgcctcacaaatatgatgtgaaactacaaaatgaagataagatcatcagtaacgtgccagcagacagcttgattcgtacagagcgcccaccaaataaggagatagttcgatactttatacggcataatgcattacgagctggtactggtgaaaatgcaccttgggtcgtagaagatgaattggtgaagaaatactctctgcccagcaagttcagtgactttttacttgatccatacaagtatatgactctcaacccttctactaagaggaagaatactggatccccagacaggaagccctcaaagaaatccaagacagacaactcttctcttagttcaccactaaatcctaagttatggtgtcacgtacacttgaagaagtcattgagtggctcgccactcaaagtgaagaactcaaagaattccaaatctcctgaagaacatctagaagaaatgatgaagatgatgtcgcccaataagctgcacactaactttcacattcctaaaaaaggcccacctgccaagaaaccagggaagcacagtgacaagcctttgaaggcaaagggcagaagcaaaggcatcctgaatggacagaaatccacagggaattccaaatctcccaaaaaaggactgaagactcctaaaaccaaaatgaagcagatgactttgttggatatggccaaaggcacgcagaagatgacacgagccccacggaattctgggggtacacctaggacctctagtaaacctcataaacatctgcctcctgcagccctacacctcattgcatactacaaagaaaacaaagacagggaggacaagaggagcgccctgtcctgtgttatctccaaaacagctcgtcttctctctagtgaagatagagctcgtctcccagaagaattgcgaagtcttgttcaaaaacgctatgaacttctagagcacaaaaagaggtgggcttctatgtctgaagaacaacggaaagaatatttgaaaaagaaacgggaggagctgaaaaagaagttgaaggaaaaagccaaagaacgaagagagaaagaaatgcttgagagattagaaaaacagaagcggtatgaggaccaagagttaactggcaaaaaccttccagcattcagattggtggatacccctgaagggctgcccaacacgctgtttggggatgtggccatggtggtggaattcttgagctgttattctgggctacttttaccagatgctcagtatcctattactgctgtgtcccttatggaagccttgagtgcagataagggtggctttttataccttaacagggtgttggtcatcctcttacagaccctcctacaagatgagatagcagaagactatggtgaattgggaatgaagctgtcggaaatccccttgactctgcattctgtttcagagctggtgcggctctgcttgcgcagatctgatgttcaggaggaaagcgagggctcagacacagatgacaataaagattcagctgcatttgaggataatgaggtacaagatgagttcctagaaaagctggagacctctgaattttttgagctgacgtcagaggagaagctacagatcttgacagcactgtgccaccggatcctcatgacatactcagtgcaagaccacatggagaccagacagcagatgtctgcagagttgtggaaggaacggcttgctgtgttgaaggaagaaaatgataagaagagagcagagaaacagaaacggaaagaaatggaagccaaaaataaagaaaatggaaaagttgagaatgggttaggcaaaactgataggaaaaaagaaattgtgaagtttgagccccaagtagatacagaagctgaagacatgattagtgctgtgaagagcagaaggttgcttgccattcaagctaagaaggaacgggaaatccaggaaagagaaatgaaagtgaaactggaacgccaagctgaagaagaacgaatacggaagcacaaagcagctgctgagaaagctttccaggaagggattgccaaggccaaactagtcatgcgcaggactcctattggcacagatcgaaaccataatagatactggctcttctcagatgaagttccaggattattcattgaaaaaggctgggtacatgacagcattgactaccgattcaaccatcactgcaaagaccacacagtctctggtgatgaggattactgtcctcgcagtaagaaagcaaacttaggtaaaaatgcaagcatgaacacacaacatggaacagcaacagaagttgctgtagagacaaccacacccaaacaaggacagaacctatggtttttatgtgatagtcaaaaggagctggatgagttgctaaactgtcttcaccctcagggaataagagaaagtcaacttaaagagagactagagaagaggtaccaggacattattcactctattcatctagcacggaagccaaatttgggtctaaaatcttgtgatggcaaccaggagcttttaaacttccttcgtagtgatctcattgaagttgcaacaaggttacaaaaaggaggacttggatatgtggaagaaacatcagaatttgaagcccgggtcatttcattagagaaattgaaggattttggtgagtgtgtgattgcccttcaggccagtgtcataaagaaatttctccaaggcttcatggctcccaagcaaaagagaagaaaactccaaagtgaagattcagcaaaaactgaggaagtggatgaagagaagaaaatggtagaggaagcaaaggttgcatctgcactggagaaatggaagacagcaatccgggaagctcagactttctccaggatgcacgtgctgcttgggatgcttgatgcctgtatcaagtgggatatgtccgcagaaaatgctaggtgcaaagtttgtcgaaagaaaggtgaggatgacaaattgatcttgtgtgatgagtgtaataaagccttccacctgttttgtctgaggccggccctctatgaagtaccagatggtgagtggcagtgcccagcttgccagcccgctactgccaggcgcaactcccgtggcaggaactatactgaagagtctgcttctgaggacagtgaagatgatgagagtgatgaagaggaggaggaggaagaagaggaggaggaggaagaagattatgaggtggctggtttgcgattgagacctcgaaagaccatccggggcaagcacagcgtcatcccccctgcagcaaggtcaggccggcgcccgggtaagaagccacactctaccaggaggtctcagcccaaggcaccacctgtggatgatgctgaggtggatgagctggtgcttcagaccaagcggagctcccggaggcaaagcctggagctgcagaagtgtgaagagatcctccacaagatcgtgaagtaccgcttcagctggcccttcagggagcctgtgaccagagatgaggccgaggactactatgatgtgatcacgcaccccatggactttcagacagtgcagaacaaatgttcctgtgggagctaccgctctgtgcaggagtttcttactgacatgaagcaagtgtttaccaatgctgaggtttacaactgccgtggcagccatgtgctaagctgcatggtgaagacagaacagtgtctagtggctctgttgcataaacaccttcctggccacccatatgtccgcaggaagcgcaagaagtttcctgataggcttgctgaagatgaaggggacagtgagccagaggccgttggacagtccaggggacgaagacagaagaagtagagaggcagggccgtggtgacagtatcagtgagtgccatacagaattgtgtattcaccagcatcatgaaacagttgtggtcttttgagttgatcttggcagagtaaagggacgtgtcctggagccattcctgaatctccccttctttgtgacagctcctcccacccccccaaaaaataaaaaaaccacaaaaaacaaaaaaacaaaactaaggcacttcacttagagactggagtcctgcttataatcatgcatataacctttactttgatggatctggccagaggggtgttggagcccagcccacccacataccagtcaagctcttaggggagcagaagaaaagcaggaagaatttaaatgtttaattttttttttaaattgacttttctagttattaaaagttgcttgtttcagcagtgatattgtataaagaacatcttgtaagatactcctgacatcttgctttagcacatgtacagtacagtttctatgataatgtgtttgctctaacttccctggcttctccttcagcccatccactctcctctagagcagttgggttggaggctcattgaggcaagcagcaacattggagggggagcagggcagtgctgtgtctgctgcctcccatgcccgttctgacctcagccttggaactcctcaagaacctgaagattccagtggtcagtgtcggtggggggtgggaggagagagcggcagagaagctctgagagccccttcccccacaacaaatctagctctagttgttatatttaggcaaaactttgtagtcttctttcccttttatgatggattttgataaaagtacaaaacagggtttttcttttttatcacctttgaatttggaaattttgagcacccaagctcttctgtacctatttaaagtccaccaaggggactgcagctcctagaacatgagaatcaagcctcttaattttaaactgcggaatgtggcctctgcttcctccgtcctcctgcccaaggacgacgaggattgctccagggctgctgggtagtttaccgtcccttctataggcatggagttggcactgacatcacagcttcataaccccaccaccgccagcttcccctgcctcctacatccagtctgttcttgttcatagtgagaatcctgtgttcccacttcagtgacacctgaattgtttgttgttgttttttttttttattgtcttcaaagaggaagggccccattaaagggtgaacttgtaataaattggaatttcaaataaacctcatgtacttgtgtttataaagaagaaaccactctg

SEQ ID NO: 3730 - DNA, 5428 bp, Homo sapiens
  source 1..5428: mol_type = unassigned DNA
cgggcccgggggaggaggggaatctcccgccatttttcaataatttcctccggtgctgctgaggaggagtcgtgactgccggccgccgggacccgaagcggaggtcggcggggggctgctgggaggcgcggcggtgtgcgcgggagctctgcgccgtggcgttccgctccatgactgtcgcgcggccgcgccggcggtgagggagccggagttcgcgccgccctctcacccctcccttcccccaccccacccccgggcgcctggcgctcgctccgggccgcggggcctagtgctgcgccgcggggccggccccagcagccgccagtccccaccgccgccgccgcgatggcgccgctcctgggccgcaagcccttcccgctggtgaagccgttgcccggagaggagccgctcttcaccatcccgcacactcaggaggccttccgcacccgggaagagtatgaagcccgcttggaaaggtacagtgagcgcatttggacgtgcaagagtactggaagcagtcagctaacacacaaggaagcctgggaggaagaacaggaagttgctgagcttttgaaggaggagtttcctgcctggtatgagaagcttgttctggaaatggttcaccataacacagcctccttagagaagttagtagatactgcttggttggagatcatgaccaaatatgctgtgggagaagagtgtgacttcgaggttgggaaggagaaaatgctcaaggtgaagattgtgaagattcatcctttggagaaagtggatgaagaggccactgagaagaaatctgatggtgcctgtgattctccatcaagtgacaaagagaactccagtcagattgctcaggaccatcagaagaaggagacagttgtgaaagaggatgaaggaaggagagagagtattaatgacagagcacgtagatcgccacgaaaacttcctacttcattaaaaaaaggagaaaggaaatgggctcctccaaaatttctgcctcacaaatatgatgtgaaactacaaaatgaagataagatcatcagtaacgtgccagcagacagcttgattcgtacagagcgcccaccaaataaggagatagttcgatactttatacggcataatgcattacgagctggtactggtgaaaatgcaccttgggtcgtagaagatgaattggtgaagaaatactctctgcccagcaagttcagtgactttttacttgatccatacaagtatatgactctcaacccttctactaagaggaagaatactggatccccagacaggaagccctcaaagaaatccaagacagacaactcttctcttagttcaccactaaatcctaagttatggtgtcacgtacacttgaagaagtcattgagtggctcgccactcaaagtgaagaactcaaagaattccaaatctcctgaagaacatctagaagaaatgatgaagatgatgtcgcccaataagctgcacactaactttcacattcctaaaaaaggcccacctgccaagaaaccagggaagcacagtgacaagcctttgaaggcaaagggcagaagcaaaggcatcctgaatggacagaaatccacagggaattccaaatctcccaaaaaaggactgaagactcctaaaaccaaaatgaagcagatgactttgttggatatggccaaaggcacgcagaagatgacacgagccccacggaattctgggggtacacctaggacctctagtaaacctcataaacatctgcctcctgcagccctacacctcattgcatactacaaagaaaacaaagacagggaggacaagaggagcgccctgtcctgtgttatctccaaaacagctcgtcttctctctagtgaagatagagctcgtctcccagaagaattgcgaagtcttgttcaaaaacgctatgaacttctagagcacaaaaagaggtgggcttctatgtctgaagaacaacggaaagaatatttgaaaaagaaacgggaggagctgaaaaagaagttgaaggaaaaagccaaagaacgaagagagaaagaaatgcttgagagattagaaaaacagaagcggtatgaggaccaagagttaactggcaaaaaccttccagcattcagattggtggatacccctgaagggctgcccaacacgctgtttggggatgtggccatggtggtggaattcttgagctgttattctgggctacttttaccagatgctcagtatcctattactgctgtgtcccttatggaagccttgagtgcagataagggtggctttttataccttaacagggtgttggtcatcctcttacagaccctcctacaagatgagatagcagaagactatggtgaattgggaatgaagctgtcggaaatccccttgactctgcattctgtttcagagctggtgcggctctgcttgcgcagatctgatgttcaggaggaaagcgagggctcagacacagatgacaataaagattcagctgcatttgaggataatgaggtacaagatgagttcctagaaaagctggagacctctgaattttttgagctgacgtcagaggagaagctacagatcttgacagcactgtgccaccggatcctcatgacatactcagtgcaagaccacatggagaccagacagcagatgtctgcagagttgtggaaggaacggcttgctgtgttgaaggaagaaaatgataagaagagagcagagaaacagaaacggaaagaaatggaagccaaaaataaagaaaatggaaaagttgagaatgggttaggcaaaactgataggaaaaaagaaattgtgaagtttgagccccaagtagatacagaagctgaagacatgattagtgctgtgaagagcagaaggttgcttgccattcaagctaagaaggaacgggaaatccaggaaagagaaatgaaagtgaaactggaacgccaagctgaagaagaacgaatacggaagcacaaagcagctgctgagaaagctttccaggaagggattgccaaggccaaactagtcatgcgcaggactcctattggcacagatcgaaaccataatagatactggctcttctcagatgaagttccaggattattcattgaaaaaggctgggtacatgacagcattgactaccgattcaaccatcactgcaaagaccacacagtctctggtgatgaggattactgtcctcgcagtaagaaagcaaacttaggtaaaaatgcaagcatgaacacacaacatggaacagcaacagaagttgctgtagagacaaccacacccaaacaaggacagaacctatggtttttatgtgatagtcaaaaggagctggatgagttgctaaactgtcttcaccctcagggaataagagaaagtcaacttaaagagagactagagaagaggtaccaggacattattcactctattcatctagcacggaagccaaatttgggtctaaaatcttgtgatggcaaccaggagcttttaaacttccttcgtagtgatctcattgaagttgcaacaaggttacaaaaaggaggacttggatatgtggaagaaacatcagaatttgaagcccgggtcatttcattagagaaattgaaggattttggtgagtgtgtgattgcccttcaggccagtgtcataaagaaatttctccaaggcttcatggctcccaagcaaaagagaagaaaactccaaagtgaagattcagcaaaaactgaggaagtggatgaagagaagaaaatggtagaggaagcaaaggttgcatctgcactggagaaatggaagacagcaatccgggaagctcagactttctccaggatgcacgtgctgcttgggatgcttgatgcctgtatcaagtgggatatgtccgcagaaaatgctaggtgcaaagtttgtcgaaagaaaggtgaggatgacaaattgatcttgtgtgatgagtgtaataaagccttccacctgttttgtctgaggccggccctctatgaagtaccagatggtgagtggcagtgcccagcttgccagcccgctactgccaggcgcaactcccgtggcaggaactatactgaagagtctgcttctgaggacagtgaagatgatgagagtgatgaagaggaggaggaggaagaagaggaggaggaggaagaagattatgaggtggctggtttgcgattgagacctcgaaagaccatccggggcaagcacagcgtcatcccccctgcagcaaggtcaggccggcgcccgggtaagaagccacactctaccaggaggtctcagcccaaggcaccacctgtggatgatgctgaggtggatgagctggtgcttcagaccaagcggagctcccggaggcaaagcctggagctgcagaagtgtgaagagatcctccacaagatcgtgaagtaccgcttcagctggcccttcagggagcctgtgaccagagatgaggccgaggactactatgatgtgatcacgcaccccatggactttcagacagtgcagaacaaatgttcctgtgggagctaccgctctgtgcaggagtttcttactgacatgaagcaagtgtttaccaatgctgaggtttacaactgccgtggcagccatgtgctaagctgcatggtgaagacagaacagtgtctagtggctctgttgcataaacaccttcctggccacccatatgtccgcaggaagcgcaagaagtttcctgataggcttgctgaagatgaaggggacagtgagccagaggccgttggacagtccaggggacgaagacagaagaagtagagaggcagggccgtggtaagggagctgaggtggggggacagctagggagggtgggagggaggcgagcgaggaagaccaagaacctggaagagatcacagggagtccagaaacgcctgtcatcccaagcttatgctgtttttctaaaagctctttatggggcttgatattgggttggtggtctttgtccagaaatatgaagggacaaagagggccataaccctcccttctgagagtttccaggaggagtccgagggtctagcttttctggtgaagccagttcctgttcctgccttctttcctaagggcctgctcgctctggcttccaccacagtgccaagcccctctggtctccaggggagggattgctgtgttacatagcaggatcggggtaatcaggccaacaggggagatggtggcgatttttcttttttaatctgtatttattatacagtcttgtttctttaagcccatactctgtctcttcccccgtcttcctctcaggtgacagtatcagtgagtgccatacagaattgtgtattcaccagcatcatgaaacagttgtggtcttttgagttgatcttggcagagtaaagggacgtgtcctggagccattcctgaatctccccttct

SEQ ID NO: 3731 - DNA, 8844 bp, Homo sapiens
  source 1..8844: mol_type = unassigned DNA
agtctgtcacacagggacatcaccctacagcagttcaggctgtgtggttcgcaggaagcatacactggctttttgattcttgctagttcccagctcacagtttgggaggatccaacaccaacctttacgtgaagtggaggcccaaggacagtgaggagctgggtggtcccagcctggagctgtgccagcctgacatggaaatggaggcaaacgaccattttaactttactggccttccccctgcacctgctgcctcaggactgaaaccctctccttcctcaggggagggcctctacactaacgggtctcccatgaacttcccccagcaagggaaaagtttgaatggggatgtgaatgttaatggcttatctactgtatctcacactactacttcagggattttgaactctgctccccactcctccagcacctcacacctccatcaccccagcgtggcctacgactgtctctggaactactcacagtacccatctgccaatcctggcagcaacctcaaggacccaccccttctctcccagttctcggggggacaatacccactcaacggcatccttgggggcagccggcaaccttcatccccaagtcataacactaaccttcgggctgggagccaagagttctgggccaacggtacccagagtcccatggggcttaactttgattcacaagaactgtatgattcctttcctgaccagaattttgaggaggtaggcagtggtatccatcctgatgaggcagcagaaaaggagatgacttcagttgtggcagagaatggcactggcttggtaggcagcttggagctggaagaagagcagccagaactgaagatgtgtggctacaatggctctgtcccttctgtggaatcgttacaccaagaggtctcagtcctggtccctgaccccacagtgagctgtttagatgatccttcacatcttcctgatcaactggaagacactccaatcctcagtgaagactctctggagcccttcaactctctggcaccagagccagtgagtggaggactatatggtattgatgacacggagctgatgggtgcagaggacaagctgcctcttgaggacagccctgtgatttctgcccttgattgcccttccctcaataatgctactgccttcagtctcctggcagatgatagtcaaacatcaacctctatctttgccagtcccacctctccacctgtcctaggggagtctgtcctgcaagataacagctttgacctgaataatggtagtgacgctgaacaggaagaaatggaaactcaatcttcagacttcccaccatccctgacccagccagctcctgatcagtcatccactattcagctacatccagcaacctcaccagcagtctcgccaacaacctccccagcagtctccctagtggtttctccagcagcctccccagaaatctctccagaagtttgtcccgcagcttctacagttgtctctccagcagtcttctcagtggtctctccagcttcctcagcagtcctcccagcagtctccttagaagtcccgttgacggcttcagtgacatccccaaaagcctctcccgtaacttccccagcagctgcctttccaacagcctccccagcaaataaggatgtcagcagctttctagaaaccactgctgacgtggaagagatcactggagaaggactcactgcttctggtagtggtgatgtcatgaggagacgtattgctaccccagaagaagttcgtcttcccctccaacatgggtggcggagagaggtgcgcatcaagaagggcagccaccgatggcagggggagacctggtattatggcccctgtgggaagaggatgaagcaatttccagaagtgatcaagtacctgagccgcaacgtggtacacagtgtccgccgagagcacttcagcttcagtccccgtatgcctgttggagatttctttgaagaaagagacacgccagagggcttgcagtgggtgcagctctcagcagaggagatcccgtcgaggattcaggcaattactggcaaacggggtcgacctcgaaacactgagaaggctaagactaaggaagtccccaaggtgaaacggggtcgaggtcggccacctaaggtcaaaatcactgagctattgaacaagacagacaaccgccccctaaagaaactggaggcccaagaaacattgaatgaggaggataaagcaaagattgctaaaagcaagaagaagatgaggcagaaggttcaacggggagagtgtcagactactatccaagggcaggccagaaataagcggaaacaagagaccaagagcttaaagcagaaggaagctaagaagaaatccaaggctgagaaagaaaaaggaaagacaaagcaggaaaaactgaaggaaaaagtcaagagggaaaagaaggagaaggtaaaaatgaaggaaaaggaggaggtgaccaaagccaagccagcctgtaaagcagataagaccctggccacacagaggcgcttggaggaacggcagaggcagcagatgatcttggaggaaatgaagaagccgacagaggatatgtgtctgactgaccaccagcccctgcctgacttctcacgagtccctggtctgacattgcccagtggagccttctcagactgcttgaccattgtggagttcctgcatagctttggcaaggtgctgggctttgatcctgccaaagatgtgcctagcctgggggtcctgcaggagggactcctgtgtcaaggtgacagcttgggtgaggtgcaagacctgctggtcaggctgctgaaggctgcactccatgatcctggctttccctcctactgtcagtccctaaagatcttgggggagaaggtgtctgagatcccactgacaagagacaatgtgtcagagatcctgcgctgcttccttatggcatatggagtagagccagccctctgtgaccgcctgcgcacccagccttttcaggcccagccaccccagcagaaggctgctgtcctggccttccttgtgcatgagctcaatggctccaccctcatcatcaatgagattgacaagactctggagagtatgtccagctacaggaaaaacaagtggattgttgaaggccggctccggaggctgaaaactgttctggccaagcgaactgggcggtctgaagtagagatggaagggccagaggaatgcctgggacggaggcgcagttctcggatcatggaggagaccagtggcatggaagaagaggaagaagaggagtctatagcagctgtccctggccgcaggggtcgaagagatggagaggttgatgccacagcatctagcatcccagagctagagcgccagatagaaaaactcagcaagcgtcagcttttctttcgcaaaaagctgcttcactcatcccagatgcttcgggcggtctccctgggtcaggaccgctacagacgtcgctactgggtattgccgtatttggctggtatctttgtagaaggaacagaggggaacttagttcctgaggaggtgataaagaaggaaactgactccttaaaagtggcagcccatgcgtcactcaaccctgccctcttctctatgaagatggagttagctggctccaacaccactgccagttctcctgcccgggcccgaggccgacctcgaaaaactaagcccgggtctatgcaacctaggcatcttaagtcccctgtcaggggtcaggattcagaacagccccaggcccagcttcagcctgaggctcagcttcatgctcctgcccagccccagcctcagcttcagcttcagcttcagtcccataaggggttcctggagcaagaaggctcccctttgtcactgggtcagagccagcatgacctcagccagtcagccttcctgtcttggctgagccagactcagagccatagctccctgttgagcagctcagtcctcacacctgatagcagtccgggaaaactagacccagctccatcacaacccccggaggagccagagcctgatgaggcagaatccagccctgatcctcaagcactctggtttaacatctcagcccagatgccctgcaatgctgcccccacaccgccccctgcagtttctgaggaccaacccactccctcccctcagcagcttgcctcctccaagccaatgaatagacctagtgctgccaacccttgttctccagtgcagttctcttccacgcccttggctgggttggcccctaagaggcgagcaggagaccctggagaaatgccacagagtcccacagggctgggacagcccaaacggagagggagacctcccagtaagttcttcaaacagatggaacagcgttacctaacccagctgacagcccagcctgtcccacctgagatgtgctcaggctggtggtggatacgagatcctgagatgttggatgccatgctcaaggccctacacccccgaggtatccgggagaaggcacttcacaaacaccttaacaagcacagggacttcttgcaggaagtctgcctgcggccctcagctgaccccatctttgagcccaggcaactacctgcctttcaagaagggattatgagctggtcccccaaagagaagacatacgagacagacctagcagtgcttcaatgggtagaggagctggagcagcgggttatcatgtctgatctgcagattcggggctggacatgtcctagcccagactctacccgtgaagacttggcctactgtgagcacctctccgactcccaggaggatatcacctggcgaggtcggggcagggagggactggcacctcagcgtaaaactaccaaccctttggacctggctgtgatgcggctggctgccctggaacagaatgtagaacggcggtacctgcgggagcccctctggccaactcatgaggttgtgctggagaaggccctgcttagcacacctaatggtgcccctgagggcaccactacagagatatcatatgagatcacccctcgcattcgtgtctggcgccagaccctcgagcggtgccggagcgcagcccaggtgtgcttgtgcctgggccagctggagaggtccattgcctgggagaagtctgtcaacaaagtgacatgtctagtctgccggaagggtgacaatgatgagtttcttctgctttgtgatgggtgtgaccgtggctgccacatttactgccatcgtcccaagatggaggctgtcccagaaggagattggttctgtactgtctgtttggctcagcaggtggagggagaattcactcagaagcctggtttcccaaagcgtggccagaagcggaaaagtggttattcgctgaacttctcagagggtgatggccgccgacgccgggtactgttgaggggccgagaaagcccagcagcagggcctcggtactcggaagaagggctctccccctccaagcggcggcgactctctatgcggaaccaccacagtgatctcacattttgcgagattatcctgatggagatggagtcccatgatgcagcctggcctttcctagagcctgtgaacccacgtttggtgagtgggtaccggcgcatcatcaaaaatcctatggatttttccaccatgcgggagcggctgctcaggggagggtacaccagctcagaggagtttgcggctgatgccctcctggtatttgacaactgccagactttcaacgaggatgactctgaagtaggcaaggctgggcacatcatgcgccgcttcttcgagagccgctgggaggagttttatcagggaaaacaggccaatctgtgaggcaagggaggtggggagtcaccttgtggcatctccccccaccttccaaacaaaaacctgccattttcacctgctgatgctgccctgggtccagactcaagtcagatacaaccctgatttttgaccttgcccttggcagtgccccacatcctcttattcctacatccctttctcccttccctcctcttgctcctcaagtaagaggtgcagagatgaggtccttctggactaaaagccaaaaaaagaaagaaaaaaataatttttcttttctgttttatttgctaattaaaaatggggagggggaaagtcgtccctacttcctcctccctgcttcctctcctcccctgtacgtgccccagcattctggggttatttaacaatagcaatagttctagtgaatgtgtgaaaccaagaaacactctgtactgtgtgcggacccgcagtgacggccagtaaagtggacttaactcccaagtgtgtcgcgccggacaccgggccctggacatgctgcttccatgttcagtcccttccctgcttctcgctgtctttcttttcccacctcccaccccccagttttcagattttctctcatccaataatgtaaaactatcgtgtacgggttcctccctccttttctcttctcccaaatcttttcccttcaaaggaaaaaaaaatgttcagaggtccctgtcttctgtccccatcttcctgccgatagctatcccctgtatgatgttggatgctcctcacatgctgagtttccagccttttctgaaactcagtagctggggagagggcagggaggcttcctgggccttccagcctccttccccacctccttcccaaaccctcttgggaactcctcagggacaactactgctgagtttgggtgcaccctaagatggaggccaggtagcaatggggccggcctcagagagagcgctgtgtgtgtgtgtgtgtgtgtgtgtgtgtgtgtgtgtcggcctcagagcgcgctgtgtgtgtgtgtgtgtgtgtcagcctcagagcgcgcgctgtgtgtgtgtgtgtgtgtgcgtgcttgtgaccctgtattgtttgataggatccattcagtttccccaagtacctgttttcattcccatttttcccattgtttaaaaccatcacttttttgtctttgggaaaccacaggaacaatttctctggagacaaggctgtgtctctctcctggtcatttttgttccagcctcttcagactgtgcaatctttcagcaggaactccctctcttctcggtagctttgaatcttaagcttctacgggagagtggtagaactggatcatttcctaatcccatttagttgtgcttttcttcatttacttcataccccaggaccccttccccagcagcagagaccctggagcacaggagagtagggaggaggggttctgggtccatcactgccctacatgtgactatgtccaagttaagcccccaacacgagaggaaagctgctgactcccagctatagccatgggcacttggccccctgcttttcctgctcagcagagcccctcccttcagagattacgggtacttgcactggggaggtggctgctggctggcccaagcagagagctgaggcatccaagaaatgttccattggggggtgggggtgccaggtgaggtggagcattccttgtattctggcagcactgaagagccactgaagggggtaggggcagtgtaggtcctggggcagcccctttattcctttatgccccttctccctcatagcctatttctaaagtcgccttttctgtcagataaacctcaaaacttttaattttatttgagatttttttttgcttttaagaggtggattgaagaatatttgaattgactttatattatgcataaatatttatattttatctaaataactgcgctgtaacaaactttgtgttagacagttgaaactgttagagttgggggctctgctttttccccctggcaattttcccctggtataagatgtgctagattaatttcattgtgaggtggatgggggagtgaaattgtgaggtggatgggggagtgaaatctccatggttcctgctttgtgttcctctcccagctccatctctttccctagggaccaggcactcatatggcggggtggggtcctagcctcagtttgaagaagtgggggctggagcggggttgggggtggtagggatagggcatgatcaaaggggccatttcttgcttttctttcctcatcttcactgcccccttgagctaggtggattttctcttcatgacaagagtatttggtagggaaagcaggtttaaaataaaaagacaacccaccccctgcccttttgcttccctcccatcagtctggttgacaggaagaaaccacaccatcaacaccaacaagtttctgtgttccttttacagcaaaagggactttttatataaccaaatgtggtgttttagtgactttttgataatgtacagttttttgtgaatttaaatttatttctttctatatttttaggaccaatctcatttttaataaggttaaaaagaaaaaaaaagtctagcgaaaaaactcctgtttttgccatgtgatgttccacaagtgcagctgtagaaaagtgcttgtcagttgttgaataaaaaaaaccacatttgatagagattcaaaagactctgtgtattcatcttcccttctacacacctgagggggagacggcgttgggataggtatgactggcttaagagaccacaggcaagggaacaacaggggctcctgttccataccctctgtgtggatggaaagggtcattagtgctcctgcctaaatgtctggctgagttgctggagcaaagggggattcagtgcatccaggtcctgccttgtgagatgtggccccagcttcctaagctgccacctctgtgttcctgtcatagcaaatatgggaccatcaccagcttaccacttcccactcacggataagacaccaagacgtagac

SEQ ID NO: 3732 - DNA, 2773 bp, Homo sapiens
  source 1..2773: mol_type = unassigned DNA
gtccctggccgcaggggtcgaagagatggagaggttgatgccacagcatctagcatcccagagctagagcgccagatagaaaaactcagcaagcgtcagcttttctttcgcaaaaagctgcttcactcatcccagatgcttcgggcggtctccctgggtcaggaccgctacagacgtcgctactgggtattgccgtatttggctggtatctttgtagaaggaacagaggggaacttagttcctgaggaggtgataaagaaggaaactgactccttaaaagtggcagcccatgcgtcactcaaccctgccctcttctctatgaagatggagttagctggctccaacaccactgccagttctcctgcccgggcccgaggccgacctcgaaaaactaagcccgggtctatgcaacctaggcatcttaagtcccctgtcaggggtcaggattcagaacagccccaggcccagcttcagcctgaggctcagcttcatgctcctgcccagccccagcctcagcttcagcttcagcttcagtcccataaggggttcctggagcaagaaggctcccctttgtcactgggtcagagccagcatgacctcagccagtcagccttcctgtcttggctgagccagactcagagccatagctccctgttgagcagctcagtcctcacacctgatagcagtccgggaaaactagacccagctccatcacaacccccggaggagccagagcctgatgaggcagaatccagccctgatcctcaagcactctggtttaacatctcagcccagatgccctgcaatgctgcccccacaccgccccctgcagtttctgaggaccaacccactccctcccctcagcagcttgcctcctccaagccaatgaatagacctagtgctgccaacccttgttctccagtgcagttctcttccacgcccttggctgggttggcccctaagaggcgagcaggagaccctggagaaatgccacagagtcccacagggctgggacagcccaaacggagagggagacctcccagtaagttcttcaaacagatggaacagcgttacctaacccagctgacagcccagcctgtcccacctggctggtggtggatacgagatcctgagatgttggatgccatgctcaaggccctacacccccgaggtatccgggagaaggcacttcacaaacaccttaacaagcacagggacttcttgcaggaagtctgcctgcggccctcagctgaccccatctttgagcccaggcaactacctgcctttcaagaagggattatgagctggtcccccaaagagaagacatacgagacagacctagcagtgcttcaatgggtagaggagctggagcagcgggttatcatgtctgatctgcagattcggggctggacatgtcctagcccagactctacccgtgaagacttggcctactgtgagcacctctccgactcccaggaggatatcacctggcgaggtcggggcagggagggactggcacctcagcgtaaaactaccaaccctttggacctggctgtgatgcggctggctgccctggaacagaatgtagaacggcggtacctgcgggagcccctctggccaactcatgaggttgtgctggagaaggccctgcttagcacacctaatggtgcccctgagggcaccactacagagatatcatatgagatcacccctcgcattcgtgtctggcgccagaccctcgagcggtgccggagcgcagcccaggtgtgcttgtgcctgggccagctggagaggtccattgcctgggagaagtctgtcaacaaagtgacatgtctagtctgccggaagggtgacaatgatgagtttcttctgctttgtgatgggtgtgaccgtggctgccacatttactgccatcgtcccaagatggaggctgtcccagaaggagattggttctgtactgtctgtttggctcagcaggtggagggagaattcactcagaagcctggtttcccaaagcgtggccagaagcggaaaagtggttattcgctgaacttctcagagggtgatggccgccgacgccgggtactgttgaggggccgagaaagcccagcagcagggcctcggtactcggaagaagggctctccccctccaagcggcggcgactctctatgcggaaccaccacagtgatctcacattttgcgagattatcctgatggagatggagtcccatgatgcagcctggcctttcctagagcctgtgaacccacgtttggtgagtgggtaccggcgcatcatcaaaaatcctatggatttttccaccatgcgggagcggctgctcaggggagggtacaccagctcagaggagtttgcggctgatgccctcctggtatttgacaactgccagactttcaacgaggatgactctgaagtaggcaaggctgggcacatcatgcgccgcttcttcgagagccgctgggaggagttttatcagggaaaacaggccaatctgtgaggcaagggaggtggggagtcaccttgtggcatctccccccaccttccaaacaaaaacctgccattttcacctgctgatgctgccctgggtccagactcaagtcagatacaaccctgatttttgaccttgcccttggcagtgccccacatcctcttattcctacatccctttctcccttccctcctcttgctcctcaagtaagaggtgcagagatgaggtccttctggactaaaagccaaaaaaagaaagaaaaaaataa

SEQ ID NO: 3733 - DNA, 8600 bp, Homo sapiens
  source 1..8600: mol_type = unassigned DNA
agtctgtcacacagggacatcaccctacagcagttcaggctgtgtggttcgcaggaagcatacactggctttttgattcttgctagttcccagctcacagtttgggaggatccaacaccaacctttacgtgaagtggaggcccaaggacagtgaggagctgggtggtcccagcctggagctgtgccagcctgacatggaaatggaggcaaacgaccattttaactttactggccttccccctgcacctgctgcctcaggactgaaaccctctccttcctcaggggagggcctctacactaacgggtctcccatgaacttcccccagcaagggaaaagtttgaatggggatgtgaatgttaatggcttatctactgtatctcacactactacttcagggattttgaactctgctccccactcctccagcacctcacacctccatcaccccagcgtggcctacgactgtctctggaactactcacagtacccatctgccaatcctggcagcaacctcaaggacccaccccttctctcccagttctcggggggacaatacccactcaacggcatccttgggggcagccggcaaccttcatccccaagtcataacactaaccttcgggctgggagccaagagttctgggccaacggtacccagagtcccatggggcttaactttgattcacaagaactgtatgattcctttcctgaccagaattttgaggtgatgcccaatggaccccctagttttttcacctccccacagacttctcctatgttgggatctagcattcaaacctttgcaccctcccaggaggtaggcagtggtatccatcctgatgaggcagcagaaaaggagatgacttcagttgtggcagagaatggcactggcttggtaggcagcttggagctggaagaagagcagccagaactgaagatgtgtggctacaatggctctgtcccttctgtggaatcgttacaccaagaggtctcagtcctggtccctgaccccacagtgagctgtttagatgatccttcacatcttcctgatcaactggaagacactccaatcctcagtgaagactctctggagcccttcaactctctggcaccagagccagtgagtggaggactatatggtattgatgacacggagctgatgggtgcagaggacaagctgcctcttgaggacagccctgtgatttctgcccttgattgcccttccctcaataatgctactgccttcagtctcctggcagatgatagtcaaacatcaacctctatctttgccagtcccacctctccacctgtcctaggggagtctgtcctgcaagataacagctttgacctgaataatggtagtgacgctgaacaggaagaaatggaaactcaatcttcagacttcccaccatccctgacccagccagctcctgatcagtcatccactattcagctacatccagcaacctcaccagcagtctcgccaacaacctccccagcagtctccctagtggtttctccagcagcctccccagaaatctctccagaagtttgtcccgcagcttctacagttgtctctccagcagtcttctcagtggtctctccagcttcctcagcagtcctcccagcagtctccttagaagtcccgttgacggcttcagtgacatccccaaaagcctctcccgtaacttccccagcagctgcctttccaacagcctccccagcaaataaggatgtcagcagctttctagaaaccactgctgacgtggaagagatcactggagaaggactcactgcttctggtagtggtgatgtcatgaggagacgtattgctaccccagaagaagttcgtcttcccctccaacatgggtggcggagagaggtgcgcatcaagaagggcagccaccgatggcagggggagacctggtattatggcccctgtgggaagaggatgaagcaatttccagaagtgatcaagtacctgagccgcaacgtggtacacagtgtccgccgagagcacttcagcttcagtccccgtatgcctgttggagatttctttgaagaaagagacacgccagagggcttgcagtgggtgcagctctcagcagaggagatcccgtcgaggattcaggcaattactggcaaacggggtcgacctcgaaacactgagaaggctaagactaaggaagtccccaaggtgaaacggggtcgaggtcggccacctaaggtcaaaatcactgagctattgaacaagacagacaaccgccccctaaagaaactggaggcccaagaaacattgaatgaggaggataaagcaaagattgctaaaagcaagaagaagatgaggcagaaggttcaacggggagagtgtcagactactatccaagggcaggccagaaataagcggaaacaagagaccaagagcttaaagcagaaggaagctaagaagaaatccaaggctgagaaagaaaaaggaaagacaaagcaggaaaaactgaaggaaaaagtcaagagggaaaagaaggagaaggtaaaaatgaaggaaaaggaggaggtgaccaaagccaagccagcctgtaaagcagataagaccctggccacacagaggcgcttggaggaacggcagaggcagcagatgatcttggaggaaatgaagaagccgacagaggatatgtgtctgactgaccaccagcccctgcctgacttctcacgagtccctggtctgacattgcccagtggagccttctcagactgcttgaccattgtggagttcctgcatagctttggcaaggtgctgggctttgatcctgccaaagatgtgcctagcctgggggtcctgcaggagggactcctgtgtcaaggtgacagcttgggtgaggtgcaagacctgctggtcaggctgctgaaggctgcactccatgatcctggctttccctcctactgtcagtccctaaagatcttgggggagaaggtgtctgagatcccactgacaagagacaatgtgtcagagatcctgcgctgcttccttatggcatatggagtagagccagccctctgtgaccgcctgcgcacccagccttttcaggcccagccaccccagcagaaggctgctgtcctggccttccttgtgcatgagctcaatggctccaccctcatcatcaatgagattgacaagactctggagagtatgtccagctacaggaaaaacaagtggattgttgaaggccggctccggaggctgaaaactgttctggccaagcgaactgggcggtctgaagtagagatggaagggccagaggaatgcctgggacggaggcgcagttctcggatcatggaggagaccagtggcatggaagaagaggaagaagaggagtctatagcagctgtccctggccgcaggggtcgaagagatggagaggttgatgccacagcatctagcatcccagagctagagcgccagatagaaaaactcagcaagcgtcagcttttctttcgcaaaaagctgcttcactcatcccagatgcttcgggcggtctccctgggtcaggaccgctacagacgtcgctactgggtattgccgtatttggctggtatctttgtagaaggaacagaggggaacttagttcctgaggaggtgataaagaaggaaactgactccttaaaagtggcagcccatgcgtcactcaaccctgccctcttctctatgaagatggagttagctggctccaacaccactgccagttctcctgcccgggcccgaggccgacctcgaaaaactaagcccgggtctatgcaacctaggcatcttaagtcccctgtcaggggtcaggattcagaacagccccaggcccagcttcagcctgaggctcagcttcatgctcctgcccagccccagcctcagcttcagcttcagcttcagtcccataaggggttcctggagcaagaaggctcccctttgtcactgggtcagagccagcatgacctcagccagtcagccttcctgtcttggctgagccagactcagagccatagctccctgttgagcagctcagtcctcacacctgatagcagtccgggaaaactagacccagctccatcacaacccccggaggagccagagcctgatgaggcagaatccagccctgatcctcaagcactctggtttaacatctcagcccagatgccctgcaatgctgcccccacaccgccccctgcagtttctgaggaccaacccactccctcccctcagcagcttgcctcctccaagccaatgaatagacctagtgctgccaacccttgttctccagtgcagttctcttccacgcccttggctgggttggcccctaagaggcgagcaggagaccctggagaaatgccacagagtcccacagggctgggacagcccaaacggagagggagacctcccagtaagttcttcaaacagatggaacagcgttacctaacccagctgacagcccagcctgtcccacctgagatgtgctcaggctggtggtggatacgagatcctgagatgttggatgccatgctcaaggccctacacccccgaggtatccgggagaaggcacttcacaaacaccttaacaagcacagggacttcttgcaggaagtctgcctgcggccctcagctgaccccatctttgagcccaggcaactacctgcctttcaagaagggattatgagctggtcccccaaagagaagacatacgagacagacctagcagtgcttcaatgggtagaggagctggagcagcgggttatcatgtctgatctgcagattcggggctggacatgtcctagcccagactctacccgtgaagacttggcctactgtgagcacctctccgactcccaggaggatatcacctggcgaggtcggggcagggagggactggcacctcagcgtaaaactaccaaccctttggacctggctgtgatgcggctggctgccctggaacagaatgtagaacggcggtacctgcgggagcccctctggccaactcatgaggttgtgctggagaaggccctgcttagcacacctaatggtgcccctgagggcaccactacagagatatcatatgagatcacccctcgcattcgtgtctggcgccagaccctcgagcggtgccggagcgcagcccaggtgtgcttgtgcctgggccagctggagaggtccattgcctgggagaagtctgtcaacaaagtgacatgtctagtctgccggaagggtgacaatgatgagtttcttctgctttgtgatgggtgtgaccgtggctgccacatttactgccatcgtcccaagatggaggctgtcccagaaggagattggttctgtactgtctgtttggctcagcaggtggagggagaattcactcagaagcctggtttcccaaagcgtggccagaagcggaaaagtggttattcgctgaacttctcagagggtgatggccgccgacgccgggtactgttgaggggccgagaaagcccagcagcagggcctcggtactcggaagaagggctctccccctccaagcggcggcgactctctatgcggaaccaccacagtgatctcacattttgcgagattatcctgatggagatggagtcccatgatgcagcctggcctttcctagagcctgtgaacccacgtttggtgagtgggtaccggcgcatcatcaaaaatcctatggatttttccaccatgcgggagcggctgctcaggggagggtacaccagctcagaggagtttgcggctgatgccctcctggtatttgacaactgccagactttcaacgaggatgactctgaagtaggcaaggctgggcacatcatgcgccgcttcttcgagagccgctgggaggagttttatcagggaaaacaggccaatctgtgaggcaagggaggtggggagtcaccttgtggcatctccccccaccttccaaacaaaaacctgccattttcacctgctgatgctgccctgggtccagactcaagtcagatacaaccctgatttttgaccttgcccttggcagtgccccacatcctcttattcctacatccctttctcccttccctcctcttgctcctcaagtaagaggtgcagagatgaggtccttctggactaaaagccaaaaaaagaaagaaaaaaataatttttcttttctgttttatttgctaattaaaaatggggagggggaaagtcgtccctacttcctcctccctgcttcctctcctcccctgtacgtgccccagcattctggggttatttaacaatagcaatagttctagtgaatgtgtgaaaccaagaaacactctgtactgtgtgcggacccgcagtgacggccagtaaagtggacttaactcccaagtgtgtcgcgccggacaccgggccctggacatgctgcttccatgttcagtcccttccctgcttctcgctgtctttcttttcccacctcccaccccccagttttcagattttctctcatccaataatgtaaaactatcgtgtacgggttcctccctccttttctcttctcccaaatcttttcccttcaaaggaaaaaaaaatgttcagaggtccctgtcttctgtccccatcttcctgccgatagctatcccctgtatgatgttggatgctcctcacatgctgagtttccagccttttctgaaactcagtagctggggagagggcagggaggcttcctgggccttccagcctccttccccacctccttcccaaaccctcttgggaactcctcagggacaactactgctgagtttgggtgcaccctaagatggaggccaggtagcaatggggccggcctcagagagagcgctgtgtgtgtgtgtgtgtgtgtgtgtgtgtgtgtgtgtcggcctcagagcgcgctgtgtgtgtgtgtgtgtgtgtcagcctcagagcgcgcgctgtgtgtgtgtgtgtgtgtgcgtgcttgtgaccctgtattgtttgataggatccattcagtttccccaagtacctgttttcattcccatttttcccattgtttaaaaccatcacttttttgtctttgggaaaccacaggaacaatttctctggagacaaggctgtgtctctctcctggtcatttttgttccagcctcttcagactgtgcaatctttcagcaggaactccctctcttctcggtagctttgaatcttaagcttctacgggagagtggtagaactggatcatttcctaatcccatttagttgtgcttttcttcatttacttcataccccaggaccccttccccagcagcagagaccctggagcacaggagagtagggaggaggggttctgggtccatcactgccctacatgtgactatgtccaagttaagcccccaacacgagaggaaagctgctgactcccagctatagccatgggcacttggccccctgcttttcctgctcagcagagcccctcccttcagagattacgggtacttgcactggggaggtggctgctggctggcccaagcagagagctgaggcatccaagaaatgttccattggggggtgggggtgccaggtgaggtggagcattccttgtattctggcagcactgaagagccactgaagggggtaggggcagtgtaggtcctggggcagcccctttattcctttatgccccttctccctcatagcctatttctaaagtcgccttttctgtcagataaacctcaaaacttttaattttatttgagatttttttttgcttttaagaggtggattgaagaatatttgaattgactttatattatgcataaatatttatattttatctaaataactgcgctgtaacaaactttgtgttagacagttgaaactgttagagttgggggctctgctttttccccctggcaattttcccctggtataagatgtgctagattaatttcattgtgaggtggatgggggagtgaaattgtgaggtggatgggggagtgaaatctccatggttcctgctttgtgttcctctcccagctccatctctttccctagggaccaggcactcatatggcggggtggggtcctagcctcagtttgaagaagtgggggctggagcggggttgggggtggtagggatagggcatgatcaaaggggccatttcttgcttttctttcctcatcttcactgcccccttgagctaggtggattttctcttcatgacaagagtatttggtagggaaagcaggtttaaaataaaaagacaacccaccccctgcccttttgcttccctcccatcagtctggttgacaggaagaaaccacaccatcaacaccaacaagtttctgtgttccttttacagcaaaagggactttttatataaccaaatgtggtgttttagtgactttttgataatgtacagttttttgtgaatttaaatttatttctttctatatttttaggaccaatctcatttttaataaggttaaaaagaaaaaaaaagtctagcgaaaaaactcctgtttttgccatgtgatgttccacaagtgcagctgtagaaaagtgcttgtcagttgttgaataaaaaaaaccacatttgatagaga

SEQ ID NO: 3734 - DNA, 7845 bp, Homo sapiens
  source 1..7845: mol_type = unassigned DNA
acttggttcatgaagccttcgcctagaagtgaagctgctgaacaaaccttgagaagaatcatctcctgcttcaatctgctgctggataggaactaatcagagagagagaggcggaagacggagaaggagggagtcgaaggctttcccgatcacaaatctcacctccactacaactctctttatacttttcttgcagaaataataatagaaataaggaggtggtggggtttccaaaaatcttaaccttcaaccatctggggaaaaggcaaaaatcccatctaccgcaactctcagttcgagagtaaaggtttcccaacagtgatgtcacaagattgaccacattgatcacaatatggagtctggagaacggttaccatcctcagcagcctcctctactacaccaacttcatcttcgacaccttctgtggcttcagtagtttcaaaaggtggcctttccactggagttgcttcacttagctctacaatcaacccatgtggacatttattcagaacagctggggatcaaccgtttaacctgtccacagtgtcgagtgccttcccaatggtcagccacccagtctttggtctacattcagccagctcagggcattcagaatttggtggtttggggacacttggtacacccacagccttagccgcacatccccaactagcatcttttccagaatggtggcgaacaactgatgctcatactcgtacaggagcaaccttctttccaccattactgggaattccaccactatttgctcccccagcccagaatcatgattcttcttcattccattcaaggacttcgggaaaaagtaatcgaaatggtcccgaaaaaggtgtaaatgggtcaataaatggaagtaatacatcatctgtaattggtatcaacacatctgtactatccactactgcttcaagttccatgggacaaactaaaagtacaagctcaggtggaggaaatcgaaaatgtaatcaggaacaaagcaaaaaccagcctttggatgctagagttgacaaaatcaaagataagaaaccaaggaagaaagcaatggaaagttctagcaacagtgatagtgattcaggcacatcatcagacacctcaagtgaaggcattagtagcagtgattcagatgatctagaagaagatgaagaagaagaagatcaaagtattgaagaaagtgaagatgatgattctgattcagagagtgaagcacaacataaaagtaacaaccaggtgctattacatggtatttcagacccaaaagcagatggacagaaagcaactgaaaaagcccaggaaaaaagaatacaccagccattacctcttgcgtctgaatcccagactcactcattccaatcccagcagaagcagcctcaggttttgtcacagcagcttccatttattttccaaagctctcaggcaaaggaggaatctgtgaacaaacacaccagtgtaatacagtctacgggattggtgtccaatgtgaaacctttatctttggtaaatcaagccaaaaaggaaacttacatgaaactcatagttccttctcctgatgttcttaaagcagggaataaaaatacctctgaagaatctagtttattgaccagtgaattgagatccaaacgggaacaatataaacaggcattcccatcacagttaaagaaacaagagtcatcgaagagcctgaagaaggttattgcagctttgtcaaatccaaaagcaacctctagttcaccagcacatccaaaacaaacattagaaaacaaccacccaaatccattcttgacaaatgcacttttaggtaatcaccaaccaaatggagttattcaaagtgtcattcaagaagctcctctagcacttactaccaaaactaaaatgcagagcaagattaatgaaaacattgctgctgcaagtagcacccctttttcctcacctgtaaatctgagtacaagtgggagaagaacccctggcaatcagacacctgtaatgccctctgcctctcccatcctgcatagtcaagggaaggaaaaagcagttagcaataatgtaaacccagtaaaaacacagcatcactcccatcctgcaaaatctttagtggaacaattcagaggaacagattcagacattcccagtagtaaagattctgaagattcaaatgaggatgaagaggaagatgatgaagaagaagatgaggaagatgatgaagatgatgaatctgatgacagccaatcaggcacttccaaaagaagaagagtaacagatgaacgtgaactgcgtattccattggaatatggctggcagagagagacaagaataagaaactttggagggcgccttcaaggagaagtagcatattatgctccatgtggaaagaaacttaggcagtaccctgaagtaataaagtatctcagcagaaatggaataatggatatctcaagggacaatttcagcttcagtgcaaaaataagagtgggtgacttctatgaagccagagatggaccgcagggaatgcagtggtgtcttttgaaagaagaggatgtcattcctcgtatcagggcaatggaaggtcgtagaggaagaccaccaaatccagatagacaacgagcaagagaggaatccaggatgagacgtcggaaaggtcgacctccaaatgttggcaatgctgaattcctagataacgcagatgcaaagttgctaagaaaactgcaagctcaagaaatagccaggcaagcagcacaaataaagcttttgagaaaacttcaaaagcaggaacaggctcgggttgctaaagaagccaaaaaacaacaagcaataatggctgctgaggagaagcggaagcaaaaagaacagataaagattatgaaacagcaggaaaaaattaagagaatacagcaaatcagaatggaaaaagaacttcgagctcagcaaattctagaggctaaaaagaaaaagaaggaagaagcggcaaatgccaaattattggaggccgagaaacgaataaaggaaaaagaaatgagaagacaacaagctgttcttctgaaacatcaggaacgagagcgaaggcgacaacacatgatgcttatgaaagctatggaagctcgtaaaaaagcagaagaaaaagagcggttgaaacaagaaaaacgtgatgagaaaagattaaataaagagcgtaaactagagcagcgaagattagaattagaaatggcaaaggaactaaagaagcctaatgaagacatgtgcttagcagaccaaaagcctttgccagagttgcctcgtattccaggacttgttctctctggaagtacattttcagactgtctcatggtggtgcagttcttacgaaactttggtaaagttttgggctttgatgtgaatattgatgttccaaacctgagtgttcttcaagagggattgctaaatataggggacagcatgggtgaagtacaagacttgcttgtgaggctcctctcagctgctgtatgtgatccaggtctaataacaggatacaaggctaaaacagctcttggagaacatttgctgaatgttggtgtgaatcgagacaatgtttccgagattttacagatatttatggaagcccactgtggacaaactgagcttactgaaagtctgaagaccaaagcttttcaggctcacactccagcacagaaagcttcagtcctggctttcctgatcaatgaactggcatgcagcaagagtgtggtcagtgaaatcgacaagaacattgattatatgtcaaacttgaggagagataaatgggtggtagaaggtaaactccgcaagctcagaatcattcatgctaagaaaacaggcaaaagagacacttcaggtggcattgatctgggagaagagcagcatcccttgggcacacccactccaggacgcaagcgaagaaggaagggaggagacagtgattatgacgatgatgatgacgatgacagtgatgaccaaggggatgaagatgatgaggatgaagaagataaagaagacaaaaaaggaaaaaagactgatatctgtgaagatgaggatgaaggtgaccaagcagcaagtgttgaagagctggaaaaacagattgaaaaactgagtaaacaacagagtcagtacagaaggaagctctttgatgcgtctcactcattgcgttcagtgatgtttggccaagatcgttacagacgccggtactggattcttccccaatgtggggggatttttgtagaaggcatggagagtggtgaaggactagaagaaattgcaaaagaaagagaaaaactgaaaaaggcagaaagtgtccagatcaaagaagaaatgtttgagacttctggggacagtttaaattgttcaaatacagatcactgtgaacaaaaggaagatcttaaagaaaaagataacacaaatctattccttcagaaacctggctctttttccaaattaagcaagcttttggaagtagctaagatgcctcctgagtcagaggttatgacccccaaaccaaatgctggtgcaaatgggtgcacgttgtcttatcagaacagtggaaaacattcactgggcagcgttcagtcaacagcaacgcaaagcaatgtggaaaaggcagactctaataatctgtttaatactggttcaagtggtccagggaagttctacagtcctctccccaatgaccagttactaaaaacgctgactgaaaagaatagacaatggtttagtcttttgccacgaacaccctgtgatgacacttcacttactcatgccgatatgtcaactgcttctttggtgactcctcagtctcagccaccatctaagtcaccttcacctaccccagctcctcttggatcttctgctcagaatcctgttggcttaaatccatttgctttatcacctcttcaggtgaaaggtggagtatctatgatgggacttcagttttgtggatggcccactggtgtggttacttctaatattccatttacatcatctgtacctagtctaggatcggggttagggttatcagaaggaaatggtaattcattcttgacttccaatgttgcttcaagtaaaagtgaatctccagtaccacagaatgaaaaggccacttcagctcaacctgcagctgttgaagtagcaaaaccagtagattttcctagtccaaaacctattccagaagaaatgcagtttggttggtggagaattattgacccagaggacctaaaagctttgctcaaagtgctgcatctcagaggaataagagaaaaggcattacaaaaacaaattcagaaacatttggattatattactcaagcctgcctcaagaataaggatgttgctattattgaactgaatgaaaatgaagaaaaccaagtaactcgagatattgtggagaactggtcagtagaagaacaagcaatggaaatggatttgagtgtccttcaacaggtagaagatctagaaaggagagttgcatcagcaagtttgcaagtgaagggttggatgtgtccagagcctgcatcagaaagggaggacttggtatattttgaacataaatcatttactaaattgtgcaaggagcatgatggagaatttactggcgaagacgaaagcagtgcacatgcactagaacggaagagtgacaaccccctagatatagctgtaaccaggctggctgatttggagcggaacattgaaagaagaattgaagaggatattgctccagggctcagggtatggagaagggcattatcagaagctcgcagtgctgcacaggtagctctgtgcattcagcaattacagaaatcaatagcatgggaaaaatcaattatgaaagtttactgccaaatctgtcgaaagggagataatgaagaactgcttcttctttgtgatggctgtgacaaaggctgtcatacctactgccatagacccaagattacaacaatcccagatggagactggttttgtccagcttgcattgctaaggcaagtggtcaaactctaaaaatcaaaaaacttcatgtcaaaggaaaaaagactaatgagtcaaagaaaggcaagaaggtaactttaacaggagatactgaagatgaagactctgcatctacaagtagttcactaaaaagaggaaacaaagacctcaagaaaagaaaaatggaggaaaacacttctattaacttgtcaaaacaagaaagttttacttcagttaagaaacctaaaagagatgactccaaggacctagctctttgcagtatgattctgactgaaatggaaactcatgaggatgcatggccttttctacttcctgtaaacttgaaacttgttcctggttataagaaagttattaagaagcctatggatttttccacaattagagagaaactaagtagtggacagtatccaaaccttgaaacctttgctctagatgtcaggcttgtttttgacaactgtgaaacatttaatgaagatgattctgatataggcagagctggccacaatatgaggaagtattttgaaaaaaagtggacagatactttcaaagtgagctgaagttataataatctctttatttttttccttctaaacaaggacaaatgagaccagcaatgtgaactgtatttacataaacgtgcaaggcacatacataatgactttctttttccttaagtataaaaaaaaagtatcagaagaatgataccatttttaaaggcttcattcctacaacaaccaaggccctcggttattggtttgtgtgatttatcagctaatttaggtagaacagggaagcacacccaaagaattttcaaaggaaagggtgttatagtgcaatagcaattaaaatatatcaaatcgcactgaatactcaacaccagagctctaatgtgggaaatggttctcctttccctctcaataaatatctatttttcatttttttactttgtagtttattttttagtgaatgtatttaattttatgaattatttatgattaaaccacatccagaatcttcgttttctgtgaaaaggaagaactagaaaattgctttaaatcttgaaaatacaaggaatgttttaaaatataaaacaaagccaagttaaactgtttacactgatgtgctataaaagcaccaaaaagaaactttactgtagagttacaagtacatttatatatatatgttgctgcatcacttgtgtagttaaattgtatttcaaaacagtgaaaaaattgacatgtatatactgttcattcttgtttatattaagtcttgttttaaatatgtattatgtgtatatattgtttgcagacattattgttcatgccttagaggattgtagcattttattttcgtctgaaggtaatgatagctatacagtctgtacagtaattatcctctaccaacactgtggcgtctccttaatcttggtagtgcctgcctttgaaacagggtgtaggggatattagttttccatttttctattttgttatataattttaagccaccagggcctaaattaaagtataatcatttgtatccatgtggaataaaattgtgacaatttcctacgcacacagtattttttcatagaaacatttccctcccatttgccttgcctcagaaataaatttaaaagacgtttgtaaccactgtgttttatctactgtgtgttgtggtggcctgttggaggcaaatagatcagattttttttgtacctacgtaagagtacttgaagttttatttaaaataaaatgttgtggaaaaggtagcattctttttttaggagtgttatttttcactatgtgtggcacggatacaataaaagacttttacaaactaa

SEQ ID NO: 3735 - DNA, 8043 bp, Homo sapiens
  source 1..8043: mol_type = unassigned DNA
acttggttcatgaagccttcgcctagaagtgaagctgctgaacaaaccttgagaagaatcatctcctgcttcaatctgctgctggataggaactaatcagagagagagaggcggaagacggagaaggagggagtcgaaggctttcccgatcacaaatctcacctccactacaactctctttatacttttcttgcagaaataataatagaaataaggaggtggtggggtttccaaaaatcttaaccttcaaccatctggggaaaaggcaaaaatcccatctaccgcaactctcagttcgagagtaaaggtttcccaacagtgatgtcacaagattgaccacattgatcacaatatggagtctggagaacggttaccatcctcagcagcctcctctactacaccaacttcatcttcgacaccttctgtggcttcagtagtttcaaaaggtggcctttccactggagttgcttcacttagctctacaatcaacccatgtggacatttattcagaacagctggggatcaaccgtttaacctgtccacagtgtcgagtgccttcccaatggtcagccacccagtctttggtctacattcagccagctcagggcattcagaatttggtggtttggggacacttggtacacccacagccttagccgcacatccccaactagcatcttttccaggtgcagaatggtggcgaacaactgatgctcatactcgtacaggagcaaccttctttccaccattactgggaattccaccactatttgctcccccagcccagaatcatgattcttcttcattccattcaaggacttcgggaaaaagtaatcgaaatggtcccgaaaaaggtgtaaatgggtcaataaatggaagtaatacatcatctgtaattggtatcaacacatctgtactatccactactgcttcaagttccatgggacaaactaaaagtacaagctcaggtggaggaaatcgaaaatgtaatcaggaacaaagcaaaaaccagcctttggatgctagagttgacaaaatcaaagataagaaaccaaggaagaaagcaatggaaagttctagcaacagtgatagtgattcaggcacatcatcagacacctcaagtgaaggcattagtagcagtgattcagatgatctagaagaagatgaagaagaagaagatcaaagtattgaagaaagtgaagatgatgattctgattcagagagtgaagcacaacataaaagtaacaaccaggtgctattacatggtatttcagacccaaaagcagatggacagaaagcaactgaaaaagcccaggaaaaaagaatacaccagccattacctcttgcgtctgaatcccagactcactcattccaatcccagcagaagcagcctcaggttttgtcacagcagcttccatttattttccaaagctctcaggcaaaggaggaatctgtgaacaaacacaccagtgtaatacagtctacgggattggtgtccaatgtgaaacctttatctttggtaaatcaagccaaaaaggaaacttacatgaaactcatagttccttctcctgatgttcttaaagcagggaataaaaatacctctgaagaatctagtttattgaccagtgaattgagatccaaacgggaacaatataaacaggcattcccatcacagttaaagaaacaagagtcatcgaagagcctgaagaaggttattgcagctttgtcaaatccaaaagcaacctctagttcaccagcacatccaaaacaaacattagaaaacaaccacccaaatccattcttgacaaatgcacttttaggtaatcaccaaccaaatggagttattcaaagtgtcattcaagaagctcctctagcacttactaccaaaactaaaatgcagagcaagattaatgaaaacattgctgctgcaagtagcacccctttttcctcacctgtaaatctgagtacaagtgggagaagaacccctggcaatcagacacctgtaatgccctctgcctctcccatcctgcatagtcaagggaaggaaaaagcagttagcaataatgtaaacccagtaaaaacacagcatcactcccatcctgcaaaatctttagtggaacaattcagaggaacagattcagacattcccagtagtaaagattctgaagattcaaatgaggatgaagaggaagatgatgaagaagaagatgaggaagatgatgaagatgatgaatctgatgacagccaatcagaatcagatagtaattcagaatcagatacagaaggatcagaagaagaagatgatgatgataaagaccaagatgaatcagatagtgatactgaaggagagaaaacttcaatgaaactgaataaaacaacttcctctgtcaaaagcccttccatgagtctcacaggtcactcaacacctcgtaacctccacatagcaaaagccccaggctctgctcctgctgccttatgttctgaatcccagtcacctgcttttcttggtacatcttcttccacacttacttcaagcccacactctggcacttccaaaagaagaagagtaacagatgaacgtgaactgcgtattccattggaatatggctggcagagagagacaagaataagaaactttggagggcgccttcaaggagaagtagcatattatgctccatgtggaaagaaacttaggcagtaccctgaagtaataaagggaatgcagtggtgtcttttgaaagaagaggatgtcattcctcgtatcagggcaatggaaggtcgtagaggaagaccaccaaatccagatagacaacgagcaagagaggaatccaggatgagacgtcggaaaggtcgacctccaaatgttggcaatgctgaattcctagataacgcagatgcaaagttgctaagaaaactgcaagctcaagaaatagccaggcaagcagcacaaataaagcttttgagaaaacttcaaaagcaggaacaggctcgggttgctaaagaagccaaaaaacaacaagcaataatggctgctgaggagaagcggaagcaaaaagaacagataaagattatgaaacagcaggaaaaaattaagagaatacagcaaatcagaatggaaaaagaacttcgagctcagcaaattctagaggctaaaaagaaaaagaaggaagaagcggcaaatgccaaattattggaggccgagaaacgaataaaggaaaaagaaatgagaagacaacaagctgttcttctgaaacatcaggaacgagagcgaaggcgacaacacatgatgcttatgaaagctatggaagctcgtaaaaaagcagaagaaaaagagcggttgaaacaagaaaaacgtgatgagaaaagattaaataaagagcgtaaactagagcagcgaagattagaattagaaatggcaaaggaactaaagaagcctaatgaagacatgtgcttagcagaccaaaagcctttgccagagttgcctcgtattccaggacttgttctctctggaagtacattttcagactgtctcatggtggtgcagttcttacgaaactttggtaaagttttgggctttgatgtgaatattgatgttccaaacctgagtgttcttcaagagggattgctaaatataggggacagcatgggtgaagtacaagacttgcttgtgaggctcctctcagctgctgtatgtgatccaggtctaataacaggatacaaggctaaaacagctcttggagaacatttgctgaatgttggtgtgaatcgagacaatgtttccgagattttacagatatttatggaagcccactgtggacaaactgagcttactgaaagtctgaagaccaaagcttttcaggctcacactccagcacagaaagcttcagtcctggctttcctgatcaatgaactggcatgcagcaagagtgtggtcagtgaaatcgacaagaacattgattatatgtcaaacttgaggagagataaatgggtggtagaaggtaaactccgcaagctcagaatcattcatgctaagaaaacaggcaaaagagacacttcaggtggcattgatctgggagaagagcagcatcccttgggcacacccactccaggacgcaagcgaagaaggaagggaggagacagtgattatgacgatgatgatgacgatgacagtgatgaccaaggggatgaagatgatgaggatgaagaagataaagaagacaaaaaaggaaaaaagactgatatctgtgaagatgaggatgaaggtgaccaagcagcaagtgttgaagagctggaaaaacagattgaaaaactgagtaaacaacagagtcagtacagaaggaagctctttgatgcgtctcactcattgcgttcagtgatgtttggccaagatcgttacagacgccggtactggattcttccccaatgtggggggatttttgtagaaggcatggagagtggtgaaggactagaagaaattgcaaaagaaagagaaaaactgaaaaaggcagaaagtgtccagatcaaagaagaaatgtttgagacttctggggacagtttaaattgttcaaatacagatcactgtgaacaaaaggaagatcttaaagaaaaagataacacaaatctattccttcagaaacctggctctttttccaaattaagcaagcttttggaagtagctaagatgcctcctgagtcagaggttatgacccccaaaccaaatgctggtgcaaatgggtgcacgttgtcttatcagaacagtggaaaacattcactgggcagcgttcagtcaacagcaacgcaaagcaatgtggaaaaggcagactctaataatctgtttaatactggttcaagtggtccagggaagttctacagtcctctccccaatgaccagttactaaaaacgctgactgaaaagaatagacaatggtttagtcttttgccacgaacaccctgtgatgacacttcacttactcatgccgatatgtcaactgcttctttggtgactcctcagtctcagccaccatctaagtcaccttcacctaccccagctcctcttggatcttctgctcagaatcctgttggcttaaatccatttgctttatcacctcttcaggtgaaaggtggagtatctatgatgggacttcagttttgtggatggcccactggtgtggttacttctaatattccatttacatcatctgtacctagtctaggatcggggttagggttatcagaaggaaatggtaattcattcttgacttccaatgttgcttcaagtaaaagtgaatctccagtaccacagaatgaaaaggccacttcagctcaacctgcagctgttgaagtagcaaaaccagtagattttcctagtccaaaacctattccagaagaaatgcagtttggttggtggagaattattgacccagaggacctaaaagctttgctcaaagtgctgcatctcagaggaataagagaaaaggcattacaaaaacaaattcagaaacatttggattatattactcaagcctgcctcaagaataaggatgttgctattattgaactgaatgaaaatgaagaaaaccaagtaactcgagatattgtggagaactggtcagtagaagaacaagcaatggaaatggatttgagtgtccttcaacaggtagaagatctagaaaggagagttgcatcagcaagtttgcaagtgaagggttggatgtgtccagagcctgcatcagaaagggaggacttggtatattttgaacataaatcatttactaaattgtgcaaggagcatgatggagaatttactggcgaagacgaaagcagtgcacatgcactagaacggaagagtgacaaccccctagatatagctgtaaccaggctggctgatttggagcggaacattgaaagaagaattgaagaggatattgctccagggctcagggtatggagaagggcattatcagaagctcgcagtgctgcacaggtagctctgtgcattcagcaattacagaaatcaatagcatgggaaaaatcaattatgaaagtttactgccaaatctgtcgaaagggagataatgaagaactgcttcttctttgtgatggctgtgacaaaggctgtcatacctactgccatagacccaagattacaacaatcccagatggagactggttttgtccagcttgcattgctaaggcaagtggtcaaactctaaaaatcaaaaaacttcatgtcaaaggaaaaaagactaatgagtcaaagaaaggcaagaaggtaactttaacaggagatactgaagatgaagactctgcatctacaagtagttcactaaaaagaggaaacaaagacctcaagaaaagaaaaatggaggaaaacacttctattaacttgtcaaaacaagaaagttttacttcagttaagaaacctaaaagagatgactccaaggacctagctctttgcagtatgattctgactgaaatggaaactcatgaggatgcatggccttttctacttcctgtaaacttgaaacttgttcctggttataagaaagttattaagaagcctatggatttttccacaattagagagaaactaagtagtggacagtatccaaaccttgaaacctttgctctagatgtcaggcttgtttttgacaactgtgaaacatttaatgaagatgattctgatataggcagagctggccacaatatgaggaagtattttgaaaaaaagtggacagatactttcaaagtgagctgaagttataataatctctttatttttttccttctaaacaaggacaaatgagaccagcaatgtgaactgtatttacataaacgtgcaaggcacatacataatgactttctttttccttaagtataaaaaaaaagtatcagaagaatgataccatttttaaaggcttcattcctacaacaaccaaggccctcggttattggtttgtgtgatttatcagctaatttaggtagaacagggaagcacacccaaagaattttcaaaggaaagggtgttatagtgcaatagcaattaaaatatatcaaatcgcactgaatactcaacaccagagctctaatgtgggaaatggttctcctttccctctcaataaatatctatttttcatttttttactttgtagtttattttttagtgaatgtatttaattttatgaattatttatgattaaaccacatccagaatcttcgttttctgtgaaaaggaagaactagaaaattgctttaaatcttgaaaatacaaggaatgttttaaaatataaaacaaagccaagttaaactgtttacactgatgtgctataaaagcaccaaaaagaaactttactgtagagttacaagtacatttatatatatatgttgctgcatcacttgtgtagttaaattgtatttcaaaacagtgaaaaaattgacatgtatatactgttcattcttgtttatattaagtcttgttttaaatatgtattatgtgtatatattgtttgcagacattattgttcatgccttagaggattgtagcattttattttcgtctgaaggtaatgatagctatacagtctgtacagtaattatcctctaccaacactgtggcgtctccttaatcttggtagtgcctgcctttgaaacagggtgtaggggatattagttttccatttttctattttgttatataattttaagccaccagggcctaaattaaagtataatcatttgtatccatgtggaataaaattgtgacaatttcctacgcacacagtattttttcatagaaacatttccctcccatttgccttgcctcagaaataaatttaaaagacgtttgtaaccactgtgttttatctactgtgtgttgtggtggcctgttggaggcaaatagatcagattttttttgtacctacgtaagagtacttgaagttttatttaaaataaaatgttgtggaaaaggtagcattctttttttaggagtgttatttttcactatgtgtggcacggatacaataaaagacttttacaaactaa

SEQ ID NO: 3736 - DNA, 8058 bp, Homo sapiens
  source 1..8058: mol_type = unassigned DNA
gaagccttgttggttgacgtcacttggttcatgaagccttcgcctagaagtgaagctgctgaacaaaccttgagaagaatcatctcctgcttcaatctgctgctggataggaactaatcagagagagagaggcggaagacggagaaggagggagtcgaaggctttcccgatcacaaatctcacctccactacaactctctttatacttttcttgcagaaataataatagaaataaggaggtggtggggtttccaaaaatcttaaccttcaaccatctggggaaaaggcaaaaatcccatctaccgcaactctcagttcgagagtaaaggtttcccaacagtgatgtcacaagattgaccacattgatcacaatatggagtctggagaacggttaccatcctcagcagcctcctctactacaccaacttcatcttcgacaccttctgtggcttcagtagtttcaaaaggtggcctttccactggagttgcttcacttagctctacaatcaacccatgtggacatttattcagaacagctggggatcaaccgtttaacctgtccacagtgtcgagtgccttcccaatggtcagccacccagtctttggtctacattcagccagctcagggcattcagaatttggtggtttggggacacttggtacacccacagccttagccgcacatccccaactagcatcttttccagaatggtggcgaacaactgatgctcatactcgtacaggagcaaccttctttccaccattactgggaattccaccactatttgctcccccagcccagaatcatgattcttcttcattccattcaaggacttcgggaaaaagtaatcgaaatggtcccgaaaaaggtgtaaatgggtcaataaatggaagtaatacatcatctgtaattggtatcaacacatctgtactatccactactgcttcaagttccatgggacaaactaaaagtacaagctcaggtggaggaaatcgaaaatgtaatcaggaacaaagcaaaaaccagcctttggatgctagagttgacaaaatcaaagataagaaaccaaggaagaaagcaatggaaagttctagcaacagtgatagtgattcaggcacatcatcagacacctcaagtgaaggcattagtagcagtgattcagatgatctagaagaagatgaagaagaagaagatcaaagtattgaagaaagtgaagatgatgattctgattcagagagtgaagcacaacataaaagtaacaaccaggtgctattacatggtatttcagacccaaaagcagatggacagaaagcaactgaaaaagcccaggaaaaaagaatacaccagccattacctcttgcgtctgaatcccagactcactcattccaatcccagcagaagcagcctcaggttttgtcacagcagcttccatttattttccaaagctctcaggcaaaggaggaatctgtgaacaaacacaccagtgtaatacagtctacgggattggtgtccaatgtgaaacctttatctttggtaaatcaagccaaaaaggaaacttacatgaaactcatagttccttctcctgatgttcttaaagcagggaataaaaatacctctgaagaatctagtttattgaccagtgaattgagatccaaacgggaacaatataaacaggcattcccatcacagttaaagaaacaagagtcatcgaagagcctgaagaaggttattgcagctttgtcaaatccaaaagcaacctctagttcaccagcacatccaaaacaaacattagaaaacaaccacccaaatccattcttgacaaatgcacttttaggtaatcaccaaccaaatggagttattcaaagtgtcattcaagaagctcctctagcacttactaccaaaactaaaatgcagagcaagattaatgaaaacattgctgctgcaagtagcacccctttttcctcacctgtaaatctgagtacaagtgggagaagaacccctggcaatcagacacctgtaatgccctctgcctctcccatcctgcatagtcaagggaaggaaaaagcagttagcaataatgtaaacccagtaaaaacacagcatcactcccatcctgcaaaatctttagtggaacaattcagaggaacagattcagacattcccagtagtaaagattctgaagattcaaatgaggatgaagaggaagatgatgaagaagaagatgaggaagatgatgaagatgatgaatctgatgacagccaatcagaatcagatagtaattcagaatcagatacagaaggatcagaagaagaagatgatgatgataaagaccaagatgaatcagatagtgatactgaaggagagaaaacttcaatgaaactgaataaaacaacttcctctgtcaaaagcccttccatgagtctcacaggtcactcaacacctcgtaacctccacatagcaaaagccccaggctctgctcctgctgccttatgttctgaatcccagtcacctgcttttcttggtacatcttcttccacacttacttcaagcccacactctggcacttccaaaagaagaagagtaacagatgaacgtgaactgcgtattccattggaatatggctggcagagagagacaagaataagaaactttggagggcgccttcaaggagaagtagcatattatgctccatgtggaaagaaacttaggcagtaccctgaagtaataaagggaatgcagtggtgtcttttgaaagaagaggatgtcattcctcgtatcagggcaatggaaggtcgtagaggaagaccaccaaatccagatagacaacgagcaagagaggaatccaggatgagacgtcggaaaggtcgacctccaaatgttggcaatgctgaattcctagataacgcagatgcaaagttgctaagaaaactgcaagctcaagaaatagccaggcaagcagcacaaataaagcttttgagaaaacttcaaaagcaggaacaggctcgggttgctaaagaagccaaaaaacaacaagcaataatggctgctgaggagaagcggaagcaaaaagaacagataaagattatgaaacagcaggaaaaaattaagagaatacagcaaatcagaatggaaaaagaacttcgagctcagcaaattctagaggctaaaaagaaaaagaaggaagaagcggcaaatgccaaattattggaggccgagaaacgaataaaggaaaaagaaatgagaagacaacaagctgttcttctgaaacatcaggaacgagagcgaaggcgacaacacatgatgcttatgaaagctatggaagctcgtaaaaaagcagaagaaaaagagcggttgaaacaagaaaaacgtgatgagaaaagattaaataaagagcgtaaactagagcagcgaagattagaattagaaatggcaaaggaactaaagaagcctaatgaagacatgtgcttagcagaccaaaagcctttgccagagttgcctcgtattccaggacttgttctctctggaagtacattttcagactgtctcatggtggtgcagttcttacgaaactttggtaaagttttgggctttgatgtgaatattgatgttccaaacctgagtgttcttcaagagggattgctaaatataggggacagcatgggtgaagtacaagacttgcttgtgaggctcctctcagctgctgtatgtgatccaggtctaataacaggatacaaggctaaaacagctcttggagaacatttgctgaatgttggtgtgaatcgagacaatgtttccgagattttacagatatttatggaagcccactgtggacaaactgagcttactgaaagtctgaagaccaaagcttttcaggctcacactccagcacagaaagcttcagtcctggctttcctgatcaatgaactggcatgcagcaagagtgtggtcagtgaaatcgacaagaacattgattatatgtcaaacttgaggagagataaatgggtggtagaaggtaaactccgcaagctcagaatcattcatgctaagaaaacaggcaaaagagacacttcaggtggcattgatctgggagaagagcagcatcccttgggcacacccactccaggacgcaagcgaagaaggaagggaggagacagtgattatgacgatgatgatgacgatgacagtgatgaccaaggggatgaagatgatgaggatgaagaagataaagaagacaaaaaaggaaaaaagactgatatctgtgaagatgaggatgaaggtgaccaagcagcaagtgttgaagagctggaaaaacagattgaaaaactgagtaaacaacagagtcagtacagaaggaagctctttgatgcgtctcactcattgcgttcagtgatgtttggccaagatcgttacagacgccggtactggattcttccccaatgtggggggatttttgtagaaggcatggagagtggtgaaggactagaagaaattgcaaaagaaagagaaaaactgaaaaaggcagaaagtgtccagatcaaagaagaaatgtttgagacttctggggacagtttaaattgttcaaatacagatcactgtgaacaaaaggaagatcttaaagaaaaagataacacaaatctattccttcagaaacctggctctttttccaaattaagcaagcttttggaagtagctaagatgcctcctgagtcagaggttatgacccccaaaccaaatgctggtgcaaatgggtgcacgttgtcttatcagaacagtggaaaacattcactgggcagcgttcagtcaacagcaacgcaaagcaatgtggaaaaggcagactctaataatctgtttaatactggttcaagtggtccagggaagttctacagtcctctccccaatgaccagttactaaaaacgctgactgaaaagaatagacaatggtttagtcttttgccacgaacaccctgtgatgacacttcacttactcatgccgatatgtcaactgcttctttggtgactcctcagtctcagccaccatctaagtcaccttcacctaccccagctcctcttggatcttctgctcagaatcctgttggcttaaatccatttgctttatcacctcttcaggtgaaaggtggagtatctatgatgggacttcagttttgtggatggcccactggtgtggttacttctaatattccatttacatcatctgtacctagtctaggatcggggttagggttatcagaaggaaatggtaattcattcttgacttccaatgttgcttcaagtaaaagtgaatctccagtaccacagaatgaaaaggccacttcagctcaacctgcagctgttgaagtagcaaaaccagtagattttcctagtccaaaacctattccagaagaaatgcagtttggttggtggagaattattgacccagaggacctaaaagctttgctcaaagtgctgcatctcagaggaataagagaaaaggcattacaaaaacaaattcagaaacatttggattatattactcaagcctgcctcaagaataaggatgttgctattattgaactgaatgaaaatgaagaaaaccaagtaactcgagatattgtggagaactggtcagtagaagaacaagcaatggaaatggatttgagtgtccttcaacaggtagaagatctagaaaggagagttgcatcagcaagtttgcaagtgaagggttggatgtgtccagagcctgcatcagaaagggaggacttggtatattttgaacataaatcatttactaaattgtgcaaggagcatgatggagaatttactggcgaagacgaaagcagtgcacatgcactagaacggaagagtgacaaccccctagatatagctgtaaccaggctggctgatttggagcggaacattgaaagaagaattgaagaggatattgctccagggctcagggtatggagaagggcattatcagaagctcgcagtgctgcacaggtagctctgtgcattcagcaattacagaaatcaatagcatgggaaaaatcaattatgaaagtttactgccaaatctgtcgaaagggagataatgaagaactgcttcttctttgtgatggctgtgacaaaggctgtcatacctactgccatagacccaagattacaacaatcccagatggagactggttttgtccagcttgcattgctaaggcaagtggtcaaactctaaaaatcaaaaaacttcatgtcaaaggaaaaaagactaatgagtcaaagaaaggcaagaaggtaactttaacaggagatactgaagatgaagactctgcatctacaagtagttcactaaaaagaggaaacaaagacctcaagaaaagaaaaatggaggaaaacacttctattaacttgtcaaaacaagaaagttttacttcagttaagaaacctaaaagagatgactccaaggacctagctctttgcagtatgattctgactgaaatggaaactcatgaggatgcatggccttttctacttcctgtaaacttgaaacttgttcctggttataagaaagttattaagaagcctatggatttttccacaattagagagaaactaagtagtggacagtatccaaaccttgaaacctttgctctagatgtcaggcttgtttttgacaactgtgaaacatttaatgaagatgattctgatataggcagagctggccacaatatgaggaagtattttgaaaaaaagtggacagatactttcaaagtgagctgaagttataataatctctttatttttttccttctaaacaaggacaaatgagaccagcaatgtgaactgtatttacataaacgtgcaaggcacatacataatgactttctttttccttaagtataaaaaaaaagtatcagaagaatgataccatttttaaaggcttcattcctacaacaaccaaggccctcggttattggtttgtgtgatttatcagctaatttaggtagaacagggaagcacacccaaagaattttcaaaggaaagggtgttatagtgcaatagcaattaaaatatatcaaatcgcactgaatactcaacaccagagctctaatgtgggaaatggttctcctttccctctcaataaatatctatttttcatttttttactttgtagtttattttttagtgaatgtatttaattttatgaattatttatgattaaaccacatccagaatcttcgttttctgtgaaaaggaagaactagaaaattgctttaaatcttgaaaatacaaggaatgttttaaaatataaaacaaagccaagttaaactgtttacactgatgtgctataaaagcaccaaaaagaaactttactgtagagttacaagtacatttatatatatatgttgctgcatcacttgtgtagttaaattgtatttcaaaacagtgaaaaaattgacatgtatatactgttcattcttgtttatattaagtcttgttttaaatatgtattatgtgtatatattgtttgcagacattattgttcatgccttagaggattgtagcattttattttcgtctgaaggtaatgatagctatacagtctgtacagtaattatcctctaccaacactgtggcgtctccttaatcttggtagtgcctgcctttgaaacagggtgtaggggatattagttttccatttttctattttgttatataattttaagccaccagggcctaaattaaagtataatcatttgtatccatgtggaataaaattgtgacaatttcctacgcacacagtattttttcatagaaacatttccctcccatttgccttgcctcagaaataaatttaaaagacgtttgtaaccactgtgttttatctactgtgtgttgtggtggcctgttggaggcaaatagatcagattttttttgtacctacgtaagagtacttgaagttttatttaaaataaaatgttgtggaaaaggtagcattctttttttaggagtgttatttttcactatgtgtggcacggatacaataaaagacttttacaaactaa

SEQ ID NO: 3737 - DNA, 8289 bp, Homo sapiens
  source 1..8289: mol_type = unassigned DNA
tcccttggctcctttaggagctgataggtcatttattattggaactgaaatggtataaacaattctctctctttttttcccttgttaacagcaactttcattgttagagagaggagagagagagaagccttgttggttgacgtcacttggttcatgaagccttcgcctagaagtgaagctgctgaacaaaccttgagaagaatcatctcctgcttcaatctgctgctggataggaactaatcagagagagagaggcggaagacggagaaggagggagtcgaaggctttcccgatcacaaatctcacctccactacaactctctttatacttttcttgcagaaataataatagaaataaggaggtggtggggtttccaaaaatcttaaccttcaaccatctggggaaaaggcaaaaatcccatctaccgcaactctcagttcgagagtaaaggtttcccaacagtgatgtcacaagattgaccacattgatcacaatatggagtctggagaacggttaccatcctcagcagcctcctctactacaccaacttcatcttcgacaccttctgtggcttcagtagtttcaaaaggtggcctttccactggagttgcttcacttagctctacaatcaacccatgtggacatttattcagaacagctggggatcaaccgtttaacctgtccacagtgtcgagtgccttcccaatggtcagccacccagtctttggtctacattcagccagctcagggcattcagaatttggtggtttggggacacttggtacacccacagccttagccgcacatccccaactagcatcttttccaggtgcagaatggtggcgaacaactgatgctcatactcgtacaggagcaaccttctttccaccattactgggaattccaccactatttgctcccccagcccagaatcatgattcttcttcattccattcaaggacttcgggaaaaagtaatcgaaatggtcccgaaaaaggtgtaaatgggtcaataaatggaagtaatacatcatctgtaattggtatcaacacatctgtactatccactactgcttcaagttccatgggacaaactaaaagtacaagctcaggtggaggaaatcgaaaatgtaatcaggaacaaagcaaaaaccagcctttggatgctagagttgacaaaatcaaagataagaaaccaaggaagaaagcaatggaaagttctagcaacagtgatagtgattcaggcacatcatcagacacctcaagtgaaggcattagtagcagtgattcagatgatctagaagaagatgaagaagaagaagatcaaagtattgaagaaagtgaagatgatgattctgattcagagagtgaagcacaacataaaagtaacaaccaggtgctattacatggtatttcagacccaaaagcagatggacagaaagcaactgaaaaagcccaggaaaaaagaatacaccagccattacctcttgcgtctgaatcccagactcactcattccaatcccagcagaagcagcctcaggttttgtcacagcagcttccatttattttccaaagctctcaggcaaaggaggaatctgtgaacaaacacaccagtgtaatacagtctacgggattggtgtccaatgtgaaacctttatctttggtaaatcaagccaaaaaggaaacttacatgaaactcatagttccttctcctgatgttcttaaagcagggaataaaaatacctctgaagaatctagtttattgaccagtgaattgagatccaaacgggaacaatataaacaggcattcccatcacagttaaagaaacaagagtcatcgaagagcctgaagaaggttattgcagctttgtcaaatccaaaagcaacctctagttcaccagcacatccaaaacaaacattagaaaacaaccacccaaatccattcttgacaaatgcacttttaggtaatcaccaaccaaatggagttattcaaagtgtcattcaagaagctcctctagcacttactaccaaaactaaaatgcagagcaagattaatgaaaacattgctgctgcaagtagcacccctttttcctcacctgtaaatctgagtacaagtgggagaagaacccctggcaatcagacacctgtaatgccctctgcctctcccatcctgcatagtcaagggaaggaaaaagcagttagcaataatgtaaacccagtaaaaacacagcatcactcccatcctgcaaaatctttagtggaacaattcagaggaacagattcagacattcccagtagtaaagattctgaagattcaaatgaggatgaagaggaagatgatgaagaagaagatgaggaagatgatgaagatgatgaatctgatgacagccaatcagaatcagatagtaattcagaatcagatacagaaggatcagaagaagaagatgatgatgataaagaccaagatgaatcagatagtgatactgaaggagagaaaacttcaatgaaactgaataaaacaacttcctctgtcaaaagcccttccatgagtctcacaggtcactcaacacctcgtaacctccacatagcaaaagccccaggctctgctcctgctgccttatgttctgaatcccagtcacctgcttttcttggtacatcttcttccacacttacttcaagcccacactctggcacttccaaaagaagaagagtaacagatgaacgtgaactgcgtattccattggaatatggctggcagagagagacaagaataagaaactttggagggcgccttcaaggagaagtagcatattatgctccatgtggaaagaaacttaggcagtaccctgaagtaataaagtatctcagcagaaatggaataatggatatctcaagggacaatttcagcttcagtgcaaaaataagagtgggtgacttctatgaagccagagatggaccgcagggaatgcagtggtgtcttttgaaagaagaggatgtcattcctcgtatcagggcaatggaaggtcgtagaggaagaccaccaaatccagatagacaacgagcaagagaggaatccaggatgagacgtcggaaaggtcgacctccaaatgttggcaatgctgaattcctagataacgcagatgcaaagttgctaagaaaactgcaagctcaagaaatagccaggcaagcagcacaaataaagcttttgagaaaacttcaaaagcaggaacaggctcgggttgctaaagaagccaaaaaacaacaagcaataatggctgctgaggagaagcggaagcaaaaagaacagataaagattatgaaacagcaggaaaaaattaagagaatacagcaaatcagaatggaaaaagaacttcgagctcagcaaattctagaggctaaaaagaaaaagaaggaagaagcggcaaatgccaaattattggaggccgagaaacgaataaaggaaaaagaaatgagaagacaacaagctgttcttctgaaacatcaggaacgagagcgaaggcgacaacacatgatgcttatgaaagctatggaagctcgtaaaaaagcagaagaaaaagagcggttgaaacaagaaaaacgtgatgagaaaagattaaataaagagcgtaaactagagcagcgaagattagaattagaaatggcaaaggaactaaagaagcctaatgaagacatgtgcttagcagaccaaaagcctttgccagagttgcctcgtattccaggacttgttctctctggaagtacattttcagactgtctcatggtggtgcagttcttacgaaactttggtaaagttttgggctttgatgtgaatattgatgttccaaacctgagtgttcttcaagagggattgctaaatataggggacagcatgggtgaagtacaagacttgcttgtgaggctcctctcagctgctgtatgtgatccaggtctaataacaggatacaaggctaaaacagctcttggagaacatttgctgaatgttggtgtgaatcgagacaatgtttccgagattttacagatatttatggaagcccactgtggacaaactgagcttactgaaagtctgaagaccaaagcttttcaggctcacactccagcacagaaagcttcagtcctggctttcctgatcaatgaactggcatgcagcaagagtgtggtcagtgaaatcgacaagaacattgattatatgtcaaacttgaggagagataaatgggtggtagaaggtaaactccgcaagctcagaatcattcatgctaagaaaacaggcaaaagagacacttcaggtggcattgatctgggagaagagcagcatcccttgggcacacccactccaggacgcaagcgaagaaggaagggaggagacagtgattatgacgatgatgatgacgatgacagtgatgaccaaggggatgaagatgatgaggatgaagaagataaagaagacaaaaaaggaaaaaagactgatatctgtgaagatgaggatgaaggtgaccaagcagcaagtgttgaagagctggaaaaacagattgaaaaactgagtaaacaacagagtcagtacagaaggaagctctttgatgcgtctcactcattgcgttcagtgatgtttggccaagatcgttacagacgccggtactggattcttccccaatgtggggggatttttgtagaaggcatggagagtggtgaaggactagaagaaattgcaaaagaaagagaaaaactgaaaaaggcagaaagtgtccagatcaaagaagaaatgtttgagacttctggggacagtttaaattgttcaaatacagatcactgtgaacaaaaggaagatcttaaagaaaaagataacacaaatctattccttcagaaacctggctctttttccaaattaagcaagcttttggaagtagctaagatgcctcctgagtcagaggttatgacccccaaaccaaatgctggtgcaaatgggtgcacgttgtcttatcagaacagtggaaaacattcactgggcagcgttcagtcaacagcaacgcaaagcaatgtggaaaaggcagactctaataatctgtttaatactggttcaagtggtccagggaagttctacagtcctctccccaatgaccagttactaaaaacgctgactgaaaagaatagacaatggtttagtcttttgccacgaacaccctgtgatgacacttcacttactcatgccgatatgtcaactgcttctttggtgactcctcagtctcagccaccatctaagtcaccttcacctaccccagctcctcttggatcttctgctcagaatcctgttggcttaaatccatttgctttatcacctcttcaggtgaaaggtggagtatctatgatgggacttcagttttgtggatggcccactggtgtggttacttctaatattccatttacatcatctgtacctagtctaggatcggggttagggttatcagaaggaaatggtaattcattcttgacttccaatgttgcttcaagtaaaagtgaatctccagtaccacagaatgaaaaggccacttcagctcaacctgcagctgttgaagtagcaaaaccagtagattttcctagtccaaaacctattccagaagaaatgcagtttggttggtggagaattattgacccagaggacctaaaagctttgctcaaagtgctgcatctcagaggaataagagaaaaggcattacaaaaacaaattcagaaacatttggattatattactcaagcctgcctcaagaataaggatgttgctattattgaactgaatgaaaatgaagaaaaccaagtaactcgagatattgtggagaactggtcagtagaagaacaagcaatggaaatggatttgagtgtccttcaacaggtagaagatctagaaaggagagttgcatcagcaagtttgcaagtgaagggttggatgtgtccagagcctgcatcagaaagggaggacttggtatattttgaacataaatcatttactaaattgtgcaaggagcatgatggagaatttactggcgaagacgaaagcagtgcacatgcactagaacggaagagtgacaaccccctagatatagctgtaaccaggctggctgatttggagcggaacattgaaagaagaattgaagaggatattgctccagggctcagggtatggagaagggcattatcagaagctcgcagtgctgcacaggtagctctgtgcattcagcaattacagaaatcaatagcatgggaaaaatcaattatgaaagtttactgccaaatctgtcgaaagggagataatgaagaactgcttcttctttgtgatggctgtgacaaaggctgtcatacctactgccatagacccaagattacaacaatcccagatggagactggttttgtccagcttgcattgctaaggcaagtggtcaaactctaaaaatcaaaaaacttcatgtcaaaggaaaaaagactaatgagtcaaagaaaggcaagaaggtaactttaacaggagatactgaagatgaagactctgcatctacaagtagttcactaaaaagaggaaacaaagacctcaagaaaagaaaaatggaggaaaacacttctattaacttgtcaaaacaagaaagttttacttcagttaagaaacctaaaagagatgactccaaggacctagctctttgcagtatgattctgactgaaatggaaactcatgaggatgcatggccttttctacttcctgtaaacttgaaacttgttcctggttataagaaagttattaagaagcctatggatttttccacaattagagagaaactaagtagtggacagtatccaaaccttgaaacctttgctctagatgtcaggcttgtttttgacaactgtgaaacatttaatgaagatgattctgatataggcagagctggccacaatatgaggaagtattttgaaaaaaagtggacagatactttcaaagtgagctgaagttataataatctctttatttttttccttctaaacaaggacaaatgagaccagcaatgtgaactgtatttacataaacgtgcaaggcacatacataatgactttctttttccttaagtataaaaaaaaagtatcagaagaatgataccatttttaaaggcttcattcctacaacaaccaaggccctcggttattggtttgtgtgatttatcagctaatttaggtagaacagggaagcacacccaaagaattttcaaaggaaagggtgttatagtgcaatagcaattaaaatatatcaaatcgcactgaatactcaacaccagagctctaatgtgggaaatggttctcctttccctctcaataaatatctatttttcatttttttactttgtagtttattttttagtgaatgtatttaattttatgaattatttatgattaaaccacatccagaatcttcgttttctgtgaaaaggaagaactagaaaattgctttaaatcttgaaaatacaaggaatgttttaaaatataaaacaaagccaagttaaactgtttacactgatgtgctataaaagcaccaaaaagaaactttactgtagagttacaagtacatttatatatatatgttgctgcatcacttgtgtagttaaattgtatttcaaaacagtgaaaaaattgacatgtatatactgttcattcttgtttatattaagtcttgttttaaatatgtattatgtgtatatattgtttgcagacattattgttcatgccttagaggattgtagcattttattttcgtctgaaggtaatgatagctatacagtctgtacagtaattatcctctaccaacactgtggcgtctccttaatcttggtagtgcctgcctttgaaacagggtgtaggggatattagttttccatttttctattttgttatataattttaagccaccagggcctaaattaaagtataatcatttgtatccatgtggaataaaattgtgacaatttcctacgcacacagtattttttcatagaaacatttccctcccatttgccttgcctcagaaataaatttaaaagacgtttgtaaccactgtgttttatctactgtgtgttgtggtggcctgttggaggcaaatagatcagattttttttgtacctacgtaagagtacttgaagttttatttaaaataaaatgttgtggaaaaggtagcattctttttttaggagtgttatttttcactatgtgtggcacggatacaataaaagacttttacaaactaa

SEQ ID NO: 3738 - DNA, 640 bp, Homo sapiens
  source 1..640: mol_type = unassigned DNA
ccggcttgggcctctagctctcccgtgtgtagctggaggctctgagtttactgaagatgagcgggggtgggggtggggcaggtgggattgggaaaagatctggatacctgggaaggtctatgtcagcacgcagaaggtttgaggagcattgcttctcatacagtaaggtttcccaacagtgatgtcacaagattgaccacattgatcacaatatggagtctggagaacggttaccatcctcagcagcctcctctactacaccaacttcatcttcgacaccttctgtggcttcagtagtttcaaaaggtggcctttccactggagttgcttcacttagctctacaatcaacccatgtggacatttattcagaacagctggggatcaaccgtttaacctgtccacagtgtcgagtgccttcccaatggtcagccacccagtctttggtctacattcagccagctcagggcattcagaatttggtggtttggggacacttggtacacccacagccttagccgcacatccccaactagcatcttttccaggtgcagaatggtggcgaacaactgatgctcatactcgtacaggagcaaccttctttccaccattactgggaattccaccactatttgctccccc

SEQ ID NO: 3739 - DNA, 1912 bp, Homo sapiens
  source 1..1912: mol_type = unassigned DNA
acttggttcatgaagccttcgcctagaagtgaagctgctgaacaaaccttgagaagaatcatctcctgcttcaatctgctgctggataggaactaatcagagagagagaggcggaagacggagaaggagggagtcgaaggctttcccgatcacaaatctcacctccactacaactctctttatacttttcttgcagaaataataatagaaataaggaggtggtggggtttccaaaaatcttaaccttcaaccatctggggaaaaggcaaaaatcccatctaccgcaactctcagttcgagagtaaaggtttcccaacagtgatgtcacaagattgaccacattgatcacaatatggagtctggagaacggttaccatcctcagcagcctcctctactacaccaacttcatcttcgacaccttctgtggcttcagtagtttcaaaaggtggcctttccactggagttgcttcacttagctctacaatcaacccatgtggtgcagaatggtggcgaacaactgatgctcatactcgtacaggagcaaccttctttccaccattactgggaattccaccactatttgctcccccagcccagaatcatgattcttcttcattccattcaaggacttcgggaaaaagtaatcgaaatggtcccgaaaaaggtgtaaatgggtcaataaatggaagtaatacatcatctgtaattggtatcaacacatctgtactatccactactgcttcaagttccatgggacaaactaaaagtacaagctcaggtggaggaaatcgaaaatgtaatcaggaacaaagcaaaaaccagcctttggatgctagagttgacaaaatcaaagataagaaaccaaggaagaaagcaatggaaagttctagcaacagtgatagtgattcaggcacatcatcagacacctcaagtgaaggcattagtagcagtgattcagatgatctagaagaagatgaagaagaagaagatcaaagtattgaagaaagtgaagatgatgattctgattcagagagtgaagcacaacataaaagtaacaaccaggtgctattacatggtatttcagacccaaaagcagatggacagaaagcaactgaaaaagcccaggaaaaaagaatacaccagccattacctcttgcgtctgaatcccagactcactcattccaatcccagcagaagcagcctcaggttttgtcacagcagcttccatttattttccaaagctctcaggcaaaggaggaatctgtgaacaaacacaccagtgtaatacagtctacgggattggtgtccaatgtgaaacctttatctttggtaaatcaagccaaaaaggaaacttacatgaaactcatagttccttctcctgatgttcttaaagcagggaataaaaatacctctgaagaatctagtttattgaccagtgaattgagatccaaacgggaacaatataaacaggcattcccatcacagttaaagaaacaagagtcatcgaagagcctgaagaaggttattgcagctttgtcaaatccaaaagcaacctctagttcaccagcacatccaaaacaaacattagaaaacaaccacccaaatccattcttgacaaatgcacttttaggtaatcaccaaccaaatggagttattcaaagtgtcattcaagaagctcctctagcacttactaccaaaactaaaatgcagagcaagattaatgaaaacattgctgctgcaagtagcacccctttttcctcacctgtaaatctgagtacaagtgggagaagaacccctggcaatcagacacctgtaatgccctctgcctctcccatcctgcatagtcaagggaaggaaaaagcagttagcaataatgtaaacccaaggaagatgatgaagaagaagatgagg

SEQ ID NO: 3740 - DNA, 4710 bp, Homo sapiens
  source 1..4710: mol_type = unassigned DNA
cgtcgccgccgctgctgccgccgccgctgccacagcctttgccgccacggtctccgccgccgctgtcctcgcgctgcctctgggagcctccattgttccagcagcgcccggtcccgagaccgggcatcttgggggctcgcgaaacgggcggcggccgacggagttgagaccccagggcgccggcgggaccaggagcggcaggggtcagctcaggaatcccggggagccgggaccaaagcgtggggcggcagggggccggggtggcgaggtctacggtctccggagttggggctcccccttcccggcccgactttccccgccgacctccccaagtggggtcggagccccggcgggcgcccccggcgatgagcccggactcgaggtggccgatgtgacagcatgggggtggactttgatgtgaagactttctgccacaacttgcgggcgactaagccaccatacgagtgcccggtggagacctgccgaaaggtctacaagagttacagtggtattgagtaccacctgtaccactatgaccacgacaacccaccacccccacaacaaactccactccgcaagcacaagaaaaaggggcgccagtcacgcccagccaacaagcagtcacccagcccctcagaggtctcacagtcaccaggccgtgaggtgatgagctatgcacaggcccagcgcatggtggaggtggacttgcatggccgcgtccaccgcatcagcatctttgacaacctggatgtggtgtcagaggatgaggaagcccccgaggaggcccctgagaatggcagcaacaaggagaacactgagacaccagctgctactcccaagtcaggcaaacataagaacaaggagaagcgcaaggactccaaccatcaccaccaccacaatgtttctgcgagcaccactcccaagctgccagaggtggtctatcgggagctggaacaggacacccctgatgccccaccccggccaacttcctattaccggtacatcgagaagtctgcagaggagctggacgaggaagtagagtatgacatggacgaggaggactacatctggctggatatcatgaatgagcgtcggaagacagagggtgtaagtcccatcccgcaggagatctttgagtacctaatggaccgactggagaaggagtcgtactttgagagtcataataaaggcgaccctaatgcgctagtggacgaggatgctgtttgctgtatctgcaatgatggtgagtgccagaacagcaatgtcatcctcttctgtgacatgtgcaacctggccgtgcaccaggagtgctacggtgtcccctatatccctgagggccagtggctgtgccgccgttgcctgcagtcaccctctcgtgctgtggattgtgccctgtgccccaacaagggcggtgccttcaagcagacagatgacgggcgctgggcccatgtggtgtgtgccttgtggatccctgaggtctgcttcgccaacacggtcttcctagagcctattgacagcattgagcacatcccaccagctcgctggaagctcacctgctacatttgcaaacaacggggctcaggggcctgcatccagtgccacaaggccaactgttacacagctttccatgtgacatgcgcccagcaggctggcctttacatgaagatggagcctgtgcgggagacaggcgccaacggcacctctttcagtgtccgcaagacagcctactgcgacatccacacgcctccaggttcagcacgccgactgcctgccctgtcccacagcgagggtgaggaggatgaagatgaggaggaggatgagggtaagggctggagctcagagaaagtcaagaaggccaaggccaagtcccggatcaaaatgaagaaggcacggaagatcctggcagagaagcgggcagcagcacctgtggtgtcagtgccctgcatcccaccacacaggcttagtaaaatcaccaaccgcctgaccatccaaaggaagagccagttcatgcagaggctgcacagctactggacactgaagcggcagtcacggaatggggtcccattgctacgtcgcctgcagacacacctgcaatctcagaggaactgtgaccaagttgggagagattctgaggataagaactgggcccttaaagaacagctcaagtcctggcagcggctccggcatgacttggagcgagctcggctgctcgtggaattgatccgcaagcgggaaaaactcaaaagggagacgatcaaggttcagcagattgccatggagatgcagctgactcctttcctcatcctccttcgcaaaaccttggagcagctccaagagaaggacacaggcaacatcttcagcgagccggtccctctgtctgaggtacctgactacctagaccacatcaaaaagcccatggactttttcaccatgaagcagaacttggaggcttaccgctacctgaattttgatgattttgaggaggacttcaacctcatcgtcagcaactgcctcaagtataacgccaaggacaccatcttctaccgggcagcagtgcggcttcgtgagcagggtggtgctgtgctccgccaggcccggcgccaggcagaaaaaatgggcattgactttgagacgggcatgcatatcccccacagcctggctggagatgaggccacacaccacactgaagatgcagccgaggaagagcggctggtcttgctggagaaccagaagcacctgccagtggaagaacagctaaagctgcttctggagcggctggacgaagtgaatgccagcaagcagagtgtgggccgctcacggcgtgcaaagatgatcaagaaagagatgacggcactgcggcggaagcttgcccatcagcgagagacgggacgtgatggccctgagcggcatggcccctcgagccggggtagtctgacaccccacccggcagcctgtgacaaggatgggcagacagatagtgcggcagaggagagcagcagccaggagacaagcaaaggcctgggtcccaacatgtcctcaacccccgcacatgaggtgggcaggagaacctcagttctgttctccaaaaagaacccgaagacagctggaccgcccaagaggccgggccggccccccaaaaaccgggagagccagatgacccccagccacggaggcagtcctgtggggcccccccagctccccatcatgagttccctgcgtcagcgcaagcggggtaggagcccccggcccagttcgagctcagacagcgacagtgataagtccacagaagaccccccaatggacttaccagccaatggcttcagcggtggaaaccaaccagtgaagaagagtttcttggtataccgtaatgactgcagccttccccggagcagctcagactctgagtccagcagcagtagcagtagcagcgctgcttcagaccggaccagcacaacgccctcaaaacaaggccggggcaaaccctccttctctcggggcactttcccagaggacagcagtgaggatacctcaggcactgagaatgaggcctactccgtgggcactggccgcggcgtgggccacagcatggtaaggaagagtctgggccggggagctggctggctgtcagaggatgaggactccccgctggatgctctggacctcgtgtgggccaaatgccgaggctatccatcatacccagctctgatcattgatccaaagatgccccgagaaggtatgttccaccatggggttcccatccctgtgcccccactggaggtgctgaaacttggggagcagatgacccaggaagcccgagagcatctctacctcgtcctcttctttgacaacaaacgaacctggcagtggctgcccaggaccaagctggttcctctgggtgtgaaccaggacctagacaaggagaagatgctggagggccgcaagtccaacatccgcaagtcagtacagatcgcctaccacagggctctgcagcaccgcagcaaggtgcaaggcgagcagagcagtgagaccagcgatagtgattgatactgctcaacacagcccaacctatagtgccctgtgacttctctcctcccctttgctcactgtcctggagtggcaccggcctctgcactgactcatttctggtcttggggccagtctcaggggaagctgggtgggggaggtccctcctgccctaagtgcagctggactgtacagaacactccaagggccaatggcagttcagcgcaaggagagggagggcccacaggtcagaaaaagctccagagacctcacagcattgtagggcggggtggtgggccaaagttaggacactgcgtaaaacaggccatcccaccacctctacctgctcatgccaggagaatccataactgcctagaggcctggggcccctaccggtcgtgaggtgagtgggcatctgtccagcctggaagaggggcactaggtgactccctcccctgctgttgtaaatactgtaattatcggagaatttaaattattctcatttgtaactgcgtttccgggtcgcgccagagtcatttggtactaaaaaaaaaaaaaaaaaagactgggggctgtccccatttcccttctctttcccatagattcccccacctttcaaactggtttgtatttatttcaaaggaagaaaatatattgattcttagaaaataaactgtcaatttagaa

SEQ ID NO: 3741 - DNA, 4736 bp, Homo sapiens
  source 1..4736: mol_type = unassigned DNA
gacgccgtcgccgccgctgctgccgccgccgctgccacagcctttgccgccacggtctccgccgccgctgtcctcgcgctgcctctgggagcctccattgttccagcagcgcccggtcccgagaccgggcatcttgggggctcgcgaaacgggcggcggccgacggagttgagaccccagggcgccggcgggaccaggagcggcaggggtcagctcaggaatcccggggagccgggaccaaagcgtggggcggcagggggccggggtggcgaggtctacggtctccggagttggggctcccccttcccggcccgactttccccgccgacctccccaagtggggtcggagccccggcgggcgcccccggcgatgagcccggactcgaggtggccgatgtgacagcatgggggtggactttgatgtgaagactttctgccacaacttgcgggcgactaagccaccatacgagtgcccggtggagacctgccgaaaggtctacaagagttacagtggtattgagtaccacctgtaccactatgaccacgacaacccaccacccccacaacaaactccactccgcaagcacaagaaaaaggggcgccagtcacgcccagccaacaagcagtcacccagcccctcagaggtctcacagtcaccaggccgtgaggtgatgagctatgcacaggcccagcgcatggtggaggtggacttgcatggccgcgtccaccgcatcagcatctttgacaacctggatgtggtgtcagaggatgaggaagcccccgaggaggcccctgagaatggcagcaacaaggagaacactgagacaccagctgctactcccaagtcaggcaaacataagaacaaggagaagcgcaaggactccaaccatcaccaccaccacaatgtttctgcgagcaccactcccaagctgccagaggtggtctatcgggagctggaacaggacacccctgatgccccaccccggccaacttcctattaccggtacatcgagaagtctgcagaggagctggacgaggaagtagagtatgacatggacgaggaggactacatctggctggatatcatgaatgagcgtcggaagacagagggtgtaagtcccatcccgcaggagatctttgagtacctaatggaccgactggagaaggagtcgtactttgagagtcataataaaggcgaccctaatgcgctagtggacgaggatgctgtttgctgtatctgcaatgatggtgagtgccagaacagcaatgtcatcctcttctgtgacatgtgcaacctggccgtgcaccaggagtgctacggtgtcccctatatccctgagggccagtggctgtgccgccgttgcctgcagtcaccctctcgtgctgtggattgtgccctgtgccccaacaagggcggtgccttcaagcagacagatgacgggcgctgggcccatgtggtgtgtgccttgtggatccctgaggtctgcttcgccaacacggtcttcctagagcctattgacagcattgagcacatcccaccagctcgctggaagctcacctgctacatttgcaaacaacggggctcaggggcctgcatccagtgccacaaggccaactgttacacagctttccatgtgacatgcgcccagcaggctggcctttacatgaagatggagcctgtgcgggagacaggcgccaacggcacctctttcagtgtccgcaagacagcctactgcgacatccacacgcctccaggttcagcacgccgactgcctgccctgtcccacagcgagggtgaggaggatgaagatgaggaggaggatgagggtaagggctggagctcagagaaagtcaagaaggccaaggccaagtcccggatcaaaatgaagaaggcacggaagatcctggcagagaagcgggcagcagcacctgtggtgtcagtgccctgcatcccaccacacaggcttagtaaaatcaccaaccgcctgaccatccaaaggaagagccagttcatgcagaggctgcacagctactggacactgaagcggcagtcacggaatggggtcccattgctacgtcgcctgcagacacacctgcaatctcagaggaactgtgaccaagttgggagagattctgaggataagaactgggcccttaaagaacagctcaagtcctggcagcggctccggcatgacttggagcgagctcggctgctcgtggaattgatccgcaagcgggaaaaactcaaaagggagacgatcaaggttcagcagattgccatggagatgcagctgactcctttcctcatcctccttcgcaaaaccttggagcagctccaagagaaggacacaggcaacatcttcagcgagccggtccctctgtctgaggtaaccgaattggacgaagtacctgactacctagaccacatcaaaaagcccatggactttttcaccatgaagcagaacttggaggcttaccgctacctgaattttgatgattttgaggaggacttcaacctcatcgtcagcaactgcctcaagtataacgccaaggacaccatcttctaccgggcagcagtgcggcttcgtgagcagggtggtgctgtgctccgccaggcccggcgccaggcagaaaaaatgggcattgactttgagacgggcatgcatatcccccacagcctggctggagatgaggccacacaccacactgaagatgcagccgaggaagagcggctggtcttgctggagaaccagaagcacctgccagtggaagaacagctaaagctgcttctggagcggctggacgaagtgaatgccagcaagcagagtgtgggccgctcacggcgtgcaaagatgatcaagaaagagatgacggcactgcggcggaagcttgcccatcagcgagagacgggacgtgatggccctgagcggcatggcccctcgagccggggtagtctgacaccccacccggcagcctgtgacaaggatgggcagacagatagtgcggcagaggagagcagcagccaggagacaagcaaaggcctgggtcccaacatgtcctcaacccccgcacatgaggtgggcaggagaacctcagttctgttctccaaaaagaacccgaagacagctggaccgcccaagaggccgggccggccccccaaaaaccgggagagccagatgacccccagccacggaggcagtcctgtggggcccccccagctccccatcatgagttccctgcgtcagcgcaagcggggtaggagcccccggcccagttcgagctcagacagcgacagtgataagtccacagaagaccccccaatggacttaccagccaatggcttcagcggtggaaaccaaccagtgaagaagagtttcttggtataccgtaatgactgcagccttccccggagcagctcagactctgagtccagcagcagtagcagtagcagcgctgcttcagaccggaccagcacaacgccctcaaaacaaggccggggcaaaccctccttctctcggggcactttcccagaggacagcagtgaggatacctcaggcactgagaatgaggcctactccgtgggcactggccgcggcgtgggccacagcatggtaaggaagagtctgggccggggagctggctggctgtcagaggatgaggactccccgctggatgctctggacctcgtgtgggccaaatgccgaggctatccatcatacccagctctgatcattgatccaaagatgccccgagaaggtatgttccaccatggggttcccatccctgtgcccccactggaggtgctgaaacttggggagcagatgacccaggaagcccgagagcatctctacctcgtcctcttctttgacaacaaacgaacctggcagtggctgcccaggaccaagctggttcctctgggtgtgaaccaggacctagacaaggagaagatgctggagggccgcaagtccaacatccgcaagtcagtacagatcgcctaccacagggctctgcagcaccgcagcaaggtgcaaggcgagcagagcagtgagaccagcgatagtgattgatactgctcaacacagcccaacctatagtgccctgtgacttctctcctcccctttgctcactgtcctggagtggcaccggcctctgcactgactcatttctggtcttggggccagtctcaggggaagctgggtgggggaggtccctcctgccctaagtgcagctggactgtacagaacactccaagggccaatggcagttcagcgcaaggagagggagggcccacaggtcagaaaaagctccagagacctcacagcattgtagggcggggtggtgggccaaagttaggacactgcgtaaaacaggccatcccaccacctctacctgctcatgccaggagaatccataactgcctagaggcctggggcccctaccggtcgtgaggtgagtgggcatctgtccagcctggaagaggggcactaggtgactccctcccctgctgttgtaaatactgtaattatcggagaatttaaattattctcatttgtaactgcgtttccgggtcgcgccagagtcatttggtactaaaaaaaaaaaaaaaaaagactgggggctgtccccatttcccttctctttcccatagattcccccacctttcaaactggtttgtatttatttcaaaggaagaaaatatattgattcttagaaaataaactgtcaatttagaattc

SEQ ID NO: 3742 - DNA, 860 bp, Homo sapiens
  source 1..860: mol_type = unassigned DNA
ttgccgccacggtctccgccgccgctgtcctcgcgctgcctctgggagcctccattgttccagcagcgcccggtcccgagaccgggcatcttgggggctcgcgaaacgggcggcggccgacggagttgagaccccagggcgccggcgggaccaggagcggcaggggtcagctcaggaatcccggggagccgggaccaaagcgtggggcggcagggggccggggtggcgaggtctacggtctccggagttggggctcccccttcccggcccgactttccccgccgacctccccaagtggggtcggagccccggcgggcgcccccggcgatgagcccggactcgaggtggccgtacatctcctacccagtaccagggccaggctccccataaagacctcaaaagtaaatgaattctttctgtgatccagtgatttctgcaggagtccaacgctaaagcattagccacccacccattcagctttctacatggccttcatcccatctgagctctcagtctggtgatcccctcattcagctattcgttcaacagatgtgacagcatgggggtggactttgatgtgaagactttctgccacaacttgcgggcgactaagccaccatacgagtgcccggtggagacctgccgaaaggtctacaagagttacagtggtattgagtaccacctgtaccactatgaccacgacaacccaccacccccacaacaaactccactccgcaagcacaagaaaaaggggcgccagtcacgcccagccaacaagcagtcacccagcccctcagaggtctcacagtcaccaggccgtgaggtgatgagctatgcacaggcccagcgcatggtggagg

SEQ ID NO: 3743 - DNA, 534 bp, Homo sapiens
  source 1..534: mol_type = unassigned DNA
agatgcagccgccattctccttgggccctccccacgggctttctggtctaagttctcgtctccctcgcctgtgcctctgctgccgggttccaaggggagattgctgattcgctgtgctactttgggaaccattcacccgggacccagcttggaaagaggagagcttgtttgtgcttcggttggtttatgtttaaagacacagccgcagatgtgacagcatgggggtggactttgatgtgaagactttctgccacaacttgcgggcgactaagccaccatacgagtgcccggtggagacctgccgaaaggtctacaagagttacagtggtattgagtaccacctgtaccactatgaccacgacaacccaccacccccacaacaaactccactccgcaagcacaagaaaaaggggcgccagtcacgcccagccaacaagcagtcacccagcccctcagaggtctcacagtcaccaggccgtgaggtgatgagctatgcacaggcccagcgcatggtggaggtggacttgcatggcc

SEQ ID NO: 3744 - DNA, 4308 bp, Homo sapiens
  source 1..4308: mol_type = unassigned DNA
gatgtgacagcatgggggtggactttgatgtgaagactttctgccacaacttgcgggcgactaagccaccatacgagtgcccggtggagacctgccgaaaggtctacaagagttacagtggtattgagtaccacctgtaccactatgaccacgacaacccaccacccccacaacaaactccactccgcaagcacaagaaaaaggggcgccagtcacgcccagccaacaagcagtcacccagcccctcagaggtctcacagtcaccaggccgtgaggtgatgagctatgcacaggcccagcgcatggtggaggtggacttgcatggccgcgtccaccgcatcagcatctttgacaacctggatgtggtgtcagaggatgaggaagcccccgaggaggcccctgagaatggcagcaacaaggagaacactgagacaccagctgctactcccaagtcaggcaaacataagaacaaggagaagcgcaaggactccaaccatcaccaccaccacaatgtttctgcgagcaccactcccaagctgccagaggtggtctatcgggagctggaacaggacacccctgatgccccaccccggccaacttcctattaccggtacatcgagaagtctgcagaggagctggacgaggaagtagagtatgacatggacgaggaggactacatctggctggatatcatgaatgagcgtcggaagacagagggtgtaagtcccatcccgcaggagatctttgagtacctaatggaccgactggagaaggagtcgtactttgagagtcataataaaggcgaccctaatgcgctagtggacgaggatgctgtttgctgtatctgcaatgatggtgagtgccagaacagcaatgtcatcctcttctgtgacatgtgcaacctggccgtgcaccaggagtgctacggtgtcccctatatccctgagggccagtggctgtgccgccgttgcctgcagtcaccctctcgtgctgtggattgtgccctgtgccccaacaagggcggtgccttcaagcagacagatgacgggcgctgggcccatgtggtgtgtgccttgtggatccctgaggtctgcttcgccaacacggtcttcctagagcctattgacagcattgagcacatcccaccagctcgctggaagctcacctgctacatttgcaaacaacggggctcaggggcctgcatccagtgccacaaggccaactgttacacagctttccatgtgacatgcgcccagcaggctggcctttacatgaagatggagcctgtgcgggagacaggcgccaacggcacctctttcagtgtccgcaagacagcctactgcgacatccacacgcctccaggttcagcacgccgactgcctgccctgtcccacagcgagggtgaggaggatgaagatgaggaggaggatgagggtaagggctggagctcagagaaagtcaagaaggccaaggccaagtcccggatcaaaatgaagaaggcacggaagatcctggcagagaagcgggcagcagcacctgtggtgtcagtgccctgcatcccaccacacaggcttagtaaaatcaccaaccgcctgaccatccaaaggaagagccagttcatgcagaggctgcacagctactggacactgaagcggcagtcacggaatggggtcccattgctacgtcgcctgcagacacacctgcaatctcagaggaactgtgaccaagttgggagagattctgaggataagaactgggcccttaaagaacagctcaagtcctggcagcggctccggcatgacttggagcgagctcggctgctcgtggaattgatccgcaagcgggaaaaactcaaaagggagacgatcaaggttcagcagattgccatggagatgcagctgactcctttcctcatcctccttcgcaaaaccttggagcagctccaagagaaggacacaggcaacatcttcagcgagccggtccctctgtctgaggtacctgactacctagaccacatcaaaaagcccatggactttttcaccatgaagcagaacttggaggcttaccgctacctgaattttgatgattttgaggaggacttcaacctcatcgtcagcaactgcctcaagtataacgccaaggacaccatcttctaccgggcagcagtgcggcttcgtgagcagggtggtgctgtgctccgccaggcccggcgccaggcagaaaaaatgggcattgactttgagacgggcatgcatatcccccacagcctggctggagatgaggccacacaccacactgaagatgcagccgaggaagagcggctggtcttgctggagaaccagaagcacctgccagtggaagaacagctaaagctgcttctggagcggctggacgaagtgaatgccagcaagcagagtgtgggccgctcacggcgtgcaaagatgatcaagaaagagatgacggcactgcggcggaagcttgcccatcagcgagagacgggacgtgatggccctgagcggcatggcccctcgagccggggtagtctgacaccccacccggcagcctgtgacaaggatgggcagacagatagtgcggcagaggagagcagcagccaggagacaagcaaaggcctgggtcccaacatgtcctcaacccccgcacatgaggtgggcaggagaacctcagttctgttctccaaaaagaacccgaagacagctggaccgcccaagaggccgggccggccccccaaaaaccgggagagccagatgacccccagccacggaggcagtcctgtggggcccccccagctccccatcatgagttccctgcgtcagcgcaagcggggtaggagcccccggcccagttcgagctcagacagcgacagtgataagtccacagaagaccccccaatggacttaccagccaatggcttcagcggtggaaaccaaccagtgaagaagagtttcttggtataccgtaatgactgcagccttccccggagcagctcagactctgagtccagcagcagtagcagtagcagcgctgcttcagaccggaccagcacaacgccctcaaaacaaggccggggcaaaccctccttctctcggggcactttcccagaggacagcagtgaggatacctcaggcactgagaatgaggcctactccgtgggcactggccgcggcgtgggccacagcatggtaaggaagagtctgggccggggagctggctggctgtcagaggatgaggactccccgctggatgctctggacctcgtgtgggccaaatgccgaggctatccatcatacccagctctgatcattgatccaaagatgccccgagaaggtatgttccaccatggggttcccatccctgtgcccccactggaggtgctgaaacttggggagcagatgacccaggaagcccgagagcatctctacctcgtcctcttctttgacaacaaacgaacctggcagtggctgcccaggaccaagctggttcctctgggtgtgaaccaggacctagacaaggagaagatgctggagggccgcaagtccaacatccgcaagtcagtacagatcgcctaccacagggctctgcagcaccgcagcaaggtgcaaggcgagcagagcagtgagaccagcgatagtgattgatactgctcaacacagcccaacctatagtgccctgtgacttctctcctcccctttgctcactgtcctggagtggcaccggcctctgcactgactcatttctggtcttggggccagtctcaggggaagctgggtgggggaggtccctcctgccctaagtgcagctggactgtacagaacactccaagggccaatggcagttcagcgcaaggagagggagggcccacaggtcagaaaaagctccagagacctcacagcattgtagggcggggtggtgggccaaagttaggacactgcgtaaaacaggccatcccaccacctctacctgctcatgccaggagaatccataactgcctagaggcctggggcccctaccggtcgtgaggtgagtgggcatctgtccagcctggaagaggggcactaggtgactccctcccctgctgttgtaaatactgtaattatcggagaatttaaattattctcatttgtaactgcgtttccgggtcgcgccagagtcatttggtactaaaaaaaaaaaaaaaaaagactgggggctgtccccatttcccttctctttcccatagattcccccacctttcaaactggtttgtatttatttcaaaggaagaaaatatattgattcttagaaaataaa

SEQ ID NO: 3745 - DNA, 11381 bp, Homo sapiens
  source 1..11381: mol_type = unassigned DNA
ctctccttcctcctccgcctcctcagctcttgggctagaatatctatgggtcgaaacgtgatgcgatgaattcgagagagagcgaaactaggacgaggagtgcggcggaagcggcgggactcccgggcatgggggcttcaccacaatagaggcagcgcccccacccgcccccgccagcccctccggagcgaagcccccaaaccccctcgggaaaaggatggcggcagcacctacccagatcgaagccgagctgtattacctgatcgctaggttcttgcagtctggaccctgcaacaaatccgctcaggtgctagtgcaggagctcgaggagcatcagctgattccgcgccgcttagattgggaggggaaagagcaccgaagaagcttcgaggatctggtggcagcaaatgcacacattcctccagactacctccttaaaatttgtgagagaattggtcctttactagataaagagatccctcagagtgttcctggggtacagacattattaggtgttggtcggcagtctctgctacgggatgccaaagactgtaagagtacactatggaatgggtctgcttttgcggctctgcatagaggcagacctccagaactacctgtaaattatgtgaaacctccaaatgtggtgaatatcacctctgccaggcaattaaccggctgtagtcgctttggtcatattttcccttcatctgcttaccagcacattaagatgcataagagaattctggggcacttgtcatctgtctactgtgtagcatttgaccgaagcgggagaagaatttttacaggttcagatgactgtttagtaaaaatttgggctacagatgatggacgccttcttgctacacttcgtggacactctgctgaaatttctgacatggctgttaactatgaaaacactcttattgctgcaggcagctgtgataaggtagtaagagtatggtgtcttcgaacttgtgcacccgttgcagtccttcagggccattcagcttctattacttccatacagttttgtccatcaactaaaggcacaaacagatacctcacttctactggtgctgatggaacaatctgtttctggcaatggcatgtaaaaacaatgaagtttagagatcgcccggtgaaatttactgagagatccagacctggagtccagatatcttgttcatctttcagttctggtggtatgttcattacaactggtagtactgaccatgtgattagaatatattatttgggttctgaggttcctgagaaaattgctgaattagagtcacatacggataaagttgttgctgttcagttctgtaacaatggagacagtttaagatttgttagtggaagtcgagatggaacggcaagaatttggcagtatcagcaacaagaatggaagagtatagtgctagacatggctactaaaatgactggcaataatttgccatctggagaagacaagatcactaaacttaaggtgactatggtggcctgggatcgctatgataccacagttattactgcagtgaacaattttcttttgaaagtgtggaattctatcacaggacagcttcttcatacattatctggacatgatgatgaagtattcgttctagaagcccatccatttgatcaaaggatcatactttcagcaggtcatgatgggaacatttttatttgggaccttgaccgggggaccaaaattcggaattactttaacatgattgaaggccaaggccatggtgcggtgtttgattgtaaattttcaccagatggaaaccattttgcctgcacagattctcatggacatttgctgctttttggttttggatgcagtaaatactacgaaaagattccagatcagatgttcttccacacggattatcgtcctcttattcgtgatgccaataactatgtattggatgaacaaacccaacaagctcctcacctcatgcctcctccatttttggtggatgttgatggaaatcctcatcccacaaaattccaacggttggtaccaggacgggaaaattgtaaagatgaacagcttataccacagctgggatatgtggctaatggtgatggtgaggtagtagaacaggtaattgggcagcaaaccaatgaccaagatgagagcattcttgatggaataatcagggagctgcagagagaacaagacctgagactaattaatgaaggagatgttccacatttaccagttaatagagcatactctgttaatggtgctctgagaagtccaaacatggacatatcttcttccccaaacatcaggcttcgaagacatagtagtcaaattgaaggtgttagacaaatgcataacaatgctcctcggagccagatggccactgaaagagatctcatggcgtggagcagaagagtggtggtcaatgaactaaataatggggttagtagggtacaggaagaatgtcgaactgcaaaaggtgacatagaaatcagtctttatacagttgaaaagaagaaaaagccatcttacactactcaaaggaatgattatgagcctagctgtgggcgttctttacgcaggacacagcgcaaacgtcagcatacttaccaaacacggtccaacatagagcataattcacaggcatcatgtcaaaattcaggtgtacaggaagactcagacagttcttcagaggaagatgaaactgttggcacaagtgacgcttcggtagaggatcctgttgttgaatggcaaagtgaaagttcttccagtgactcatcaagtgaatattctgattggacagcagatgctggaataaatttacaacccccaaaaagacaaaccagacagacaacacgtaaaatatgcagcagctctgatgaggaaaatttgaagtccctagaagaaaggcagaagaaacctaagcagactagaaagaagaaaggaggactggtttctatagcaggtgagcctaatgaagaatggtttgcccctcagtggatcttggatactataccccgacgttccccatttgtcccacaaatgggagatgagcttatctattttaggcaaggacatgaagcttatgttcgggctgtaaggaaatcgaaaatatacagtgttaatttacaaaaacagccatggaacaaaatggatctcagggagcaagagtttgttaagattgtaggaatcaaatatgaggttggcccacccacactgtgctgcttgaagcttgcatttctggacccaatttcaggcaaaatgactggagaatctttttccattaagtatcatgacatgccggatgtcattgacttccttgtgctacatcagttttataatgaagccaaagaaaggaactggcagattggtgatagattccgcagtataatagatgacgcctggtggtttgggactgtggagagtcagcagccttttcaaccagagtatcctgatagttctttccagtgttacagtgttcactgggacaataatgagagagaaaagatgagcccatgggatatggagccaattccagaaggaactgcctttccagatgaagttggtgctggtgttcctgtctcccaggaagaattgactgctttgctatacaaaccccaggaaggagagtggggggctcattccagagacgaagaatgtgaacgggttattcagggcatcaaccaccttctttccctggattttgccagcccttttgctgttccagtggatctcagtgcctaccccttgtattgtactgtagttgcttatccaactgacctcaataccatcaggcggagacttgaaaatcgcttttacaggagaatatcagcattaatgtgggaggtacgctatattgaacataatgccaggactttcaatgagccagacagtcctatagttaaagcagctaaaattgtaactgatgtcttacttcgatttattggggatcagagctgtactgatatactggatacttataataaaattaaagcagaagaacgaaacagtactgatgcagaggaggatacagaaattgttgatttagattcagacggtcctggtacttcatctggaagaaaggtcaaatgccgaggcagaagacagtctttaaagtgtaatcctgatgcttggaaaaaacaatgcaaggaactattgagcctcatttatgaacgtgaagactcggagccatttcgacagccagctgatcttctttcttacccaggtcatcaggagcaagagggagaatcctcagagtctgttgttccagaaagacaacaagattcatctctttctgaggattatcaagatgttatagatactcctgtggacttcagcactgtgaaagaaactttggaagcaggaaactatggtagtcctctggaattttataaggatgttcgccaaatattcaacaactccaaagcttatacctctaataaaaagtcaaggatctatagcatgatgctgcgattatctgccttatttgaaagtcatatcaaaaatatcatctctgaatataagtcagcaatccagagtcagaagaggagaaggccacggtacagaaaacgtctaagaagcagcagcagttcattatctagtagtggagcacctagtccaaaagggaagcagaaacaaatgaagttgcagcctaaaaatgaccagaatacctcagtatctcatgccaggactagctctcctttctcatctcctgtttcagatgctgctgaagggctttcactatatctacttgatgatgagccagatgggccattttcttcatcgagcttcggtggatatagccgaagtggaaatagccatgacccagggaaagccaaatcatttcggaatagagttttgccagttaaacaagatcactcccttgatggaccccttacaaatggtgatggcagagagccccggacaggaatcaagagaaaactacttagtgcatcagaagaagatgaaaacatgggaggagaagataaagagaaaaaagaaacaaaagagaaatctcatttatccacctcagagagtggagagttaggatccagtttaagttctgaaagtacctgtggttctgactctgactctgaatcaacttccagaacagatcaagattacgtagatggagaccatgattatagcaaattcatacaaaccagacctaaaagaaaactcagaaagcaacatggcaatggaaaaagaaattggaagaccagaggcacaggaggaagaggcagatggggaagatggggtagatggagtagaggaggcagaggaagaggaggcaggggacgagggagtcgaggaagaggtggaggtggcactagggggaggggaagagggagaggaggaagaggtgcttctagaggagctaccagagccaaacgagcacgtattgcagatgatgaatttgataccatgttttcaggacgtttcagtagactgcctcgaattaaaacaagaaaccaaggcaggaggactgttttatataatgatgattctgataatgacaattttgtgtccactgaggatcctctgaatcttggtacatccagatcaggcagagtgcgtaaaatgacagaaaaagccagggttagccatctcatgggatggaattattaacagttaataaatttagaataacttaaaaaattcaatggccttctactgcagggaatttaccaggaaatctacaaagcaagttgtgtggggacttctgcttcctttcacattggtgcttttccatttatgccagtatacatttgtttcaagacttttgatctccacacttcatttgttcaaataagccttactcattaggccttaaattaaaagaaattctgcccacacacacacaaacacatacacacacatacacacacacagacacacacacacgaaacacaacacagacactacagatttactacattaaaggagcattcagcttcttaagagtagcatgacatttttatctcaatagaatagccctcttttgcttttgtatcacagaagtatagcaccttcttacagagttttatatagtttgtttttgccattttgattcctatacccagtaataataacttttgcacaatacaccaatcctaaaggcagctattaaatgtttacagtttctatattgtaagagcgatctggattattttactcttcccaggccaaactttcatgacttgtactgaactgaagtatatatttatactacagttttttggggggtggggggatcttgatatgcttttcattgatttgcataattcacgttaaaggtgagaaagggttggtgccttgtaaatatgtagcagatcttcgtggtgtgttctgatgtgtgcattaactttattaaaaaagaatacttgaggtatcaatctagacaaggtgccaaatgcaaaagtttcccgcatcaatttttttcctatcacattttattgcattaatagaatttgtgtagcttaaataacttaaacatttgaaaaatcctcatccacaaagaacaacttctttgaacagtagctcagctacctcttaactacaactactggaaacattaaggaaaatagatgctgttattccttactgactaaggagaaatagaacaagcttagtaggaatgaataccccataagttataagctgagaggttgttaataattgtattggctctcaaattaataattgtaattaacaaagtttcataaatatagtatgctctaccaccttaggctttcttagaacatatttgtgtaagtagacttgggctactgcttatatatttctgctccacttaccatttaacagctgtgagttgctggttttcatttgaatcttaaaatttaacaaagcacctggtttgatttggaatgttttggctagctagtattatgaatcaacttatagattctgctcatatcattccaaagggttcttctgttctagtctttcaggaaagaaccttattgcactgcacactcatgttgtgaatcattattttatagataaaaaacatctttaaaaacccttattgtcttgtttacagcagtagagtgcacatggttccataagtgagcttgagttccaaggtcagttttactccccaaatttaatattacagatttgttcatttgttagatacttacatttctgaggtaagagggataatagcaatttctgtttctgtaacagcaaatttgttgcacttagatcaggctcatgggataaaacagacttcttagtatatacctagctatcccaggatatttcttaagctaatgtgtttgtctcatgctttcaatcatttcatgcatctgaaaacccttaagtgcagaggaaggcgtacacacataaaactttgcttttttggtagggtcggcagtagggttattcttggactaacatctttaagcagttttcacttgcagtggaaatgatgttcaggctttaagagaaagtattgtgaattgttaatggcactaacttctgttactagacagcagaccaagctatttttttgttgtagtctttttttcactaaaccaaaactacttctggttgtaactcagctgccactttaaaccatagtagagattcaaaacgttcctatttgaaactacatttgatttttgctaaaatgtgctgtttcggttatttatctcttgggcatttagactaaattgtgcctgtattcctgaaatcaataatactttggcttatcctgatctaagtaacatagttacttaaattcctggatatacccaaatatggatcacatgtatcattttagtttgaaattttttgttgacattcttctatgaagagctgacctcttgaaatgtagaagaattgacatttgtgtgattttggctatctggagctttatttataatttattttgaaaaataaaaatgccacatttatttcccaaatgtcaagattttctagaattagataattagaataataaggctgaagacattttaaagcatattttatatgtagtgaaatactgtgaaaatattagtgaacagcattttgctgtaatgtttatttcagttattaagatttaaagagttagtcatcagggtatgttagataaacatagttatcatttattaaacaaacagataattttctgtttgcatgcaaattattttaataagtgtgaaaataaaagtttggaagatagtatttttacttttatatctggacttttttttcccccaatttacactttgctttcttgtaataccacctcctgtgaatgtgttgtaattagtatcacattgattactttatcattttaatttctttgaggccctttaaacctacgtaaaatctgggtccagccatagcaaagcaagtacaaaatgaacaaagaattttgaagaaaagcctaaatcttaaattgctaagaaaaaacactgttatatttaggcccgtgagagcatatacatgtataaacctaatcctatgctagatatgaatagtcagtgagctgtaatatttctcataaatgctaataatgtttaaattcccagctttaagatcttagtgtgtgtatatatttataaaatctgaattgtgtgtttcttctatggcttactgtgtgtttctctttcagcaataggatgctctctaaaacattcactagcctactagcctacttactaaatttttgtatatgtgtgtttgtgcacttgtatgtgtgtaaagttttttccccaacttgacacaccttatctcagacattcaaaaaaagagaacattttgtatggaggacagtctgccaactttttgcctctctacagctcttagcctgtatatttactgcttgatcattcattatgccttctagataaccagtccaggttttgtcatatacctgtgtccctctattctttttatttccctttttaattttttttcttttttttccctccccagaaatcaggcttgtgttggaattcttctctataatactttgtttcccgcagatgcaaagtaacaaagtaactgagtaaaattagaaatctcattctgcacaactgtgcgctcagatatttaactcagccttctaatacttttaagtacgtttctgttatttatctttttgttgtttttgttttaatcccatagattgtcatcagacaataatagagtgattgagagagaaagatataaatgccacttctaactttttgataaaacttttttgagcatttttcaaaaatttgtatgtttgtggtaatggggaattaaacaccttttacagctgatgtatgttggaaatcattttatgtacatttaccaactggtacttatcttcaagttggaattttcacatccataaaagggagacttgcatcatatataattttcagtatactttgctgtccagccttttaaacaattacagtaacattttgagttctgtgatgaatagttctaggggaagggatggaactttcgacatgtaaagtccattgttttaaatgctaaccccatccccaatatttttgtggaacgtgaggctttatgaaaggtttatcagaaatagaatattctaaagtcacttttatggcttatttcaaaaactagtgtgaaagtattttcatgcttttttgtttctcatcttttagcaaagcttctttaccaagttttgattaaattgcaatataaaattaagttttttcacggtgctatattttgtggaatatgggtagcactcaggtttctttcttttttcttttctccttccttcttccttcattccttcattcctccctcccccctccctccctccctctcttccttccctccttccttccttcctcacctcggcctcccaaagtgctgggattacaggcatgagccaccgtgcccggcctatatacccttattcttgattatttcttttttcatcttttcaatcctgcttacttttatcctcacttttctttctgccatgaaaactgcacctaatttaccacacttaagattggcaatttttgattcattgatgggagaagtacagtagaaaggccctgcagtttagaattaagttgtgtttgtttatttacatgtatgcccatttcttctaaattaaatctagaatgtgagactttgacatataaaagcatgataagtattttcttaaaaaataagactattgatacataatgaaaccaccattggtaattgaattttaaaatgatatgcaaaaatatttagaaatccagttgggaaatgtgtttttgcatatgtcaccagatacacattaggcagtactacaaatgttaattcttaaacaatactgtggtgatggcaatcagtaatttatttctttgtcctgtaacttatcattcttgtcttttgtaatgtcttacacagtattaacataactgtaccttttttttgttcttggtatccatacattttaagatggaaaatcagttcatagttgatatgatattgtatatgggcaaaatgtccgttaaactaaaattcagtaaaaaaggtaatataaactggcttgatttataaaagatgttttgtttggcagttatcagtcattataagcaattatcttcaaagacaaaaaaactggactaatttgttgccattctttatgggatgtttacaataaaattccaagttgtttggaatcaattgcactcttgctgctttatgccttaatttatgtaccagagaaaaattaaccagaagaaagaaatatggagttacctattcagctttagagattgtaacatgtaactcttaggtctttcttgtttctttgtcatagaatattttattactattactttttaatctgagaaactaggatgcttcttcctatcaaagaaaaggttttgttttttgttttcatcttagacattgcaaatattctttgggtcacttttaggataataaatatgatgtttacactttaaatgtgggctgcttggtgcattcaataacagcctgcaaagcatttgtcaacattttgttttgcagagcttttcaaaatgaatagatctctaacatatttatgacttacaacttttaacagctgagttatatgtacctgacattttaaaatgtatagtaagattacctacattgtaaatggtgctttaattcagtgtaagtgtaggagagagagaagtgaggtgagatgatctgaatgctctaacaggaacattcataactatatagttacccagaatttgtctcccagtggcaaacattccactaggttcaagataaataagctggccaaagactggactgtatctttgatatatatatactgtgtattttgtgtatttagaataaaaaaaatgcatttaggaaaaaa

SEQ ID NO: 3746 - DNA, 4894 bp, Homo sapiens
  source 1..4894: mol_type = unassigned DNA
ggactgcgggataggaagctggggatatggacaagcagcagcgttatagcgctctgggtttcgggacataggcctgggccatgcggcccccttggccccttggcgcgacccccaggaacgttcggaaagctggtcctcgtggctgggggaaaggcggggggtgggggggaagcgggcacgtgaccccggtcagccaatctgggtgctgctgacgtggccgcgcggccccgatgctctccccacccccccagcccgttcgggaagggaggggctgggggctacgccccctcccccagcacggcttcgttttctgggggggggttgacaccccggattacataccccgtaccaagccgagggcaactttggaggccccctggaaggctttaggatccagattcttcgctgctgctgccttaccgccgagaaccaccacccgccaggcgtcttgcggccacacccctggcgggttcaggcaggctacgcccacgcgacccctcccgtttccctgctttggccaatggaggagctacgaatggcacgacctgctcgagcttggcagtctccagttgggctgtgcatggaagcttgggaagactttgttggaaggggaggcggggagagagtgctggaggctctggggcgatggcttccgcacctcttccaaccaccctctttccctggagtcggcggaccacagctcagccaattggcttggagatgtggcgggttgccacttccctgtgggtctctgcggcactcttctgcctggtgactgacaccttggaaatgaagtttatgacgtcatcgttgcggctggccaatagaaaaagctcccgcggagaggtgttccttccccttcgactcagcttcttcacccgcgtgagcgagcgcgcgcgcgcggagggggtggggaaaagctcaagcagggtggcgcgcatgagcggcgaagctcctcctccccgcctatatataaagggctggcgcggggctcggcggcgccatttcgtgctggagtggagcagcctctagaacgagctggaggattctgcctaccgatacagagccttcgagtcgtccggggccgccattacaatccacctccatccgcttggaaatggccttcgtcccggcctatgactggtcccagcgggcagtacagaccccctagaagcccctggagctcccctttttcgggccccgcccaatcctcggagtctgtccaccccctctactccgccctcaagaggatttcaaagatggaggcggcggctccctaaaccacttttcgtgttcatccgcctccatccgagatcgaaacgggacctcgtcggccccgtaggggcccgacaagaagagggaatccctgcagaccaacagcgggctatattgacgacggtgtctgagatcggggaccgtcttttgaagagtcagtccctccttagttgcccgcctcagctgaggccgccgccattttcttgctgtccgccgtctgcagagcgcgccaagctgcccggagctctccgagaggccccaaagagactgctttcgtgccggccaggcagggggtttgtcgcctggaggcccaagaggaacggcctccccccaacttagcgggttatgctggaccgggcggtgaggggaaccgaggccacccggactttccgcggctgagggcagcgccggttccttgcggtcaagatgctgcaaaacgtgactccccacaataagctccctggggaagggaatgcagggttgctggggctgggcccagaagcagcagcaccagggaagaggattcgaaaaccctctctcttgtatgagggctttgagagccccacaatggcttcggtgcctgctttgcaacttacccctgccaacccaccacccccggaggtgtccaatcccaaaaagccaggacgagttaccaaccagctgcaatacctacacaaggtagtgatgaaggctctgtggaaacatcagttcgcatggccattccggcagcctgtggatgctgtcaaactgggtctaccggattatcacaaaattataaaacagcctatggacatgggtactattaagaggagacttgaaaacaattattattgggctgcttcagagtgtatgcaagattttaataccatgttcaccaactgttacatttacaacaagcccactgatgatattgtcctaatggcacaaacgctggaaaagatattcctacagaaggttgcatcaatgccacaagaagaacaagagctggtagtgaccatccctaagaacagccacaagaagggggccaagttggcagcgctccagggcagtgttaccagtgcccatcaggtgcctgccgtctcttctgtgtcacacacagccctgtatactcctccacctgagatacctaccactgtcctcaacattccccacccatcagtcatttcctctccacttctcaagtccttgcactctgctggacccccgctccttgctgttactgcagctcctccagcccagccccttgccaagaaaaaaggcgtaaagcggaaagcagatactaccacccctacacctacagccatcttggctcctggttctccagctagccctcctgggagtcttgagcctaaggcagcacggcttccccctatgcgtagagagagtggtcgccccatcaagcccccacgcaaagacttgcctgactctcagcaacaacaccagagctctaagaaaggaaagctttcagaacagttaaaacattgcaatggcattttgaaggagttactctctaagaagcatgctgcctatgcttggcctttctataaaccagtggatgcttctgcacttggcctgcatgactaccatgacatcattaagcaccccatggacctcagcactgtcaagcggaagatggagaaccgtgattaccgggatgcacaggagtttgctgctgatgtacggcttatgttctccaactgctataagtacaatcccccagatcacgatgttgtggcaatggcacgaaagctacaggatgtatttgagttccgttatgccaagatgccagatgaaccactagaaccagggcctttaccagtctctactgccatgccccctggcttggccaaatcgtcttcagagtcctccagtgaggaaagtagcagtgagagctcctctgaggaagaggaggaggaagatgaggaggacgaggaggaagaagagagtgaaagctcagactcagaggaagaaagggctcatcgcttagcagaactacaggaacagcttcgggcagtacatgaacaactggctgctctgtcccagggtccaatatccaagcccaagaggaaaagagagaaaaaagagaaaaagaagaaacggaaggcagagaagcatcgaggccgagctggggccgatgaagatgacaaggggcctagggcaccccgcccacctcaacctaagaagtccaagaaagcaagtggcagtgggggtggcagtgctgctttaggcccttctggctttggaccttctggaggaagtggcaccaagctccccaaaaaggccacaaagacagccccacctgccctgcctacaggttatgattcagaggaggaggaagagagcaggcccatgagttacgatgagaagcggcagctgagcctggacatcaacaaattacctggggagaagctgggccgagttgtgcatataatccaagccagggagccctctttacgtgattcaaacccagaagagattgagattgattttgaaacactcaagccatccacacttagagagcttgagcgctatgtcctttcctgcctacgtaagaaaccccggaagccctacaccattaagaagcctgtgggaaagacaaaggaggaactggctttggagaaaaagcgggaattagaaaagcggttacaagatgtcagcggacagctcaattctactaaaaagccccccaagaaagcgaatgagaaaacagagtcatcctctgcacagcaagtagcagtgtcacgccttagcgcttccagctccagctcagattccagctcctcctcttcctcgtcgtcgtcttcagacaccagtgattcagactcaggctaaggggtcaggccagatggggcaggaaggctccgcaggaccggacccctagaccaccctgccccacctgccccttccccctttgctgtgacacttcttcatctcacccccccccgcccccctctaggagagctggctctgcagtgggggagggatgcagggacatttactgaaggagggacatggacaaaacaacattgaattcccagccccattggggagtgatctcttggacacagagcccccattcaaaatggggcagggcaagggtgggagtgtgcaaagccctgatctggagttacctgaggccacagctgccctattcacttctaagggccctgttttgagattgtttgttctaatttattttaagctaggtaaggctggggggagggtggggccgtggtcccctcagcctccatggggagggaagaagggggagctctttttttacgttgatttttttttttctactctgttttccctttttccttccgctccatttggggccctgggggtttcagtcatctccccatttggtcccctggactgtctttgttgattctaacttgtaaataaagaaaatattattcaagttttgagttaccttaatatttgcttttgtagtgtttcaaaaggaacatcataagaattgtcttgataattttgagggaaatattactgcagtgagaaaaggcaatagctaacctataattggattgtcttaatttttaaaccagtaggcttttgctgtgtttttaataaagtaaatatgacttttgtaaattga

SEQ ID NO: 3747 - DNA, 4807 bp, Homo sapiens
  source 1..4807: mol_type = unassigned DNA
ggagggggagggctagtctgagccgcagccgccgcctcctccgctcgccctcctccctggcgctgaccgatggaccagccgctccgtggggaggactccggaccctggtgggggggcgggggggttctttcgcccccgtggcggagggcccctgagaggcggatacgggtgtgcctttgggggtgatgtggcgtgtggggggaaaggtccgagctcgcctggagggggagggtttttcccttaagtcatccctcccaggacttgctttttctgctctgagccggacgccggaatggagtttgaggaagagattcttcgctgctgctgccttaccgccgagaaccaccacccgccaggcgtcttgcggccacacccctggcgggttcaggcaggctacgcccacgcgacccctcccgtttccctgctttggccaatggaggagctacgaatggcacgacctgctcgagcttggcagtctccagttgggctgtgcatggaagcttgggaagactttgttggaaggggaggcggggagagagtgctggaggctctggggcgatggcttccgcacctcttccaaccaccctctttccctggagtcggcggaccacagctcagccaattggcttggagatgtggcgggttgccacttccctgtgggtctctgcggcactcttctgcctggtgactgacaccttggaaatgaagtttatgacgtcatcgttgcggctggccaatagaaaaagctcccgcggagaggtgttccttccccttcgactcagcttcttcacccgcgtgagcgagcgcgcgcgcgcggagggggtggggaaaagctcaagcagggtggcgcgcatgagcggcgaagctcctcctccccgcctatatataaagggctggcgcggggctcggcggcgccatttcgtgctggagtggagcagcctctagaacgagctggaggattctgcctaccgatacagagccttcgagtcgtccggggccgccattacaatccacctccatccgcttggaaatggccttcgtcccggcctatgactggtcccagcgggcagtacagaccccctagaagcccctggagctcccctttttcgggccccgcccaatcctcggagtctgtccaccccctctactccgccctcaagaggatttcaaagatggaggcggcggctccctaaaccacttttcgtgttcatccgcctccatccgagatcgaaacgggacctcgtcggccccgtaggggcccgacaagaagagggaatccctgcagaccaacagcgggctatattgacgacggtgtctgagatcggggaccgtcttttgaagagtcagtccctccttagttgcccgcctcagctgaggccgccgccattttcttgctgtccgccgtctgcagagcgcgccaagctgcccggagctctccgagaggccccaaagagactgctttcgtgccggccaggcagggggtttgtcgcctggaggcccaagaggaacggcctccccccaacttagcgggttatgctggaccgggcggtgaggggaaccgaggccacccggactttccgcggctgagggcagcgccggttccttgcggtcaagatgctgcaaaacgtgactccccacaataagctccctggggaagggaatgcagggttgctggggctgggcccagaagcagcagcaccagggaagaggattcgaaaaccctctctcttgtatgagggctttgagagccccacaatggcttcggtgcctgctttgcaacttacccctgccaacccaccacccccggaggtgtccaatcccaaaaagccaggacgagttaccaaccagctgcaatacctacacaaggtagtgatgaaggctctgtggaaacatcagttcgcatggccattccggcagcctgtggatgctgtcaaactgggtctaccggattatcacaaaattataaaacagcctatggacatgggtactattaagaggagacttgaaaacaattattattgggctgcttcagagtgtatgcaagattttaataccatgttcaccaactgttacatttacaacaagcccactgatgatattgtcctaatggcacaaacgctggaaaagatattcctacagaaggttgcatcaatgccacaagaagaacaagagctggtagtgaccatccctaagaacagccacaagaagggggccaagttggcagcgctccagggcagtgttaccagtgcccatcaggtgcctgccgtctcttctgtgtcacacacagccctgtatactcctccacctgagatacctaccactgtcctcaacattccccacccatcagtcatttcctctccacttctcaagtccttgcactctgctggacccccgctccttgctgttactgcagctcctccagcccagccccttgccaagaaaaaaggcgtaaagcggaaagcagatactaccacccctacacctacagccatcttggctcctggttctccagctagccctcctgggagtcttgagcctaaggcagcacggcttccccctatgcgtagagagagtggtcgccccatcaagcccccacgcaaagacttgcctgactctcagcaacaacaccagagctctaagaaaggaaagctttcagaacagttaaaacattgcaatggcattttgaaggagttactctctaagaagcatgctgcctatgcttggcctttctataaaccagtggatgcttctgcacttggcctgcatgactaccatgacatcattaagcaccccatggacctcagcactgtcaagcggaagatggagaaccgtgattaccgggatgcacaggagtttgctgctgatgtacggcttatgttctccaactgctataagtacaatcccccagatcacgatgttgtggcaatggcacgaaagctacaggatgtatttgagttccgttatgccaagatgccagatgaaccactagaaccagggcctttaccagtctctactgccatgccccctggcttggccaaatcgtcttcagagtcctccagtgaggaaagtagcagtgagagctcctctgaggaagaggaggaggaagatgaggaggacgaggaggaagaagagagtgaaagctcagactcagaggaagaaagggctcatcgcttagcagaactacaggaacagcttcgggcagtacatgaacaactggctgctctgtcccagggtccaatatccaagcccaagaggaaaagagagaaaaaagagaaaaagaagaaacggaaggcagagaagcatcgaggccgagctggggccgatgaagatgacaaggggcctagggcaccccgcccacctcaacctaagaagtccaagaaagcaagtggcagtgggggtggcagtgctgctttaggcccttctggctttggaccttctggaggaagtggcaccaagctccccaaaaaggccacaaagacagccccacctgccctgcctacaggttatgattcagaggaggaggaagagagcaggcccatgagttacgatgagaagcggcagctgagcctggacatcaacaaattacctggggagaagctgggccgagttgtgcatataatccaagccagggagccctctttacgtgattcaaacccagaagagattgagattgattttgaaacactcaagccatccacacttagagagcttgagcgctatgtcctttcctgcctacgtaagaaaccccggaagccctacaccattaagaagcctgtgggaaagacaaaggaggaactggctttggagaaaaagcgggaattagaaaagcggttacaagatgtcagcggacagctcaattctactaaaaagccccccaagaaagcgaatgagaaaacagagtcatcctctgcacagcaagtagcagtgtcacgccttagcgcttccagctccagctcagattccagctcctcctcttcctcgtcgtcgtcttcagacaccagtgattcagactcaggctaaggggtcaggccagatggggcaggaaggctccgcaggaccggacccctagaccaccctgccccacctgccccttccccctttgctgtgacacttcttcatctcacccccccccgcccccctctaggagagctggctctgcagtgggggagggatgcagggacatttactgaaggagggacatggacaaaacaacattgaattcccagccccattggggagtgatctcttggacacagagcccccattcaaaatggggcagggcaagggtgggagtgtgcaaagccctgatctggagttacctgaggccacagctgccctattcacttctaagggccctgttttgagattgtttgttctaatttattttaagctaggtaaggctggggggagggtggggccgtggtcccctcagcctccatggggagggaagaagggggagctctttttttacgttgatttttttttttctactctgttttccctttttccttccgctccatttggggccctgggggtttcagtcatctccccatttggtcccctggactgtctttgttgattctaacttgtaaataaagaaaatattattcaagttttgagttaccttaatatttgcttttgtagtgtttcaaaaggaacatcataagaattgtcttgataattttgagggaaatattactgcagtgagaaaaggcaatagctaacctataattggattgtcttaatttttaaaccagtaggcttttgctgtgtttttaataaagtaaatatgacttttgtaaattga

SEQ ID NO: 3748 - DNA, 4807 bp, Homo sapiens
  source 1..4807: mol_type = unassigned DNA
ggagggggagggctagtctgagccgcagccgccgcctcctccgctcgccctcctccctggcgctgaccgatggaccagccgctccgtggggaggactccggaccctggtgggggggcgggggggttctttcgcccccgtggcggagggcccctgagaggcggatacgggtgtgcctttgggggtgatgtggcgtgtggggggaaaggtccgagctcgcctggagggggagggtttttcccttaagtcatccctcccaggacttgctttttctgctctgagccggacgccggaatggagtttgaggaagagattcttcgctgctgctgccttaccgccgagaaccaccacccgccaggcgtcttgcggccacacccctggcgggttcaggcaggctacgcccacgcgacccctcccgtttccctgctttggccaatggaggagctacgaatggcacgacctgctcgagcttggcagtctccagttgggctgtgcatggaagcttgggaagactttgttggaaggggaggcggggagagagtgctggaggctctggggcgatggcttccgcacctcttccaaccaccctctttccctggagtcggcggaccacagctcagccaattggcttggagatgtggcgggttgccacttccctgtgggtctctgcggcactcttctgcctggtgactgacaccttggaaatgaagtttatgacgtcatcgttgcggctggccaatagaaaaagctcccgcggagaggtgttccttccccttcgactcagcttcttcacccgcgtgagcgagcgcgcgcgcgcggagggggtggggaaaatctcaagcagggtggcgcgcatgagcggcgaagctcctcctccccgcctatatataaagggctggcgcggggctcggcggcgccatttcgtgctggagtggagcagcctctagaacgagctggaggattctgcctaccgatacagagccttcgagtcgtccggggccgccattacaatccacctccatccgcttggaaatggccttcgtcccggcctatgactggtcccagcgggcagtacagaccccctagaagcccctggagctcccctttttcgggccccgcccaatcctcggagtctgtccaccccctctactccgccctcaagaggatttcaaagatggaggcggcggctccctaaaccacttttcgtgttcatccgcctccatccgagatcgaaacgggacctcgtcggccccgtaggggcccgacaagaagagggaatccctgcagaccaacagcgggctatattgacgacggtgtctgagatcggggaccgtcttttgaagagtcagtccctccttagttgcccgcctcagctgaggccgccgccattttcttgctgtccgccgtctgcagagcgcgccaagctgcccggagctctccgagaggccccaaagagactgctttcgtgccggccaggcagggggtttgtcgcctggaggcccaagaggaacggcctccccccaacttagcgggttatgctggaccgggcggtgaggggaaccgaggccacccggactttccgcggctgagggcagcgccggttccttgcggtcaagatgctgcaaaacgtgactccccacaataagctccctggggaagggaatgcagggttgctggggctgggcccagaagcagcagcaccagggaagaggattcgaaaaccctctctcttgtatgagggctttgagagccccacaatggcttcggtgcctgctttgcaacttacccctgccaacccaccacccccggaggtgtccaatcccaaaaagccaggacgagttaccaaccagctgcaatacctacacaaggtagtgatgaaggctctgtggaaacatcagttcgcatggccattccggcagcctgtggatgctgtcaaactgggtctaccggattatcacaaaattataaaacagcctatggacatgggtactattaagaggagacttgaaaacaattattattgggctgcttcagagtgtatgcaagattttaataccatgttcaccaactgttacatttacaacaagcccactgatgatattgtcctaatggcacaaacgctggaaaagatattcctacagaaggttgcatcaatgccacaagaagaacaagagctggtagtgaccatccctaagaacagccacaagaagggggccaagttggcagcgctccagggcagtgttaccagtgcccatcaggtgcctgccgtctcttctgtgtcacacacagccctctatactcctccacctgagatacctaccactgtcctcaacattccccacccatcagtcatttcctctccacttctcaagtccttgcactctgctggacccccgctccttgctgttactgcagctcctccagcccagccccttgccaagaaaaaaggcgtaaagcggaaagcagatactaccacccctacacctacagccatcttggctcctggttctccagctagccctcctgggagtcttgagcctaaggcagcacggcttccccctatgcgtagagagagtggtcgccccatcaagcccccacgcaaagacttgcctgactctcagcaacaacaccagagctctaagaaaggaaagctttcagaacagttaaaacattgcaatggcattttgaaggagttactctctaagaagcatgctgcctatgcttggcctttctataaaccagtggatgcttctgcacttggcctgcatgactaccatgacatcattaagcaccccatggacctcagcactgtcaagcggaagatggagaaccgtgattaccgggatgcacaggagtttgctgctgatgtacggcttatgttctccaactgctataagtacaatcccccagatcacgatgttgtggcaatggcacgaaagctacaggatgtatttgagttccgttatgccaagatgccagatgaaccactagaaccagggcctttaccagtctctactgccatgccccctggcttggccaaatcgtcttcagagtcctccagtgaggaaagtagcagtgagagctcctctgaggaagaggaggaggaagatgaggaggacgaggaggaagaagagagtgaaagctcagactcagaggaagaaagggctcatcgcttagcagaactacaggaacagcttcgggcagtacatgaacaactggctgctctgtcccagggtccaatatccaagcccaagaggaaaagagagaaaaaagagaaaaagaagaaacggaaggcagagaagcatcgaggccgagctggggccgatgaagatgacaaggggcctagggcaccccgcccacctcaacctaagaagtccaagaaagcaagtggcagtgggggtggcagtgctgctttaggcccttctggctttggaccttctggaggaagtggcaccaagctccccaaaaaggccacaaagacagccccacctgccctgcctacaggttatgattcagaggaggaggaagagagcaggcccatgagttacgatgagaagcggcagctgagcctggacatcaacaaattacctggggagaagctgggccgagttgtgcatataatccaagccagggagccctctttacgtgattcaaacccagaagagattgagattgattttgaaacactcaagccatccacacttagagagcttgagcgctatgtcctttcctgcctacgtaagaaaccccggaagccctacaccattaagaagcctgtgggaaagacaaaggaggaactggctttggagaaaaagcgggaattagaaaagcggttacaagatgtcagcggacagctcaattctactaaaaagccccccaagaaagcgaatgagaaaacagagtcatcctctgcacagcaagtagcagtgtcacgccttagcgcttccagctctagctcagattccagctcctcctcttcctcgtcgtcgtcttcagacaccagtgattcagactcaggctaaggggtcaggccagatggggcaggaaggctccgcaggaccggacccctagaccaccctgccccacctgccccttccccctttgctgtgacacttcttcatctcacccccccctgcccccctctaggagagctggctctgcagtgggggagggatgcagggacatttactgaaggagggacatggacaaaacaacattgaattcccagccccattggggagtgatctcttggacacagagcccccattcaaaatggggcagggcaagggtgggagtgtgcaaagccctgatctggagttacctgaggccatagctgccctattcacttctaagggccctgttttgagattgtttgttctaatttattttaagctaggtaaggctggggggagggtggggccgtggtcccctcagcctccatggggagggaagaagggggagctctttttttacgttgatttttttttttctactctgttttccctttttccttccgctccatttggggccctgggggtttcagtcatctccccatttggtcccctggactgtctttgttgattctaacttgtaaataaagaaaatattattcaagttttgagttaccttaatatttgcttttgtagtgtttcaaaaggaacatcataagaattgtcttgataattttgagggaaatattactgcagtgagaaaaggcaatagctaacctataattggattgtcttaatttttaaaccagtaggcttttgctgtgtttttaataaagtaaatatgacttttgtaaattga

SEQ ID NO: 3749 - DNA, 3467 bp, Homo sapiens
  source 1..3467: mol_type = unassigned DNA
cccaaagagactgctttcgtgccggccaggcagggggtttgtcgcctggaggcccaagaggaacggcctccccccaacttagcgggttatgctggaccgggcggtgaggggaaccgaggccacccggactttccgcggctgagggcagcgccggttccttgcggtcaagatgctgcaaaacgtgactccccacaataagctccctggggaagggaatgcagggttgctggggctgggcccagaagcagcagcaccagggaagaggattcgaaaaccctctctcttgtatgagggctttgagagccccacaatggcttcggtgcctgctttgcaacttacccctgccaacccaccacccccggaggtgtccaatcccaaaaagccaggacgagttaccaaccagctgcaatacctacacaaggtagtgatgaaggctctgtggaaacatcagttcgcatggccattccggcagcctgtggatgctgtcaaactgggtctaccggattatcacaaaattataaaacagcctatggacatgggtactattaagaggagacttgaaaacaattattattgggctgcttcagagtgtatgcaagattttaataccatgttcaccaactgttacatttacaacaagcccactgatgatattgtcctaatggcacaaacgctggaaaagatattcctacagaaggttgcatcaatgccacaagaagaacaagagctggtagtgaccatccctaagaacagccacaagaagggggccaagttggcagcgctccagggcagtgttaccagtgcccatcaggtgcctgccgtctcttctgtgtcacacacagccctgtatactcctccacctgagatacctaccactgtcctcaacattccccacccatcagtcatttcctctccacttctcaagtccttgcactctgctggacccccgctccttgctgttactgcagctcctccagcccagccccttgccaagaaaaaaggcgtaaagcggaaagcagatactaccacccctacacctacagccatcttggctcctggttctccagctagccctcctgggagtcttgagcctaaggcagcacggcttccccctatgcgtagagagagtggtcgccccatcaagcccccacgcaaagacttgcctgactctcagcaacaacaccagagctctaagaaaggaaagctttcagaacagttaaaacattgcaatggcattttgaaggagttactctctaagaagcatgctgcctatgcttggcctttctataaaccagtggatgcttctgcacttggcctgcatgactaccatgacatcattaagcaccccatggacctcagcactgtcaagcggaagatggagaaccgtgattaccgggatgcacaggagtttgctgctgatgtacggcttatgttctccaactgctataagtacaatcccccagatcacgatgttgtggcaatggcacgaaagctacaggatgtatttgagttccgttatgccaagatgccagatgaaccactagaaccagggcctttaccagtctctactgccatgccccctggcttggccaaatcgtcttcagagtcctccagtgaggaaagtagcagtgagagctcctctgaggaagaggaggaggaagatgaggaggacgaggaggaagaagagagtgaaagctcagactcagaggaagaaagggctcatcgcttagcagaactacaggaacagcttcgggcagtacatgaacaactggctgctctgtcccagggtccaatatccaagcccaagaggaaaagagagaaaaaagagaaaaagaagaaacggaaggcagagaagcatcgaggccgagctggggccgatgaagatgacaaggggcctagggcaccccgcccacctcaacctaagaagtccaagaaagcaagtggcagtgggggtggcagtgctgctttaggcccttctggctttggaccttctggaggaagtggcaccaaactccaggctggagtgcagtggcgtgatctcggcttactgcaacctccacttctcgggttcaagcgattctcctgcctcagcctcccaagtagccaggattacaggctccccaaaaaggccacaaagacagccccacctgccctgcctacaggttatgattcagaggaggaggaagagagcaggcccatgagttacgatgagaagcggcagctgagcctggacatcaacaaattacctggggagaagctgggccgagttgtgcatataatccaagccagggagccctctttacgtgattcaaacccagaagagattgagattgattttgaaacactcaagccatccacacttagagagcttgagcgctatgtcctttcctgcctacgtaagaaaccccggaagccctacaccattaagaagcctgtgggaaagacaaaggaggaactggctttggagaaaaagcgggaattagaaaagcggttacaagatgtcagcggacagctcaattctactaaaaagccccccaagaaagcgaatgagaaaacagagtcatcctctgcacagcaagtagcagtgtcacgccttagcgcttccagctccagctcagattccagctcctcctcttcctcgtcgtcgtcttcagacaccagtgattcagactcaggctaaggggtcaggccagatggggcaggaaggctccgcaggaccggacccctagaccaccctgccccacctgccccttccccctttgctgtgacacttcttcatctcacccccccccgcccccctctaggagagctggctctgcagtgggggagggatgcagggacatttactgaaggagggacatggacaaaacaacattgaattcccagccccattggggagtgatctcttggacacagagcccccattcaaaatggggcagggcaagggtgggagtgtgcaaagccctgatctggagttacctgaggccacagctgccctattcacttctaagggccctgttttgagattgtttgttctaatttattttaagctaggtaaggctggggggagggtggggccgtggtcccctcagcctccatggggagggaagaagggggagctctttttttacgttgatttttttttttctactctgttttccctttttccttccgctccatttggggccctgggggtttcagtcatctccccatttggtcccctggactgtctttgttgattctaacttgtaaataaagaaaatattattcaagttttgagttaccttaatatttgcttttgtagtgtttcaaaaggaacatcataagaattgtcttgataattttgagggaaatattactgcagtgagaaaaggcaatagctaacctataattggattgtcttaatttttaaaccagtaggcttttgctgtgtttttaataaagtaaatatgacttttgtaaattga

SEQ ID NO: 3750 - DNA, 4898 bp, Homo sapiens
  source 1..4898: mol_type = unassigned DNA
tagtctgagccgcagccgccgcctcctccgctcgccctcctccctggcgctgaccgatggaccagccgctccgtggggaggactccggaccctggtgggggggcgggggggttctttcgcccccgtggcggagggcccctgagaggcggatacgggtgtgcctttgggggtgatgtggcgtgtggggggaaaggtccgagctcgcctggagggggagggtttttcccttaagtcatccctcccaggacttgctttttctgctctgagccggacgccggaatggagtttgaggaagagattcttcgctgctgctgccttaccgccgagaaccaccacccgccaggcgtcttgcggccacacccctggcgggttcaggcaggctacgcccacgcgacccctcccgtttccctgctttggccaatggaggagctacgaatggcacgacctgctcgagcttggcagtctccagttgggctgtgcatggaagcttgggaagactttgttggaaggggaggcggggagagagtgctggaggctctggggcgatggcttccgcacctcttccaaccaccctctttccctggagtcggcggaccacagctcagccaattggcttggagatgtggcgggttgccacttccctgtgggtctctgcggcactcttctgcctggtgactgacaccttggaaatgaagtttatgacgtcatcgttgcggctggccaatagaaaaagctcccgcggagaggtgttccttccccttcgactcagcttcttcacccgcgtgagcgagcgcgcgcgcgcggagggggtggggaaaagctcaagcagggtggcgcgcatgagcggcgaagctcctcctccccgcctatatataaagggctggcgcggggctcggcggcgccatttcgtgctggagtggagcagcctctagaacgagctggaggattctgcctaccgatacagagccttcgagtcgtccggggccgccattacaatccacctccatccgcttggaaatggccttcgtcccggcctatgactggtcccagcgggcagtacagaccccctagaagcccctggagctcccctttttcgggccccgcccaatcctcggagtctgtccaccccctctactccgccctcaagaggatttcaaagatggaggcggcggctccctaaaccacttttcgtgttcatccgcctccatccgagatcgaaacgggacctcgtcggccccgtaggggcccgacaagaagagggaatccctgcagaccaacagcgggctatattgacgacggtgtctgagatcggggaccgtcttttgaagagtcagtccctccttagttgcccgcctcagctgaggccgccgccattttcttgctgtccgccgtctgcagagcgcgccaagctgcccggagctctccgagaggccccaaagagactgctttcgtgccggccaggcagggggtttgtcgcctggaggcccaagaggaacggcctccccccaacttagcgggttatgctggaccgggcggtgaggggaaccgaggccacccggactttccgcggctgagggcagcgccggttccttgcggtcaagatgctgcaaaacgtgactccccacaataagctccctggggaagggaatgcagggttgctggggctgggcccagaagcagcagcaccagggaagaggattcgaaaaccctctctcttgtatgagggctttgagagccccacaatggcttcggtgcctgctttgcaacttacccctgccaacccaccacccccggaggtgtccaatcccaaaaagccaggacgagttaccaaccagctgcaatacctacacaaggtagtgatgaaggctctgtggaaacatcagttcgcatggccattccggcagcctgtggatgctgtcaaactgggtctaccggattatcacaaaattataaaacagcctatggacatgggtactattaagaggagacttgaaaacaattattattgggctgcttcagagtgtatgcaagattttaataccatgttcaccaactgttacatttacaacaagcccactgatgatattgtcctaatggcacaaacgctggaaaagatattcctacagaaggttgcatcaatgccacaagaagaacaagagctggtagtgaccatccctaagaacagccacaagaagggggccaagttggcagcgctccagggcagtgttaccagtgcccatcaggtgcctgccgtctcttctgtgtcacacacagccctgtatactcctccacctgagatacctaccactgtcctcaacattccccacccatcagtcatttcctctccacttctcaagtccttgcactctgctggacccccgctccttgctgttactgcagctcctccagcccagccccttgccaagaaaaaaggcgtaaagcggaaagcagatactaccacccctacacctacagccatcttggctcctggttctccagctagccctcctgggagtcttgagcctaaggcagcacggcttccccctatgcgtagagagagtggtcgccccatcaagcccccacgcaaagacttgcctgactctcagcaacaacaccagagctctaagaaaggaaagctttcagaacagttaaaacattgcaatggcattttgaaggagttactctctaagaagcatgctgcctatgcttggcctttctataaaccagtggatgcttctgcacttggcctgcatgactaccatgacatcattaagcaccccatggacctcagcactgtcaagcggaagatggagaaccgtgattaccgggatgcacaggagtttgctgctgatgtacggcttatgttctccaactgctataagtacaatcccccagatcacgatgttgtggcaatggcacgaaagctacaggatgtatttgagttccgttatgccaagatgccagatgaaccactagaaccagggcctttaccagtctctactgccatgccccctggcttggccaaatcgtcttcagagtcctccagtgaggaaagtagcagtgagagctcctctgaggaagaggaggaggaagatgaggaggacgaggaggaagaagagagtgaaagctcagactcagaggaagaaagggctcatcgcttagcagaactacaggaacagcttcgggcagtacatgaacaactggctgctctgtcccagggtccaatatccaagcccaagaggaaaagagagaaaaaagagaaaaagaagaaacggaaggcagagaagcatcgaggccgagctggggccgatgaagatgacaaggggcctagggcaccccgcccacctcaacctaagaagtccaagaaagcaagtggcagtgggggtggcagtgctgctttaggcccttctggctttggaccttctggaggaagtggcaccaaactccaggctggagtgcagtggcgtgatctcggcttactgcaacctccacttctcgggttcaagcgattctcctgcctcagcctcccaagtagccaggattacaggctccccaaaaaggccacaaagacagccccacctgccctgcctacaggttatgattcagaggaggaggaagagagcaggcccatgagttacgatgagaagcggcagctgagcctggacatcaacaaattacctggggagaagctgggccgagttgtgcatataatccaagccagggagccctctttacgtgattcaaacccagaagagattgagattgattttgaaacactcaagccatccacacttagagagcttgagcgctatgtcctttcctgcctacgtaagaaaccccggaagccctacaccattaagaagcctgtgggaaagacaaaggaggaactggctttggagaaaaagcgggaattagaaaagcggttacaagatgtcagcggacagctcaattctactaaaaagccccccaagaaagcgaatgagaaaacagagtcatcctctgcacagcaagtagcagtgtcacgccttagcgcttccagctccagctcagattccagctcctcctcttcctcgtcgtcgtcttcagacaccagtgattcagactcaggctaaggggtcaggccagatggggcaggaaggctccgcaggaccggacccctagaccaccctgccccacctgccccttccccctttgctgtgacacttcttcatctcacccccccccgcccccctctaggagagctggctctgcagtgggggagggatgcagggacatttactgaaggagggacatggacaaaacaacattgaattcccagccccattggggagtgatctcttggacacagagcccccattcaaaatggggcagggcaagggtgggagtgtgcaaagccctgatctggagttacctgaggccacagctgccctattcacttctaagggccctgttttgagattgtttgttctaatttattttaagctaggtaaggctggggggagggtggggccgtggtcccctcagcctccatggggagggaagaagggggagctctttttttacgttgatttttttttttctactctgttttccctttttccttccgctccatttggggccctgggggtttcagtcatctccccatttggtcccctggactgtctttgttgattctaacttgtaaataaagaaaatattattcaagttttgagttaccttaatatttgcttttgtagtgtttcaaaaggaacatcataagaattgtcttgataattttgagggaaatattactgcagtgagaaaaggcaatagctaacctataattggattgtcttaatttttaaaccagtaggcttttgctgtgtttttaataaagtaaatatgacttttgtaaattg

SEQ ID NO: 3751 - DNA, 3467 bp, Homo sapiens
  source 1..3467: mol_type = unassigned DNA
cccaaagagactgctttcgtgccggccaggcagggggtttgtcgcctggaggcccaagaggaacggcctccccccaacttagcgggttatgctggaccgggcggtgaggggaaccgaggccacccggactttccgcggctgagggcagcgccggttccttgcggtcaagatgctgcaaaacgtgactccccacaataagctccctggggaagggaatgcagggttgctggggctgggcccagaagcagcagcaccagggaaaaggattcgaaaaccctctctcttgtatgagggctttgagagccccacaatggcttcggtgcctgctttgcaacttacccctgccaacccaccacccccggaggtgtccaatcccaaaaagccaggacgagttaccaaccagctgcaatacctacacaaggtagtgatgaaggctctgtggaaacatcagttcgcatggccattccggcagcctgtggatgctgtcaaactgggtctaccggattatcacaaaattataaaacagcctatggacatgggtactattaagaggagacttgaaaacaattattattgggctgcttcagagtgtatgcaagattttaataccatgttcaccaactgttacatttacaacaagcccactgatgatattgtcctaatggcacaaacgctggaaaagatattcctacagaaggttgcatcaatgccacaagaagaacaagagctggtagtgaccatccctaagaacagccacaagaagggggccaagttggcagcgctccagggcagtgttaccagtgcccatcaggtgcctgccgtctcttctgtgtcacacacagccctgtatactcctccacctgagatacctaccactgtcctcaacattccccacccatcagtcatttcctctccacttctcaagtccttgcactctgctggacccccgctccttgctgttactgcagctcctccagcccagccccttgccaagaaaaaaggcgtaaagcggaaagcagatactaccacccctacacctacagccatcttggctcctggttctccagctagccctcctgggagtcttgagcctaaggcagcacggcttccccctatgcgtagagagagtggtcgccccatcaagcccccacgcaaagacttgcctgactctcagcaacaacaccagagctctaagaaaggaaagctttcagaacagttaaaacattgcaatggcattttgaaggagttactctctaagaagcatgctgcctatgcttggcctttctataaaccagtggatgcttctgcacttggcctgcatgactaccatgacatcattaagcaccccatggacctcagcactgtcaagcggaagatggagaaccgtgattaccgggatgcacaggagtttgctgctgatgtacggcttatgttctccaactgctataagtacaatcccccagatcacgatgttgtggcaatggcacgaaagctacaggatgtatttgagttccgttatgccaagatgccagatgaaccactagaaccagggcctttaccagtctctactgccatgccccctggcttggccaaatcgtcttcagagtcctccagtgaggaaagtagcagtgagagctcctctgaggaagaggaggaggaagatgaggaggacgaggaggaagaagagagtgaaagctcagactcagaggaagaaagggctcatcgcttagcagaactacaggaacagcttcgggcagtacatgaacaactggctgctctgtcccagggtccaatatccaagcccaagaggaaaagagagaaaaaagagaaaaagaagaaacggaaggcagagaagcatcgaggccgagctggggccgatgaagatgacaaggggcctagggcaccccgcccacctcaacctaagaagtccaagaaagcaagtggcagtgggggtggcagtgctgctttaggcccttctggctttggaccttctggaggaagtggcaccaaactccaggctggagtgcagtggcgtgatctcggcttactgcaacctccacttctcgggttcaagcgattctcctgcctcagcctcccaagtagccaggattacaggctccccaaaaaggccacaaagacagccccacctgccctgcctacaggttatgattcagaggaggaggaagagagcaggcccatgagttacgatgagaagcggcagctgagcctggacatcaacaaattacctggggagaagctgggccgagttgtgcatataatccaagccagggagccctctttacgtgattcaaacccagaagagattgagattgattttgaaacactcaagccatccacacttagagagcttgagcgctatgtcctttcctgcctacgtaagaaaccccggaagccctacaccattaagaagcctgtgggaaagacaaaggaggaactggctttggagaaaaagcgggaattagaaaagcggttacaagatgtcagcggacagctcaattctactaaaaagccccccaagaaagcgaatgagaaaacagagtcatcctctgcacagcaagtagcagtgtcacgccttagcgcttccagctccagctcagattccagctcctcctcttcctcgtcgtcgtcttcagacaccagtgattcagactcaggctaaggggtcaggccagatggggcaggaaggctccgcaggaccggacccctagaccaccctgccccacctgccccttccccctttgctgtgacacttcttcatctcacccccccctgcccccctctaggagagctggctctgcagtgggggagggatgcagggacatttactgaaggagggacatggacaaaacaacattgaattcccagccccattggggagtgatctcttggacacagagcccccattcaaaatggggcagggcaagggtgggagtgtgcaaagccctgatctggagttacctgaggccatagctgccctattcacttctaagggccctgttttgagattgtttgttctaatttattttaagctaggtaaggctggggggagggtggggccgtggtcccctcagcctccatggggagggaagaagggggagctctttttttacgttgatttttttttttctactctgttttccctttttccttccgctccatttggggccctgggggtttcagtcatctccccatttggtcccctggactgtctttgttgattctaacttgtaaataaagaaaatattattcaagttttgagttaccttaatatttgcttttgtagtgtttcaaaaggaacatcataagaattgtcttgataattttgagggaaatattactgcagtgagaaaaggcaatagctaacctataattggattgtcttaatttttaaaccagtaggcttttgctgtgtttttaataaagtaaatatgacttttgtaaattga

SEQ ID NO: 3752 - DNA, 4807 bp, Homo sapiens
  source 1..4807: mol_type = unassigned DNA
ggagggggagggctagtctgagccgcagccgccgcctcctccgctcgccctcctccctggcgctgaccgatggaccagccgctccgtggggaggactccggaccctggtgggggggcgggggggttctttcgcccccgtggcggagggcccctgagaggcggatacgggtgtgcctttgggggtgatgtggcgtgtggggggaaaggtccgagctcgcctggagggggagggtttttcccttaagtcatccctcccaggacttgctttttctgctctgagccggacgccggaatggagtttgaggaagagattcttcgctgctgctgccttaccgccgagaaccaccacccgccaggcgtcttgcggccacacccctggcgggttcaggcaggctacgcccacgcgacccctcccgtttccctgctttggccaatggaggagctacgaatggcacgacctgctcgagcttggcagtctccagttgggctgtgcatggaagcttgggaagactttgttggaaggggaggcggggagagagtgctggaggctctggggcgatggcttccgcacctcttccaaccaccctctttccctggagtcggcggaccacagctcagccaattggcttggagatgtggcgggttgccacttccctgtgggtctctgcggcactcttctgcctggtgactgacaccttggaaatgaagtttatgacgtcatcgttgcggctggccaatagaaaaagctcccgcggagaggtgttccttccccttcgactcagcttcttcacccgcgtgagcgagcgcgcgcgcgcggagggggtggggaaaatctcaagcagggtggcgcgcatgagcggcgaagctcctcctccccgcctatatataaagggctggcgcggggctcggcggcgccatttcgtgctggagtggagcagcctctagaacgagctggaggattctgcctaccgatacagagccttcgagtcgtccggggccgccattacaatccacctccatccgcttggaaatggccttcgtcccggcctatgactggtcccagcgggcagtacagaccccctagaagcccctggagctcccctttttcgggccccgcccaatcctcggagtctgtccaccccctctactccgccctcaagaggatttcaaagatggaggcggcggctccctaaaccacttttcgtgttcatccgcctccatccgagatcgaaacgggacctcgtcggccccgtaggggcccgacaagaagagggaatccctgcagaccaacagcgggctatattgacgacggtgtctgagatcggggaccgtcttttgaagagtcagtccctccttagttgcccgcctcagctgaggccgccgccattttcttgctgtccgccgtctgcagagcgcgccaagctgcccggagctctccgagaggccccaaagagactgctttcgtgccggccaggcagggggtttgtcgcctggaggcccaagaggaacggcctccccccaacttagcgggttatgctggaccgggcggtgaggggaaccgaggccacccggactttccgcggctgagggcagcgccggttccttgcggtcaagatgctgcaaaacgtgactccccacaataagctccctggggaagggaatgcagggttgctggggctgggcccagaagcagcagcaccagggaaaaggattcgaaaaccctctctcttgtatgagggctttgagagccccacaatggcttcggtgcctgctttgcaacttacccctgccaacccaccacccccggaggtgtccaatcccaaaaagccaggacgagttaccaaccagctgcaatacctacacaaggtagtgatgaaggctctgtggaaacatcagttcgcatggccattccggcagcctgtggatgctgtcaaactgggtctaccggattatcacaaaattataaaacagcctatggacatgggtactattaagaggagacttgaaaacaattattattgggctgcttcagagtgtatgcaagattttaataccatgttcaccaactgttacatttacaacaagcccactgatgatattgtcctaatggcacaaacgctggaaaagatattcctacagaaggttgcatcaatgccacaagaagaacaagagctggtagtgaccatccctaagaacagccacaagaagggggccaagttggcagcgctccagggcagtgttaccagtgcccatcaggtgcctgccgtctcttctgtgtcacacacagccctgtatactcctccacctgagatacctaccactgtcctcaacattccccacccatcagtcatttcctctccacttctcaagtccttgcactctgctggacccccgctccttgctgttactgcagctcctccagcccagccccttgccaagaaaaaaggcgtaaagcggaaagcagatactaccacccctacacctacagccatcttggctcctggttctccagctagccctcctgggagtcttgagcctaaggcagcacggcttccccctatgcgtagagagagtggtcgccccatcaagcccccacgcaaagacttgcctgactctcagcaacaacaccagagctctaagaaaggaaagctttcagaacagttaaaacattgcaatggcattttgaaggagttactctctaagaagcatgctgcctatgcttggcctttctataaaccagtggatgcttctgcacttggcctgcatgactaccatgacatcattaagcaccccatggacctcagcactgtcaagcggaagatggagaaccgtgattaccgggatgcacaggagtttgctgctgatgtacggcttatgttctccaactgctataagtacaatcccccagatcacgatgttgtggcaatggcacgaaagctacaggatgtatttgagttccgttatgccaagatgccagatgaaccactagaaccagggcctttaccagtctctactgccatgccccctggcttggccaaatcgtcttcagagtcctccagtgaggaaagtagcagtgagagctcctctgaggaagaggaggaggaagatgaggaggacgaggaggaagaagagagtgaaagctcagactcagaggaagaaagggctcatcgcttagcagaactacaggaacagcttcgggcagtacatgaacaactggctgctctgtcccagggtccaatatccaagcccaagaggaaaagagagaaaaaagagaaaaagaagaaacggaaggcagagaagcatcgaggccgagctggggccgatgaagatgacaaggggcctagggcaccccgcccacctcaacctaagaagtccaagaaagcaagtggcagtgggggtggcagtgctgctttaggcccttctggctttggaccttctggaggaagtggcaccaagctccccaaaaaggccacaaagacagccccacctgccctgcctacaggttatgattcagaggaggaggaagagagcaggcccatgagttacgatgagaagcggcagctgagcctggacatcaacaaattacctggggagaagctgggccgagttgtgcatataatccaagccagggagccctctttacgtgattcaaacccagaagagattgagattgattttgaaacactcaagccatccacacttagagagcttgagcgctatgtcctttcctgcctacgtaagaaaccccggaagccctacaccattaagaagcctgtgggaaagacaaaggaggaactggctttggagaaaaagcgggaattagaaaagcggttacaagatgtcagcggacagctcaattctactaaaaagccccccaagaaagcgaatgagaaaacagagtcatcctctgcacagcaagtagcagtgtcacgccttagcgcttccagctccagctcagattccagctcctcctcttcctcgtcgtcgtcttcagacaccagtgattcagactcaggctaaggggtcaggccagatggggcaggaaggctccgcaggaccggacccctagaccaccctgccccacctgccccttccccctttgctgtgacacttcttcatctcacccccccctgcccccctctaggagagctggctctgcagtgggggagggatgcagggacatttactgaaggagggacatggacaaaacaacattgaattcccagccccattggggagtgatctcttggacacagagcccccattcaaaatggggcagggcaagggtgggagtgtgcaaagccctgatctggagttacctgaggccatagctgccctattcacttctaagggccctgttttgagattgtttgttctaatttattttaagctaggtaaggctggggggagggtggggccgtggtcccctcagcctccatggggagggaagaagggggagctctttttttacgttgatttttttttttctactctgttttccctttttccttccgctccatttggggccctgggggtttcagtcatctccccatttggtcccctggactgtctttgttgattctaacttgtaaataaagaaaatattattcaagttttgagttaccttaatatttgcttttgtagtgtttcaaaaggaacatcataagaattgtcttgataattttgagggaaatattactgcagtgagaaaaggcaatagctaacctataattggattgtcttaatttttaaaccagtaggcttttgctgtgtttttaataaagtaaatatgacttttgtaaattga

SEQ ID NO: 3753 - DNA, 4894 bp, Homo sapiens
  source 1..4894: mol_type = unassigned DNA
ggactgcgggataggaagctggggatatggacaagcagcagcgttatagcgctctgggtttcgggacataggcctgggccatgcggcccccttggccccttggcgcgacccccaggaacgttcggaaagctggtcctcgtggctgggggaaaggcggggggtgggggggaagcgggcacgtgaccccggtcagccaatctgggtgctgctgacgtggccgcgcggccccgatgctctccccacccccccagcccgttcgggaagggaggggctgggggctacgccccctcccccagcacggcttcgttttctgggggggggttgacaccccggattacataccccgtaccaagccgagggcaactttggaggccccctggaaggctttaggatccagattcttcgctgctgctgccttaccgccgagaaccaccacccgccaggcgtcttgcggccacacccctggcgggttcaggcaggctacgcccacgcgacccctcccgtttccctgctttggccaatggaggagctacgaatggcacgacctgctcgagcttggcagtctccagttgggctgtgcatggaagcttgggaagactttgttggaaggggaggcggggagagagtgctggaggctctggggcgatggcttccgcacctcttccaaccaccctctttccctggagtcggcggaccacagctcagccaattggcttggagatgtggcgggttgccacttccctgtgggtctctgcggcactcttctgcctggtgactgacaccttggaaatgaagtttatgacgtcatcgttgcggctggccaatagaaaaagctcccgcggagaggtgttccttccccttcgactcagcttcttcacccgcgtgagcgagcgcgcgcgcgcggagggggtggggaaaatctcaagcagggtggcgcgcatgagcggcgaagctcctcctccccgcctatatataaagggctggcgcggggctcggcggcgccatttcgtgctggagtggagcagcctctagaacgagctggaggattctgcctaccgatacagagccttcgagtcgtccggggccgccattacaatccacctccatccgcttggaaatggccttcgtcccggcctatgactggtcccagcgggcagtacagaccccctagaagcccctggagctcccctttttcgggccccgcccaatcctcggagtctgtccaccccctctactccgccctcaagaggatttcaaagatggaggcggcggctccctaaaccacttttcgtgttcatccgcctccatccgagatcgaaacgggacctcgtcggccccgtaggggcccgacaagaagagggaatccctgcagaccaacagcgggctatattgacgacggtgtctgagatcggggaccgtcttttgaagagtcagtccctccttagttgcccgcctcagctgaggccgccgccattttcttgctgtccgccgtctgcagagcgcgccaagctgcccggagctctccgagaggccccaaagagactgctttcgtgccggccaggcagggggtttgtcgcctggaggcccaagaggaacggcctccccccaacttagcgggttatgctggaccgggcggtgaggggaaccgaggccacccggactttccgcggctgagggcagcgccggttccttgcggtcaagatgctgcaaaacgtgactccccacaataagctccctggggaagggaatgcagggttgctggggctgggcccagaagcagcagcaccagggaaaaggattcgaaaaccctctctcttgtatgagggctttgagagccccacaatggcttcggtgcctgctttgcaacttacccctgccaacccaccacccccggaggtgtccaatcccaaaaagccaggacgagttaccaaccagctgcaatacctacacaaggtagtgatgaaggctctgtggaaacatcagttcgcatggccattccggcagcctgtggatgctgtcaaactgggtctaccggattatcacaaaattataaaacagcctatggacatgggtactattaagaggagacttgaaaacaattattattgggctgcttcagagtgtatgcaagattttaataccatgttcaccaactgttacatttacaacaagcccactgatgatattgtcctaatggcacaaacgctggaaaagatattcctacagaaggttgcatcaatgccacaagaagaacaagagctggtagtgaccatccctaagaacagccacaagaagggggccaagttggcagcgctccagggcagtgttaccagtgcccatcaggtgcctgccgtctcttctgtgtcacacacagccctgtatactcctccacctgagatacctaccactgtcctcaacattccccacccatcagtcatttcctctccacttctcaagtccttgcactctgctggacccccgctccttgctgttactgcagctcctccagcccagccccttgccaagaaaaaaggcgtaaagcggaaagcagatactaccacccctacacctacagccatcttggctcctggttctccagctagccctcctgggagtcttgagcctaaggcagcacggcttccccctatgcgtagagagagtggtcgccccatcaagcccccacgcaaagacttgcctgactctcagcaacaacaccagagctctaagaaaggaaagctttcagaacagttaaaacattgcaatggcattttgaaggagttactctctaagaagcatgctgcctatgcttggcctttctataaaccagtggatgcttctgcacttggcctgcatgactaccatgacatcattaagcaccccatggacctcagcactgtcaagcggaagatggagaaccgtgattaccgggatgcacaggagtttgctgctgatgtacggcttatgttctccaactgctataagtacaatcccccagatcacgatgttgtggcaatggcacgaaagctacaggatgtatttgagttccgttatgccaagatgccagatgaaccactagaaccagggcctttaccagtctctactgccatgccccctggcttggccaaatcgtcttcagagtcctccagtgaggaaagtagcagtgagagctcctctgaggaagaggaggaggaagatgaggaggacgaggaggaagaagagagtgaaagctcagactcagaggaagaaagggctcatcgcttagcagaactacaggaacagcttcgggcagtacatgaacaactggctgctctgtcccagggtccaatatccaagcccaagaggaaaagagagaaaaaagagaaaaagaagaaacggaaggcagagaagcatcgaggccgagctggggccgatgaagatgacaaggggcctagggcaccccgcccacctcaacctaagaagtccaagaaagcaagtggcagtgggggtggcagtgctgctttaggcccttctggctttggaccttctggaggaagtggcaccaagctccccaaaaaggccacaaagacagccccacctgccctgcctacaggttatgattcagaggaggaggaagagagcaggcccatgagttacgatgagaagcggcagctgagcctggacatcaacaaattacctggggagaagctgggccgagttgtgcatataatccaagccagggagccctctttacgtgattcaaacccagaagagattgagattgattttgaaacactcaagccatccacacttagagagcttgagcgctatgtcctttcctgcctacgtaagaaaccccggaagccctacaccattaagaagcctgtgggaaagacaaaggaggaactggctttggagaaaaagcgggaattagaaaagcggttacaagatgtcagcggacagctcaattctactaaaaagccccccaagaaagcgaatgagaaaacagagtcatcctctgcacagcaagtagcagtgtcacgccttagcgcttccagctccagctcagattccagctcctcctcttcctcgtcgtcgtcttcagacaccagtgattcagactcaggctaaggggtcaggccagatggggcaggaaggctccgcaggaccggacccctagaccaccctgccccacctgccccttccccctttgctgtgacacttcttcatctcacccccccctgcccccctctaggagagctggctctgcagtgggggagggatgcagggacatttactgaaggagggacatggacaaaacaacattgaattcccagccccattggggagtgatctcttggacacagagcccccattcaaaatggggcagggcaagggtgggagtgtgcaaagccctgatctggagttacctgaggccatagctgccctattcacttctaagggccctgttttgagattgtttgttctaatttattttaagctaggtaaggctggggggagggtggggccgtggtcccctcagcctccatggggagggaagaagggggagctctttttttacgttgatttttttttttctactctgttttccctttttccttccgctccatttggggccctgggggtttcagtcatctccccatttggtcccctggactgtctttgttgattctaacttgtaaataaagaaaatattattcaagttttgagttaccttaatatttgcttttgtagtgtttcaaaaggaacatcataagaattgtcttgataattttgagggaaatattactgcagtgagaaaaggcaatagctaacctataattggattgtcttaatttttaaaccagtaggcttttgctgtgtttttaataaagtaaatatgacttttgtaaattga

SEQ ID NO: 3754 - DNA, 887 bp, Homo sapiens
  source 1..887: mol_type = unassigned DNA
ttcgtcccctgggggtacagcagccgggagccaggctccctggggaagggaatgcagggttgctggggctgggcccagaagcagcagcaccagggaagaggattcgaaaaccctctctcttgtatgagggctttgagagccccacaatggcttcggtgcctgctttgcaacttacccctgccaacccaccacccccggaggtgtccaatcccaaaaagccaggacgagttaccaaccagctgcaatacctacacaaggtagtgatgaaggctctgtggaaacatcagttcgcatggccattccggcagcctgtggatgctgtcaaactgggtctaccggattatcacaaaattataaaacagcctatggacatgggtactattaagaggagacttgaaaacaattattattgggctgcttcagagtgtatgcaagattttaataccatgttcaccaactgttacatttacaacaagcccactgatgatattgtcctaatggcacaaacgctggaaaagatattcctacagaaggttgcatcaatgccacaagaagaacaagagctggtagtgaccatccctaagaacagccacaagaagggggccaagttggcagcgctccagggcagtgttaccagtgcccatcaggtgcctgccgtctcttctgtgtcacacacagccctctatactcctccacctgagatacctaccactgtcctcaacattccccacccatcagtcatttcctctccacttctcaagtccttgcactctgctggacccccgctccttgctgttactgcagctcctccagcccagccccttgccaagaaaaaaggcgtaaagcggaaagcagatactaccacccctacacctacagccatcttg

SEQ ID NO: 3755 - DNA, 4894 bp, Homo sapiens
  source 1..4894: mol_type = unassigned DNA
ggactgcgggataggaagctggggatatggacaagcagcagcgttatagcgctctgggtttcgggacataggcctgggccatgcggcccccttggccccttggcgcgacccccaggaacgttcggaaagctggtcctcgtggctgggggaaaggcggggggtgggggggaagcgggcacgtgaccccggtcagccaatctgggtgctgctgacgtggccgcgcggccccgatgctctccccacccccccagcccgttcgggaagggaggggctgggggctacgccccctcccccagcacggcttcgttttctgggggggggttgacaccccggattacataccccgtaccaagccgagggcaactttggaggccccctggaaggctttaggatccagattcttcgctgctgctgccttaccgccgagaaccaccacccgccaggcgtcttgcggccacacccctggcgggttcaggcaggctacgcccacgcgacccctcccgtttccctgctttggccaatggaggagctacgaatggcacgacctgctcgagcttggcagtctccagttgggctgtgcatggaagcttgggaagactttgttggaaggggaggcggggagagagtgctggaggctctggggcgatggcttccgcacctcttccaaccaccctctttccctggagtcggcggaccacagctcagccaattggcttggagatgtggcgggttgccacttccctgtgggtctctgcggcactcttctgcctggtgactgacaccttggaaatgaagtttatgacgtcatcgttgcggctggccaatagaaaaagctcccgcggagaggtgttccttccccttcgactcagcttcttcacccgcgtgagcgagcgcgcgcgcgcggagggggtggggaaaatctcaagcagggtggcgcgcatgagcggcgaagctcctcctccccgcctatatataaagggctggcgcggggctcggcggcgccatttcgtgctggagtggagcagcctctagaacgagctggaggattctgcctaccgatacagagccttcgagtcgtccggggccgccattacaatccacctccatccgcttggaaatggccttcgtcccggcctatgactggtcccagcgggcagtacagaccccctagaagcccctggagctcccctttttcgggccccgcccaatcctcggagtctgtccaccccctctactccgccctcaagaggatttcaaagatggaggcggcggctccctaaaccacttttcgtgttcatccgcctccatccgagatcgaaacgggacctcgtcggccccgtaggggcccgacaagaagagggaatccctgcagaccaacagcgggctatattgacgacggtgtctgagatcggggaccgtcttttgaagagtcagtccctccttagttgcccgcctcagctgaggccgccgccattttcttgctgtccgccgtctgcagagcgcgccaagctgcccggagctctccgagaggccccaaagagactgctttcgtgccggccaggcagggggtttgtcgcctggaggcccaagaggaacggcctccccccaacttagcgggttatgctggaccgggcggtgaggggaaccgaggccacccggactttccgcggctgagggcagcgccggttccttgcggtcaagatgctgcaaaacgtgactccccacaataagctccctggggaagggaatgcagggttgctggggctgggcccagaagcagcagcaccagggaaaaggattcgaaaaccctctctcttgtatgagggctttgagagccccacaatggcttcggtgcctgctttgcaacttacccctgccaacccaccacccccggaggtgtccaatcccaaaaagccaggacgagttaccaaccagctgcaatacctacacaaggtagtgatgaaggctctgtggaaacatcagttcgcatggccattccggcagcctgtggatgctgtcaaactgggtctaccggattatcacaaaattataaaacagcctatggacatgggtactattaagaggagacttgaaaacaattattattgggctgcttcagagtgtatgcaagattttaataccatgttcaccaactgttacatttacaacaagcccactgatgatattgtcctaatggcacaaacgctggaaaagatattcctacagaaggttgcatcaatgccacaagaagaacaagagctggtagtgaccatccctaagaacagccacaagaagggggccaagttggcagcgctccagggcagtgttaccagtgcccatcaggtgcctgccgtctcttctgtgtcacacacagccctgtatactcctccacctgagatacctaccactgtcttcaacattccccacccatcagtcatttcctctccacttctcaagtccttgcactctgctggacccccgctccttgctgttactgcagctcctccagcccagccccttgccaagaaaaaaggcgtaaagcggaaagcagatactaccacccctacacctacagccatcttggctcctggttctccagctagccctcctgggagtcttgagcctaaggcagcacggcttccccctatgcgtagagagagtggtcgccccatcaagcccccacgcaaagacttgcctgactctcagcaacaacaccagagctctaagaaaggaaagctttcagaacagttaaaacattgcaatggcattttgaaggagttactctctaagaagcatgctgcctatgcttggcctttctataaaccagtggatgcttctgcacttggcctgcatgactaccatgacatcattaagcaccccatggacctcagcactgtcaagcggaagatggagaaccgtgattaccgggatgcacaggagtttgctgctgatgtacggcttatgttctccaactgctataagtacaatcccccagatcacgatgttgtggcaatggcacgaaagctacaggatgtatttgagttccgttatgccaagatgccagatgaaccactagaaccagggcctttaccagtctctactgccatgccccctggcttggccaaatcgtcttcagagtcctccagtgaggaaagtagcagtgagagctcctctgaggaagaggaggaggaagatgaggaggacgaggaggaagaagagagtgaaagctcagactcagaggaagaaagggctcatcgcttagcagaactacaggaacagcttcgggcagtacatgaacaactggctgctctgtcccagggtccaatatccaagcccaagaggaaaagagagaaaaaagagaaaaagaagaaacggaaggcagagaagcatcgaggccgagctggggccgatgaagatgacaaggggcctagggcaccccgcccacctcaacctaagaagtccaagaaagcaagtggcagtgggggtggcagtgctgctttaggcccttccggctttggaccttctggaggaagtggcaccaagctccccaaaaaggccacaaagacagccccacctgccctgcctacaggttatgattcagaggaggaggaagagagcaggcccatgagttacgatgagaagcggcagctgagcctggacatcaacaaattacctggggagaagctgggccgagttgtgcatataatccaagccagggagccctctttacgtgattcaaacccagaagagattgagattgattttgaaacactcaagccatccacacttagagagcttgagcgctatgtcctttcctgcctacgtaagaaaccccggaagccctacaccattaagaagcctgtgggaaagacaaaggaggaactggctttggagaaaaagcgggaattagaaaagcggttacaagatgtcagcggacagctcaattctactaaaaagccccccaagaaagcgaatgagaaaacagagtcatcctctgcacagcaagtagcagtgtcacgccttagcgcttccagctccagctcagattccagctcctcctcttcctcgtcgtcgtcttcagacaccagtgattcagactcaggctaaggggtcaggccagatggggcaggaaggctccgcaggaccggacccctagaccaccctgccccacctgccccttccccctttgctgtgacacttcttcatctcacccccccctgcccccctctaggagagctggctctgcagtgggggagggatgcagggacatttactgaaggagggacatggacaaaacaacattgaattcccagccccattggggagtgatctcttggacacagagcccccattcaaaatggggcagggcaagggtgggagtgtgcaaagccctgatctggagttacctgaggccatagctgccctattcacttctaagggccctgttttgagattgtttgttctaatttattttaagctaggtaaggctggggggagggtggggccgtggtcccctcagcctccatggggagggaagaagggggagctctttttttacgttgatttttttttttctactctgttttccctttttccttccgctccatttggggccctgggggtttcagtcatctccccatttggtcccctggactgtctttgttgattctaacttgtaaataaagaaaatattattcaagttttgagttaccttaatatttgcttttgtagtgtttcaaaaggaacatcataagaattgtcttgataattttgagggaaatattactgcagtgagaaaaggcaatagctaacctataattggattgtcttaatttttaaaccagtaggcttttgctgtgtttttaataaagtaaatatgacttttgtaaattga

SEQ ID NO: 3756 - DNA, 3542 bp, Homo sapiens
  source 1..3542: mol_type = unassigned DNA
ggaccgcgggataggaagctggggatatggacaagcagcagcgttatagcgctctgggtttcgggacataggcctgggccatgcggcccccttggccccttggcgcgacccccaggaacgttcggaaagctggtcctcgtggctgggggaaaggcggggggtgggggggaagcgggcacgtgaccccggtcagccaatctgggtgctgctgacgtggccgcgcggccccgatgctctccccacccccccagcccgttcgggaagggaggggctgggggctacgccccctcccccagcacggcttcgttttctgggggggggttgacaccccggattacataccccgtaccaagccgagggcaactttggaggccccctggaaggctttaggatccagattcttcgctgctgctgccttaccgccgagaaccaccacccgccaggcgtcttgcggccacacccctggcgggttcaggcaggctacgcccacgcgacccctcccgtttccctgctttggccaatggaggagctacgaatggcacgacctgctcgagcttggcagtctccagttgggctgtgcatggaagcttgggaagactttgttggaaggggaggcggggagagagtgctggaggctctggggcgatggcttccgcacctcttccaaccaccctctttccctggagtcggcggaccacagctcagccaattggcttggagatgtggcgggttgccacttccctgtgggtctctgcggcactcttctgcctggtgactgacaccttggaaatgaagtttatgacgtcatcgttgcggctggccaatagaaaaagctcccgcggagaggtgttccttccccttcgactcagcttcttcacccgcgtgagcgagcgcgcgcgcgcggagggggtggggaaaatctcaagcagggtggcgcgcatgagcggcgaagctcctcctccccgcctatatataaagggctggcgcggggctcggcggcgccatttcgtgctggagtggagcagcctctagaacgagctggaggattctgcctaccgatacagagccttcgagtcgtccggggccgccattacaatccacctccatccgcttggaaatggccttcgtcccggcctatgactggtcccagcgggcagtacagaccccctagaagcccctggagctcccctttttcgggccccgcccaatcctcggagtctgtccaccccctctactccgccctcaagaggatttcaaagatggaggcggcggctccctaaaccacttttcgtgttcatccgcctccatccgagatcgaaacgggacctcgtcggccccgtaggggcccgacaagaagagggaatccctgcagaccaacagcgggctatattgacgacggtgtctgagatcggggaccgtcttttgaagagtcagtccctccttagttgcccgcctcagctgaggccgccgccattttcttgctgtccgccgtctgcagagcgcgccaagctgcccggagctctccgagaggccccaaagagactgctttcgtgccggccaggcagggggtttgtcgcctggaggcccaagaggaacggcctccccccaacttagcgggttatgctggaccgggcggtgaggggaaccgaggccacccggactttccgcggctgagggcagcgccggttccttgcggtcaagatgctgcaaaacgtgactccccacaataagctccctggggaagggaatgcagggttgctggggctgggcccagaagcagcagcaccagggaagaggattcgaaaaccctctctcttgtatgagggctttgagagccccacaatggcttcggtgcctgctttgcaacttacccctgccaacccaccacccccggaggtgtccaatcccaaaaagccaggacgagttaccaaccagctgcaatacctacacaaggtagtgatgaaggctctgtggaaacatcagttcgcatggccattccggcagcctgtggatgctgtcaaactgggtctaccggattatcacaaaattataaaacagcctatggacatgggtactattaagaggagacttgaaaacaattattattgggctgcttcagagtgtatgcaagattttaataccatgttcaccaactgttacatttacaacaagcccactgatgatattgtcctaatggcacaaacgctggaaaagatattcctacagaaggttgcatcaatgccacaagaagaacaagagctggtagtgaccatccctaagaacagccacaagaagggggccaagttggcagcgctccagggcagtgttaccagtgcccatcaggtgcctgccgtctcttctgtgtcacacacagccctctatactcctccacctgagatacctaccactgtcctcaacattccccacccatcagtcatttcctctccacttctcaagtccttgcactctgctggacccccgctccttgctgttactgcagctcctccagcccagccccttgccaagaaaaaaggcgtaaagcggaaagcagatactaccacccctacacctacagccatcttggctcctggttctccagctagccctcctgggagtcttgagcctaaggcagcacggcttccccctatgcgtagagagagtggtcgccccatcaagcccccacgcaaagacttgcctgactctcagcaacaacaccagagctctaagaaaggaaagctttcagaacagttaaaacattgcaatggcattttgaaggagttactctctaagaagcatgctgcctatgcttggcctttctataaaccagtggatgcttctgcacttggcctgcatgactaccatgacatcattaagcaccccatggacctcagcactgtcaagcggaagatggagaaccgtgattaccgggatgcacaggagtttgctgctgatgtacggcttatgttctccaactgctataagtacaatcccccagatcacgatgttgtggcaatggcacgaaagctacaggatgtatttgagttccgttatgccaagatgccagatgaaccactagaaccagggcctttaccagtctctactgccatgccccctggcttggccaaatcgtcttcagagtcctccagtgaggaaagtagcagtgagagctcctctgaggaagaggaggaggaagatgaggaggacgaggaggaagaagagagtgaaagctcagactcagaggaagaaagggctcatcgcttagcagaactacaggaacagcttcgggcagtacatgaacaactggctgctctgtcccagggtccaatatccaagcccaagaggaaaagagagaaaaaagagaaaaagaagaaacggaaggcagagaagcatcgaggccgagctggggccgatgaagatgacaaggggcctagggcaccccgcccacctcaacctaagaagtccaagaaagcaagtggcagtgggggtggcagtgctgctttaggcccttctggctttggaccttctggaggaagtggcaccaa

SEQ ID NO: 3757 - DNA, 3455 bp, Homo sapiens
  source 1..3455: mol_type = unassigned DNA
ggagggggagggctagtctgagccgcagccgccgcctcctccgctcgccctcctccctggcgctgaccgatggaccagccgctccgtggggaggactccggaccctggtgggggggcgggggggttctttcgcccccgtggcggagggcccctgagaggcggatacgggtgtgcctttgggggtgatgtggcgtgtggggggaaaggtccgagctcgcctggagggggagggtttttcccttaagtcatccctcccaggacttgctttttctgctctgagccggacgccggaatggagtttgaggaagagattcttcgctgctgctgccttaccgccgagaaccaccacccgccaggcgtcttgcggccacacccctggcgggttcaggcaggctacgcccacgcgacccctcccgtttccctgctttggccaatggaggagctacgaatggcacgacctgctcgagcttggcagtctccagttgggctgtgcatggaagcttgggaagactttgttggaaggggaggcggggagagagtgctggaggctctggggcgatggcttccgcacctcttccaaccaccctctttccctggagtcggcggaccacagctcagccaattggcttggagatgtggcgggttgccacttccctgtgggtctctgcggcactcttctgcctggtgactgacaccttggaaatgaagtttatgacgtcatcgttgcggctggccaatagaaaaagctcccgcggagaggtgttccttccccttcgactcagcttcttcacccgcgtgagcgagcgcgcgcgcgcggagggggtggggaaaatctcaagcagggtggcgcgcatgagcggcgaagctcctcctccccgcctatatataaagggctggcgcggggctcggcggcgccatttcgtgctggagtggagcagcctctagaacgagctggaggattctgcctaccgatacagagccttcgagtcgtccggggccgccattacaatccacctccatccgcttggaaatggccttcgtcccggcctatgactggtcccagcgggcagtacagaccccctagaagcccctggagctcccctttttcgggccccgcccaatcctcggagtctgtccaccccctctactccgccctcaagaggatttcaaagatggaggcggcggctccctaaaccacttttcgtgttcatccgcctccatccgagatcgaaacgggacctcgtcggccccgtaggggcccgacaagaagagggaatccctgcagaccaacagcgggctatattgacgacggtgtctgagatcggggaccgtcttttgaagagtcagtccctccttagttgcccgcctcagctgaggccgccgccattttcttgctgtccgccgtctgcagagcgcgccaagctgcccggagctctccgagaggccccaaagagactgctttcgtgccggccaggcagggggtttgtcgcctggaggcccaagaggaacggcctccccccaacttagcgggttatgctggaccgggcggtgaggggaaccgaggccacccggactttccgcggctgagggcagcgccggttccttgcggtcaagatgctgcaaaacgtgactccccacaataagctccctggggaagggaatgcagggttgctggggctgggcccagaagcagcagcaccagggaagaggattcgaaaaccctctctcttgtatgagggctttgagagccccacaatggcttcggtgcctgctttgcaacttacccctgccaacccaccacccccggaggtgtccaatcccaaaaagccaggacgagttaccaaccagctgcaatacctacacaaggtagtgatgaaggctctgtggaaacatcagttcgcatggccattccggcagcctgtggatgctgtcaaactgggtctaccggattatcacaaaattataaaacagcctatggacatgggtactattaagaggagacttgaaaacaattattattgggctgcttcagagtgtatgcaagattttaataccatgttcaccaactgttacatttacaacaagcccactgatgatattgtcctaatggcacaaacgctggaaaagatattcctacagaaggttgcatcaatgccacaagaagaacaagagctggtagtgaccatccctaagaacagccacaagaagggggccaagttggcagcgctccagggcagtgttaccagtgcccatcaggtgcctgccgtctcttctgtgtcacacacagccctctatactcctccacctgagatacctaccactgtcctcaacattccccacccatcagtcatttcctctccacttctcaagtccttgcactctgctggacccccgctccttgctgttactgcagctcctccagcccagccccttgccaagaaaaaaggcgtaaagcggaaagcagatactaccacccctacacctacagccatcttggctcctggttctccagctagccctcctgggagtcttgagcctaaggcagcacggcttccccctatgcgtagagagagtggtcgccccatcaagcccccacgcaaagacttgcctgactctcagcaacaacaccagagctctaagaaaggaaagctttcagaacagttaaaacattgcaatggcattttgaaggagttactctctaagaagcatgctgcctatgcttggcctttctataaaccagtggatgcttctgcacttggcctgcatgactaccatgacatcattaagcaccccatggacctcagcactgtcaagcggaagatggagaaccgtgattaccgggatgcacaggagtttgctgctgatgtacggcttatgttctccaactgctataagtacaatcccccagatcacgatgttgtggcaatggcacgaaagctacaggatgtatttgagttccgttatgccaagatgccagatgaaccactagaaccagggcctttaccagtctctactgccatgccccctggcttggccaaatcgtcttcagagtcctccagtgaggaaagtagcagtgagagctcctctgaggaagaggaggaggaagatgaggaggacgaggaggaagaagagagtgaaagctcagactcagaggaagaaagggctcatcgcttagcagaactacaggaacagcttcgggcagtacatgaacaactggctgctctgtcccagggtccaatatccaagcccaagaggaaaagagagaaaaaagagaaaaagaagaaacggaaggcagagaagcatcgaggccgagctggggccgatgaagatgacaaggggcctagggcaccccgcccacctcaacctaagaagtccaagaaagcaagtggcagtgggggtggcagtgctgctttaggcccttctggctttggaccttctggaggaagtggcaccaa

SEQ ID NO: 3758 - DNA, 1773 bp, Homo sapiens
  source 1..1773: mol_type = unassigned DNA
ggccaaatcgtcttcagagtcctccagtgaggaaagtagcagtgagagctcctctgaggaagaggaggaggaagatgaggacgaggaggaagaagagagtgaaagctcagactcagaggaagaaagggctcatcgcttagcagaactacaggaacagcttcgggcagtacatgaacaactggctgctctgtcccagggtccaatatccaagcccaagaggaaaagagagaaaaaagagaaaaagaagaaacggaaggcagagaagcatcgaggccgagctggggccgatgaagatgacaaggggcctagggcaccccgcccacctcaacctaagaagtccaagaaagcaagtggcagtgggggtggcagtgctgctttaggcccttctggctttggaccttctggaggaagtggcaccaagctccccaaaaaggccacaaagacagccccacctgccctgcctacaggttatgattcagaggaggaggaagagagcaggcccatgagttacgatgagaagcggcagctgagcctggacatcaacaaattacctggggagaagctgggccgagttgtgcatataatccaagccagggagccctctttacgtgattcaaacccagaagagattgagattgattttgaaacactcaagccatccacacttagagagcttgagcgctatgtcctttcctgcctacgtaagaaaccccggaagccctacaccattaagaagcctgtgggaaagacaaaggaggaactggctttggagaaaaagcgggaattagaaaagcggttacaagatgtcagcggacagctcaattctactaaaaagccccccaagaaagcgaatgagaaaacagagtcatcctctgcacagcaagtagcagtgtcacgccttagcgcttccagctccagctcagattccagctcctcctcttcctcgtcgtcgtcttcagacaccagtgattcagactcaggctaaggggtcaggccagatggggcaggaaggctccgcaggaccggacccctagaccaccctgccccacctgccccttccccctttgctgtgacacttcttcatctcaccccccccccgcccccctctaggagagctggctctgcagtgggggagggatgcagggacatttactgaaggagggacatggacaaaacaacattgaattcccagccccattggggagtgatctcttggacacagagcccccattcaaaatggggcagggcaagggtgggagtgtgcaaagccctgatctggagttacctgaggccatagctgccctattcacttctaagggccctgttttgagattgtttgttctaatttattttaagctaggtaaggctggggggagggtggggccgtggtcccctcagcctccatggggagggaagaagggggagctctttttttacgttgatttttttttttctactctgttttccctttttccttccgctccatttggggccctgggggtttcagtcatctccccatttggtcccctggactgtctttgttgattctaacttgtaaataaagaaaatattattcaagttttgagttaccttaatatttgcttttgtagtgtttcaaaaggaacatcataagaattgtcttgataattttgagggaaatattactgcagtgagaaaaggcaatagctaacctataattggattgtcttaatttttaaaccagtaggcttttgctgtgtttttaataaagtaaatatgacttttgtaaattga

SEQ ID NO: 3759 - DNA, 2115 bp, Homo sapiens
  source 1..2115: mol_type = unassigned DNA
cccaaagagactgctttcgtgccggccaggcagggggtttgtcgcctggaggcccaagaggaacggcctccccccaacttagcgggttatgctggaccgggcggtgaggggaaccgaggccacccggactttccgcggctgagggcagcgccggttccttgcggtcaagatgctgcaaaacgtgactccccacaataagctccctggggaagggaatgcagggttgctggggctgggcccagaagcagcagcaccagggaagaggattcgaaaaccctctctcttgtatgagggctttgagagccccacaatggcttcggtgcctgctttgcaacttacccctgccaacccaccacccccggaggtgtccaatcccaaaaagccaggacgagttaccaaccagctgcaatacctacacaaggtagtgatgaaggctctgtggaaacatcagttcgcatggccattccggcagcctgtggatgctgtcaaactgggtctaccggattatcacaaaattataaaacagcctatggacatgggtactattaagaggagacttgaaaacaattattattgggctgcttcagagtgtatgcaagattttaataccatgttcaccaactgttacatttacaacaagcccactgatgatattgtcctaatggcacaaacgctggaaaagatattcctacagaaggttgcatcaatgccacaagaagaacaagagctggtagtgaccatccctaagaacagccacaagaagggggccaagttggcagcgctccagggcagtgttaccagtgcccatcaggtgcctgccgtctcttctgtgtcacacacagccctctatactcctccacctgagatacctaccactgtcctcaacattccccacccatcagtcatttcctctccacttctcaagtccttgcactctgctggacccccgctccttgctgttactgcagctcctccagcccagccccttgccaagaaaaaaggcgtaaagcggaaagcagatactaccacccctacacctacagccatcttggctcctggttctccagctagccctcctgggagtcttgagcctaaggcagcacggcttccccctatgcgtagagagagtggtcgccccatcaagcccccacgcaaagacttgcctgactctcagcaacaacaccagagctctaagaaaggaaagctttcagaacagttaaaacattgcaatggcattttgaaggagttactctctaagaagcatgctgcctatgcttggcctttctataaaccagtggatgcttctgcacttggcctgcatgactaccatgacatcattaagcaccccatggacctcagcactgtcaagcggaagatggagaaccgtgattaccgggatgcacaggagtttgctgctgatgtacggcttatgttctccaactgctataagtacaatcccccagatcacgatgttgtggcaatggcacgaaagctacaggatgtatttgagttccgttatgccaagatgccagatgaaccactagaaccagggcctttaccagtctctactgccatgccccctggcttggccaaatcgtcttcagagtcctccagtgaggaaagtagcagtgagagctcctctgaggaagaggaggaggaagatgaggaggacgaggaggaagaagagagtgaaagctcagactcagaggaagaaagggctcatcgcttagcagaactacaggaacagcttcgggcagtacatgaacaactggctgctctgtcccagggtccaatatccaagcccaagaggaaaagagagaaaaaagagaaaaagaagaaacggaaggcagagaagcatcgaggccgagctggggccgatgaagatgacaaggggcctagggcaccccgcccacctcaacctaagaagtccaagaaagcaagtggcagtgggggtggcagtgctgctttaggcccttctggctttggaccttctggaggaagtggcaccaaactccaggctggagtgcagtggcgtgatctcggcttactgcaacctccacttctcgggttcaagcgattctcctgcctcagcctcccaagtagccaggattacag

SEQ ID NO: 3760 - DNA, 3210 bp, Homo sapiens
  source 1..3210: mol_type = unassigned DNA
ggaacggtggtggcggctcggctactgctcgtggaggggaatacaggctccctggggaagggaatgcagggttgctggggctgggcccagaagcagcagcaccagggaaaaggattcgaaaaccctctctcttgtatgagggctttgagagccccacaatggcttcggtgcctgctttgcaacttacccctgccaacccaccacccccggaggtgtccaatcccaaaaagccaggacgagttaccaaccagctgcaatacctacacaaggtagtgatgaaggctctgtggaaacatcagttcgcatggccattccggcagcctgtggatgctgtcaaactgggtctaccggattatcacaaaattataaaacagcctatggacatgggtactattaagaggagacttgaaaacaattattattgggctgcttcagagtgtatgcaagattttaataccatgttcaccaactgttacatttacaacaagcccactgatgatattgtcctaatggcacaaacgctggaaaagatattcctacagaaggttgcatcaatgccacaagaagaacaagagctggtagtgaccatccctaagaacagccacaagaagggggccaagttggcagcgctccagggcagtgttaccagtgcccatcaggtgcctgccgtctcttctgtgtcacacacagccctgtatactcctccacctgagatacctaccactgtcttcaacattccccacccatcagtcatttcctctccacttctcaagtccttgcactctgctggacccccgctccttgctgttactgcagctcctccagcccagccccttgccaagaaaaaaggcgtaaagcggaaagcagatactaccacccctacacctacagccatcttggctcctggttctccagctagccctcctgggagtcttgagcctaaggcagcacggcttccccctatgcgtagagagagtggtcgccccatcaagcccccacgcaaagacttgcctgactctcagcaacaacaccagagctctaagaaaggaaagctttcagaacagttaaaacattgcaatggcattttgaaggagttactctctaagaagcatgctgcctatgcttggcctttctataaaccagtggatgcttctgcacttggcctgcatgactaccatgacatcattaagcaccccatggacctcagcactgtcaagcggaagatggagaaccgtgattaccgggatgcacaggagtttgctgctgatgtacggcttatgttctccaactgctataagtacaatcccccagatcacgatgttgtggcaatggcacgaaagctacaggatgtatttgagttccgttatgccaagatgccagatgaaccactagaaccagggcctttaccagtctctactgccatgccccctggcttggccaaatcgtcttcagagtcctccagtgaggaaagtagcagtgagagctcctctgaggaagaggaggaggaagatgaggaggacgaggaggaagaagagagtgaaagctcagactcagaggaagaaagggctcatcgcttagcagaactacaggaacagcttcgggcagtacatgaacaactggctgctctgtcccagggtccaatatccaagcccaagaggaaaagagagaaaaaagagaaaaagaagaaacggaaggcagagaagcatcgaggccgagctggggccgatgaagatgacaaggggcctagggcaccccgcccacctcaacctaagaagtccaagaaagcaagtggcagtgggggtggcagtgctgctttaggcccttccggctttggaccttctggaggaagtggcaccaagctccccaaaaaggccacaaagacagccccacctgccctgcctacaggttatgattcagaggaggaggaagagagcaggcccatgagttacgatgagaagcggcagctgagcctggacatcaacaaattacctggggagaagctgggccgagttgtgcatataatccaagccagggagccctctttacgtgattcaaacccagaagagattgagattgattttgaaacactcaagccatccacacttagagagcttgagcgctatgtcctttcctgcctacgtaagaaaccccggaagccctacaccattaagaagcctgtgggaaagacaaaggaggaactggctttggagaaaaagcgggaattagaaaagcggttacaagatgtcagcggacagctcaattctactaaaaagccccccaagaaagcgaatgagaaaacagagtcatcctctgcacagcaagtagcagtgtcacgccttagcgcttccagctccagctcagattccagctcctcctcttcctcgtcgtcgtcttcagacaccagtgattcagactcaggctaaggggtcaggccagatggggcaggaaggctccgcaggaccggacccctagaccaccctgccccacctgccccttccccctttgctgtgacacttcttcatctcacccccccctgcccccctctaggagagctggctctgcagtgggggagggatgcagggacatttactgaaggagggacatggacaaaacaacattgaattcccagccccattggggagtgatctcttggacacagagcccccattcaaaatggggcagggcaagggtgggagtgtgcaaagccctgatctggagttacctgaggccatagctgccctattcacttctaagggccctgttttgagattgtttgttctaatttattttaagctaggtaaggctggggggagggtggggccgtggtcccctcagcctccatggggagggaagaagggggagctctttttttacgttgatttttttttttctactctgttttccctttttccttccgctccatttggggccctgggggtttcagtcatctccccatttggtcccctggactgtctttgttgattctaacttgtaaataaagaaaatattattcaagttttgagttaccttaatatttgcttttgtagtgtttcaaaaggaacatcataagaattgtcttgataattttgagggaaatattactgcagtgagaaaaggcaatagctaacctataattggattgtcttaatttttaaaccagtaggcttttgctgtgtttttaataaagtaaatatgacttttgtaaattga

SEQ ID NO: 3761 - DNA, 887 bp, Homo sapiens
  source 1..887: mol_type = unassigned DNA
ttcgtcccctgggggtacagcagccgggagccaggctccctggggaagggaatgcagggttgctggggctgggcccagaagcagcagcaccagggaaaaggattcgaaaaccctctctcttgtatgagggctttgagagccccacaatggcttcggtgcctgctttgcaacttacccctgccaacccaccacccccggaggtgtccaatcccaaaaagccaggacgagttaccaaccagctgcaatacctacacaaggtagtgatgaaggctctgtggaaacatcagttcgcatggccattccggcagcctgtggatgctgtcaaactgggtctaccggattatcacaaaattataaaacagcctatggacatgggtactattaagaggagacttgaaaacaattattattgggctgcttcagagtgtatgcaagattttaataccatgttcaccaactgttacatttacaacaagcccactgatgatattgtcctaatggcacaaacgctggaaaagatattcctacagaaggttgcatcaatgccacaagaagaacaagagctggtagtgaccatccctaagaacagccacaagaagggggccaagttggcagcgctccagggcagtgttaccagtgcccatcaggtgcctgccgtctcttctgtgtcacacacagccctgtatactcctccacctgagatacctaccactgtcttcaacattccccacccatcagtcatttcctctccacttctcaagtccttgcactctgctggacccccgctccttgctgttactgcagctcctccagcccagccccttgccaagaaaaaaggcgtaaagcggaaagcagatactaccacccctacacctacagccatcttg

SEQ ID NO: 3762 - DNA, 3210 bp, Homo sapiens
  source 1..3210: mol_type = unassigned DNA
ggaacggtggtggcggctcggctactgctcgtggaggggaatacaggctccctggggaagggaatgcagggttgctggggctgggcccagaagcagcagcaccagggaagaggattcgaaaaccctctctcttgtatgagggctttgagagccccacaatggcttcggtgcctgctttgcaacttacccctgccaacccaccacccccggaggtgtccaatcccaaaaagccaggacgagttaccaaccagctgcaatacctacacaaggtagtgatgaaggctctgtggaaacatcagttcgcatggccattccggcagcctgtggatgctgtcaaactgggtctaccggattatcacaaaattataaaacagcctatggacatgggtactattaagaggagacttgaaaacaattattattgggctgcttcagagtgtatgcaagattttaataccatgttcaccaactgttacatttacaacaagcccactgatgatattgtcctaatggcacaaacgctggaaaagatattcctacagaaggttgcatcaatgccacaagaagaacaagagctggtagtgaccatccctaagaacagccacaagaagggggccaagttggcagcgctccagggcagtgttaccagtgcccatcaggtgcctgccgtctcttctgtgtcacacacagccctctatactcctccacctgagatacctaccactgtcctcaacattccccacccatcagtcatttcctctccacttctcaagtccttgcactctgctggacccccgctccttgctgttactgcagctcctccagcccagccccttgccaagaaaaaaggcgtaaagcggaaagcagatactaccacccctacacctacagccatcttggctcctggttctccagctagccctcctgggagtcttgagcctaaggcagcacggcttccccctatgcgtagagagagtggtcgccccatcaagcccccacgcaaagacttgcctgactctcagcaacaacaccagagctctaagaaaggaaagctttcagaacagttaaaacattgcaatggcattttgaaggagttactctctaagaagcatgctgcctatgcttggcctttctataaaccagtggatgcttctgcacttggcctgcatgactaccatgacatcattaagcaccccatggacctcagcactgtcaagcggaagatggagaaccgtgattaccgggatgcacaggagtttgctgctgatgtacggcttatgttctccaactgctataagtacaatcccccagatcacgatgttgtggcaatggcacgaaagctacaggatgtatttgagttccgttatgccaagatgccagatgaaccactagaaccagggcctttaccagtctctactgccatgccccctggcttggccaaatcgtcttcagagtcctccagtgaggaaagtagcagtgagagctcctctgaggaagaggaggaggaagatgaggaggacgaggaggaagaagagagtgaaagctcagactcagaggaagaaagggctcatcgcttagcagaactacaggaacagcttcgggcagtacatgaacaactggctgctctgtcccagggtccaatatccaagcccaagaggaaaagagagaaaaaagagaaaaagaagaaacggaaggcagagaagcatcgaggccgagctggggccgatgaagatgacaaggggcctagggcaccccgcccacctcaacctaagaagtccaagaaagcaagtggcagtgggggtggcagtgctgctttaggcccttctggctttggaccttctggaggaagtggcaccaagctccccaaaaaggccacaaagacagccccacctgccctgcctacaggttatgattcagaggaggaggaagagagcaggcccatgagttacgatgagaagcggcagctgagcctggacatcaacaaattacctggggagaagctgggccgagttgtgcatataatccaagccagggagccctctttacgtgattcaaacccagaagagattgagattgattttgaaacactcaagccatccacacttagagagcttgagcgctatgtcctttcctgcctacgtaagaaaccccggaagccctacaccattaagaagcctgtgggaaagacaaaggaggaactggctttggagaaaaagcgggaattagaaaagcggttacaagatgtcagcggacagctcaattctactaaaaagccccccaagaaagcgaatgagaaaacagagtcatcctctgcacagcaagtagcagtgtcacgccttagcgcttccagctctagctcagattccagctcctcctcttcctcgtcgtcgtcttcagacaccagtgattcagactcaggctaaggggtcaggccagatggggcaggaaggctccgcaggaccggacccctagaccaccctgccccacctgccccttccccctttgctgtgacacttcttcatctcacccccccctgcccccctctaggagagctggctctgcagtgggggagggatgcagggacatttactgaaggagggacatggacaaaacaacattgaattcccagccccattggggagtgatctcttggacacagagcccccattcaaaatggggcagggcaagggtgggagtgtgcaaagccctgatctggagttacctgaggccatagctgccctattcacttctaagggccctgttttgagattgtttgttctaatttattttaagctaggtaaggctggggggagggtggggccgtggtcccctcagcctccatggggagggaagaagggggagctctttttttacgttgatttttttttttctactctgttttccctttttccttccgctccatttggggccctgggggtttcagtcatctccccatttggtcccctggactgtctttgttgattctaacttgtaaataaagaaaatattattcaagttttgagttaccttaatatttgcttttgtagtgtttcaaaaggaacatcataagaattgtcttgataattttgagggaaatattactgcagtgagaaaaggcaatagctaacctataattggattgtcttaatttttaaaccagtaggcttttgctgtgtttttaataaagtaaatatgacttttgtaaattga

SEQ ID NO: 3763 - DNA, 4894 bp, Homo sapiens
  source 1..4894: mol_type = unassigned DNA
ggaccgcgggataggaagctggggatatggacaagcagcagcgttatagcgctctgggtttcgggacataggcctgggccatgcggcccccttggccccttggcgcgacccccaggaacgttcggaaagctggtcctcgtggctgggggaaaggcggggggtgggggggaagcgggcacgtgaccccggtcagccaatctgggtgctgctgacgtggccgcgcggccccgatgctctccccacccccccagcccgttcgggaagggaggggctgggggctacgccccctcccccagcacggcttcgttttctgggggggggttgacaccccggattacataccccgtaccaagccgagggcaactttggaggccccctggaaggctttaggatccagattcttcgctgctgctgccttaccgccgagaaccaccacccgccaggcgtcttgcggccacacccctggcgggttcaggcaggctacgcccacgcgacccctcccgtttccctgctttggccaatggaggagctacgaatggcacgacctgctcgagcttggcagtctccagttgggctgtgcatggaagcttgggaagactttgttggaaggggaggcggggagagagtgctggaggctctggggcgatggcttccgcacctcttccaaccaccctctttccctggagtcggcggaccacagctcagccaattggcttggagatgtggcgggttgccacttccctgtgggtctctgcggcactcttctgcctggtgactgacaccttggaaatgaagtttatgacgtcatcgttgcggctggccaatagaaaaagctcccgcggagaggtgttccttccccttcgactcagcttcttcacccgcgtgagcgagcgcgcgcgcgcggagggggtggggaaaatctcaagcagggtggcgcgcatgagcggcgaagctcctcctccccgcctatatataaagggctggcgcggggctcggcggcgccatttcgtgctggagtggagcagcctctagaacgagctggaggattctgcctaccgatacagagccttcgagtcgtccggggccgccattacaatccacctccatccgcttggaaatggccttcgtcccggcctatgactggtcccagcgggcagtacagaccccctagaagcccctggagctcccctttttcgggccccgcccaatcctcggagtctgtccaccccctctactccgccctcaagaggatttcaaagatggaggcggcggctccctaaaccacttttcgtgttcatccgcctccatccgagatcgaaacgggacctcgtcggccccgtaggggcccgacaagaagagggaatccctgcagaccaacagcgggctatattgacgacggtgtctgagatcggggaccgtcttttgaagagtcagtccctccttagttgcccgcctcagctgaggccgccgccattttcttgctgtccgccgtctgcagagcgcgccaagctgcccggagctctccgagaggccccaaagagactgctttcgtgccggccaggcagggggtttgtcgcctggaggcccaagaggaacggcctccccccaacttagcgggttatgctggaccgggcggtgaggggaaccgaggccacccggactttccgcggctgagggcagcgccggttccttgcggtcaagatgctgcaaaacgtgactccccacaataagctccctggggaagggaatgcagggttgctggggctgggcccagaagcagcagcaccagggaagaggattcgaaaaccctctctcttgtatgagggctttgagagccccacaatggcttcggtgcctgctttgcaacttacccctgccaacccaccacccccggaggtgtccaatcccaaaaagccaggacgagttaccaaccagctgcaatacctacacaaggtagtgatgaaggctctgtggaaacatcagttcgcatggccattccggcagcctgtggatgctgtcaaactgggtctaccggattatcacaaaattataaaacagcctatggacatgggtactattaagaggagacttgaaaacaattattattgggctgcttcagagtgtatgcaagattttaataccatgttcaccaactgttacatttacaacaagcccactgatgatattgtcctaatggcacaaacgctggaaaagatattcctacagaaggttgcatcaatgccacaagaagaacaagagctggtagtgaccatccctaagaacagccacaagaagggggccaagttggcagcgctccagggcagtgttaccagtgcccatcaggtgcctgccgtctcttctgtgtcacacacagccctctatactcctccacctgagatacctaccactgtcctcaacattccccacccatcagtcatttcctctccacttctcaagtccttgcactctgctggacccccgctccttgctgttactgcagctcctccagcccagccccttgccaagaaaaaaggcgtaaagcggaaagcagatactaccacccctacacctacagccatcttggctcctggttctccagctagccctcctgggagtcttgagcctaaggcagcacggcttccccctatgcgtagagagagtggtcgccccatcaagcccccacgcaaagacttgcctgactctcagcaacaacaccagagctctaagaaaggaaagctttcagaacagttaaaacattgcaatggcattttgaaggagttactctctaagaagcatgctgcctatgcttggcctttctataaaccagtggatgcttctgcacttggcctgcatgactaccatgacatcattaagcaccccatggacctcagcactgtcaagcggaagatggagaaccgtgattaccgggatgcacaggagtttgctgctgatgtacggcttatgttctccaactgctataagtacaatcccccagatcacgatgttgtggcaatggcacgaaagctacaggatgtatttgagttccgttatgccaagatgccagatgaaccactagaaccagggcctttaccagtctctactgccatgccccctggcttggccaaatcgtcttcagagtcctccagtgaggaaagtagcagtgagagctcctctgaggaagaggaggaggaagatgaggaggacgaggaggaagaagagagtgaaagctcagactcagaggaagaaagggctcatcgcttagcagaactacaggaacagcttcgggcagtacatgaacaactggctgctctgtcccagggtccaatatccaagcccaagaggaaaagagagaaaaaagagaaaaagaagaaacggaaggcagagaagcatcgaggccgagctggggccgatgaagatgacaaggggcctagggcaccccgcccacctcaacctaagaagtccaagaaagcaagtggcagtgggggtggcagtgctgctttaggcccttctggctttggaccttctggaggaagtggcaccaagctccccaaaaaggccacaaagacagccccacctgccctgcctacaggttatgattcagaggaggaggaagagagcaggcccatgagttacgatgagaagcggcagctgagcctggacatcaacaaattacctggggagaagctgggccgagttgtgcatataatccaagccagggagccctctttacgtgattcaaacccagaagagattgagattgattttgaaacactcaagccatccacacttagagagcttgagcgctatgtcctttcctgcctacgtaagaaaccccggaagccctacaccattaagaagcctgtgggaaagacaaaggaggaactggctttggagaaaaagcgggaattagaaaagcggttacaagatgtcagcggacagctcaattctactaaaaagccccccaagaaagcgaatgagaaaacagagtcatcctctgcacagcaagtagcagtgtcacgccttagcgcttccagctctagctcagattccagctcctcctcttcctcgtcgtcgtcttcagacaccagtgattcagactcaggctaaggggtcaggccagatggggcaggaaggctccgcaggaccggacccctagaccaccctgccccacctgccccttccccctttgctgtgacacttcttcatctcacccccccctgcccccctctaggagagctggctctgcagtgggggagggatgcagggacatttactgaaggagggacatggacaaaacaacattgaattcccagccccattggggagtgatctcttggacacagagcccccattcaaaatggggcagggcaagggtgggagtgtgcaaagccctgatctggagttacctgaggccatagctgccctattcacttctaagggccctgttttgagattgtttgttctaatttattttaagctaggtaaggctggggggagggtggggccgtggtcccctcagcctccatggggagggaagaagggggagctctttttttacgttgatttttttttttctactctgttttccctttttccttccgctccatttggggccctgggggtttcagtcatctccccatttggtcccctggactgtctttgttgattctaacttgtaaataaagaaaatattattcaagttttgagttaccttaatatttgcttttgtagtgtttcaaaaggaacatcataagaattgtcttgataattttgagggaaatattactgcagtgagaaaaggcaatagctaacctataattggattgtcttaatttttaaaccagtaggcttttgctgtgtttttaataaagtaaatatgacttttgtaaattga

SEQ ID NO: 3764 - DNA, 3210 bp, Homo sapiens
  source 1..3210: mol_type = unassigned DNA
ggaacggtggtggcggctcggctactgctcgtggaggggaatacaggctccctggggaagggaatgcagggttgctggggctgggcccagaagcagcagcaccagggaaaaggattcgaaaaccctctctcttgtatgagggctttgagagccccacaatggcttcggtgcctgctttgcaacttacccctgccaacccaccacccccggaggtgtccaatcccaaaaagccaggacgagttaccaaccagctgcaatacctacacaaggtagtgatgaaggctctgtggaaacatcagttcgcatggccattccggcagcctgtggatgctgtcaaactgggtctaccggattatcacaaaattataaaacagcctatggacatgggtactattaagaggagacttgaaaacaattattattgggctgcttcagagtgtatgcaagattttaataccatgttcaccaactgttacatttacaacaagcccactgatgatattgtcctaatggcacaaacgctggaaaagatattcctacagaaggttgcatcaatgccacaagaagaacaagagctggtagtgaccatccctaagaacagccacaagaagggggccaagttggcagcgctccagggcagtgttaccagtgcccatcaggtgcctgccgtctcttctgtgtcacacacagccctgtatactcctccacctgagatacctaccactgtcctcaacattccccacccatcagtcatttcctctccacttctcaagtccttgcactctgctggacccccgctccttgctgttactgcagctcctccagcccagccccttgccaagaaaaaaggcgtaaagcggaaagcagatactaccacccctacacctacagccatcttggctcctggttctccagctagccctcctgggagtcttgagcctaaggcagcacggcttccccctatgcgtagagagagtggtcgccccatcaagcccccacgcaaagacttgcctgactctcagcaacaacaccagagctctaagaaaggaaagctttcagaacagttaaaacattgcaatggcattttgaaggagttactctctaagaagcatgctgcctatgcttggcctttctataaaccagtggatgcttctgcacttggcctgcatgactaccatgacatcattaagcaccccatggacctcagcactgtcaagcggaagatggagaaccgtgattaccgggatgcacaggagtttgctgctgatgtacggcttatgttctccaactgctataagtacaatcccccagatcacgatgttgtggcaatggcacgaaagctacaggatgtatttgagttccgttatgccaagatgccagatgaaccactagaaccagggcctttaccagtctctactgccatgccccctggcttggccaaatcgtcttcagagtcctccagtgaggaaagtagcagtgagagctcctctgaggaagaggaggaggaagatgaggaggacgaggaggaagaagagagtgaaagctcagactcagaggaagaaagggctcatcgcttagcagaactacaggaacagcttcgggcagtacatgaacaactggctgctctgtcccagggtccaatatccaagcccaagaggaaaagagagaaaaaagagaaaaagaagaaacggaaggcagagaagcatcgaggccgagctggggccgatgaagatgacaaggggcctagggcaccccgcccacctcaacctaagaagtccaagaaagcaagtggcagtgggggtggcagtgctgctttaggcccttctggctttggaccttctggaggaagtggcaccaagctccccaaaaaggccacaaagacagccccacctgccctgcctacaggttatgattcagaggaggaggaagagagcaggcccatgagttacgatgagaagcggcagctgagcctggacatcaacaaattacctggggagaagctgggccgagttgtgcatataatccaagccagggagccctctttacgtgattcaaacccagaagagattgagattgattttgaaacactcaagccatccacacttagagagcttgagcgctatgtcctttcctgcctacgtaagaaaccccggaagccctacaccattaagaagcctgtgggaaagacaaaggaggaactggctttggagaaaaagcgggaattagaaaagcggttacaagatgtcagcggacagctcaattctactaaaaagccccccaagaaagcgaatgagaaaacagagtcatcctctgcacagcaagtagcagtgtcacgccttagcgcttccagctccagctcagattccagctcctcctcttcctcgtcgtcgtcttcagacaccagtgattcagactcaggctaaggggtcaggccagatggggcaggaaggctccgcaggaccggacccctagaccaccctgccccacctgccccttccccctttgctgtgacacttcttcatctcacccccccctgcccccctctaggagagctggctctgcagtgggggagggatgcagggacatttactgaaggagggacatggacaaaacaacattgaattcccagccccattggggagtgatctcttggacacagagcccccattcaaaatggggcagggcaagggtgggagtgtgcaaagccctgatctggagttacctgaggccatagctgccctattcacttctaagggccctgttttgagattgtttgttctaatttattttaagctaggtaaggctggggggagggtggggccgtggtcccctcagcctccatggggagggaagaagggggagctctttttttacgttgatttttttttttctactctgttttccctttttccttccgctccatttggggccctgggggtttcagtcatctccccatttggtcccctggactgtctttgttgattctaacttgtaaataaagaaaatattattcaagttttgagttaccttaatatttgcttttgtagtgtttcaaaaggaacatcataagaattgtcttgataattttgagggaaatattactgcagtgagaaaaggcaatagctaacctataattggattgtcttaatttttaaaccagtaggcttttgctgtgtttttaataaagtaaatatgacttttgtaaattga

SEQ ID NO: 3765 - DNA, 1878 bp, Homo sapiens
  source 1..1878: mol_type = unassigned DNA
ggccaaatcgtcttcagagtcctccagtgaggaaagtagcagtgagagctcctctgaggaagaggaggaggaagatgaggacgaggaggaagaagagagtgaaagctcagactcagaggaagaaagggctcatcgcttagcagaactacaggaacagcttcgggcagtacatgaacaactggctgctctgtcccagggtccaatatccaagcccaagaggaaaagagagaaaaaagagaaaaagaagaaacggaaggcagagaagcatcgaggccgagctggggccgatgaagatgacaaggggcctagggcaccccgcccacctcaacctaagaagtccaagaaagcaagtggcagtgggggtggcagtgctgctttaggcccttctggctttggaccttctggaggaagtggcaccaaactccaggctggagtgcagtggcgtgatctcggcttactgcaacctccacttctcgggttcaagcgattctcctgcctcagcctcccaagtagccaggattacaggctccccaaaaaggccacaaagacagccccacctgccctgcctacaggttatgattcagaggaggaggaagagagcaggcccatgagttacgatgagaagcggcagctgagcctggacatcaacaaattacctggggagaagctgggccgagttgtgcatataatccaagccagggagccctctttacgtgattcaaacccagaagagattgagattgattttgaaacactcaagccatccacacttagagagcttgagcgctatgtcctttcctgcctacgtaagaaaccccggaagccctacaccattaagaagcctgtgggaaagacaaaggaggaactggctttggagaaaaagcgggaattagaaaagcggttacaagatgtcagcggacagctcaattctactaaaaagccccccaagaaagcgaatgagaaaacagagtcatcctctgcacagcaagtagcagtgtcacgccttagcgcttccagctccagctcagattccagctcctcctcttcctcgtcgtcgtcttcagacaccagtgattcagactcaggctaaggggtcaggccagatggggcaggaaggctccgcaggaccggacccctagaccaccctgccccacctgccccttccccctttgctgtgacacttcttcatctcaccccccccccgcccccctctaggagagctggctctgcagtgggggagggatgcagggacatttactgaaggagggacatggacaaaacaacattgaattcccagccccattggggagtgatctcttggacacagagcccccattcaaaatggggcagggcaagggtgggagtgtgcaaagccctgatctggagttacctgaggccatagctgccctattcacttctaagggccctgttttgagattgtttgttctaatttattttaagctaggtaaggctggggggagggtggggccgtggtcccctcagcctccatggggagggaagaagggggagctctttttttacgttgatttttttttttctactctgttttccctttttccttccgctccatttggggccctgggggtttcagtcatctccccatttggtcccctggactgtctttgttgattctaacttgtaaataaagaaaatattattcaagttttgagttaccttaatatttgcttttgtagtgtttcaaaaggaacatcataagaattgtcttgataattttgagggaaatattactgcagtgagaaaaggcaatagctaacctataattggattgtcttaatttttaaaccagtaggcttttgctgtgtttttaataaagtaaatatgacttttgtaaattga

SEQ ID NO: 3766 - DNA, 3467 bp, Homo sapiens
  source 1..3467: mol_type = unassigned DNA
cccaaagagactgctttcgtgccggccaggcagggggtttgtcgcctggaggcccaagaggaacggcctccccccaacttagcgggttatgctggaccgggcggtgaggggaaccgaggccacccggactttccgcggctgagggcagcgccggttccttgcggtcaagatgctgcaaaacgtgactccccacaataagctccctggggaagggaatgcagggttgctggggctgggcccagaagcagcagcaccagggaagaggattcgaaaaccctctctcttgtatgagggctttgagagccccacaatggcttcggtgcctgctttgcaacttacccctgccaacccaccacccccggaggtgtccaatcccaaaaagccaggacgagttaccaaccagctgcaatacctacacaaggtagtgatgaaggctctgtggaaacatcagttcgcatggccattccggcagcctgtggatgctgtcaaactgggtctaccggattatcacaaaattataaaacagcctatggacatgggtactattaagaggagacttgaaaacaattattattgggctgcttcagagtgtatgcaagattttaataccatgttcaccaactgttacatttacaacaagcccactgatgatattgtcctaatggcacaaacgctggaaaagatattcctacagaaggttgcatcaatgccacaagaagaacaagagctggtagtgaccatccctaagaacagccacaagaagggggccaagttggcagcgctccagggcagtgttaccagtgcccatcaggtgcctgccgtctcttctgtgtcacacacagccctctatactcctccacctgagatacctaccactgtcctcaacattccccacccatcagtcatttcctctccacttctcaagtccttgcactctgctggacccccgctccttgctgttactgcagctcctccagcccagccccttgccaagaaaaaaggcgtaaagcggaaagcagatactaccacccctacacctacagccatcttggctcctggttctccagctagccctcctgggagtcttgagcctaaggcagcacggcttccccctatgcgtagagagagtggtcgccccatcaagcccccacgcaaagacttgcctgactctcagcaacaacaccagagctctaagaaaggaaagctttcagaacagttaaaacattgcaatggcattttgaaggagttactctctaagaagcatgctgcctatgcttggcctttctataaaccagtggatgcttctgcacttggcctgcatgactaccatgacatcattaagcaccccatggacctcagcactgtcaagcggaagatggagaaccgtgattaccgggatgcacaggagtttgctgctgatgtacggcttatgttctccaactgctataagtacaatcccccagatcacgatgttgtggcaatggcacgaaagctacaggatgtatttgagttccgttatgccaagatgccagatgaaccactagaaccagggcctttaccagtctctactgccatgccccctggcttggccaaatcgtcttcagagtcctccagtgaggaaagtagcagtgagagctcctctgaggaagaggaggaggaagatgaggaggacgaggaggaagaagagagtgaaagctcagactcagaggaagaaagggctcatcgcttagcagaactacaggaacagcttcgggcagtacatgaacaactggctgctctgtcccagggtccaatatccaagcccaagaggaaaagagagaaaaaagagaaaaagaagaaacggaaggcagagaagcatcgaggccgagctggggccgatgaagatgacaaggggcctagggcaccccgcccacctcaacctaagaagtccaagaaagcaagtggcagtgggggtggcagtgctgctttaggcccttctggctttggaccttctggaggaagtggcaccaaactccaggctggagtgcagtggcgtgatctcggcttactgcaacctccacttctcgggttcaagcgattctcctgcctcagcctcccaagtagccaggattacaggctccccaaaaaggccacaaagacagccccacctgccctgcctacaggttatgattcagaggaggaggaagagagcaggcccatgagttacgatgagaagcggcagctgagcctggacatcaacaaattacctggggagaagctgggccgagttgtgcatataatccaagccagggagccctctttacgtgattcaaacccagaagagattgagattgattttgaaacactcaagccatccacacttagagagcttgagcgctatgtcctttcctgcctacgtaagaaaccccggaagccctacaccattaagaagcctgtgggaaagacaaaggaggaactggctttggagaaaaagcgggaattagaaaagcggttacaagatgtcagcggacagctcaattctactaaaaagccccccaagaaagcgaatgagaaaacagagtcatcctctgcacagcaagtagcagtgtcacgccttagcgcttccagctctagctcagattccagctcctcctcttcctcgtcgtcgtcttcagacaccagtgattcagactcaggctaaggggtcaggccagatggggcaggaaggctccgcaggaccggacccctagaccaccctgccccacctgccccttccccctttgctgtgacacttcttcatctcacccccccctgcccccctctaggagagctggctctgcagtgggggagggatgcagggacatttactgaaggagggacatggacaaaacaacattgaattcccagccccattggggagtgatctcttggacacagagcccccattcaaaatggggcagggcaagggtgggagtgtgcaaagccctgatctggagttacctgaggccatagctgccctattcacttctaagggccctgttttgagattgtttgttctaatttattttaagctaggtaaggctggggggagggtggggccgtggtcccctcagcctccatggggagggaagaagggggagctctttttttacgttgatttttttttttctactctgttttccctttttccttccgctccatttggggccctgggggtttcagtcatctccccatttggtcccctggactgtctttgttgattctaacttgtaaataaagaaaatattattcaagttttgagttaccttaatatttgcttttgtagtgtttcaaaaggaacatcataagaattgtcttgataattttgagggaaatattactgcagtgagaaaaggcaatagctaacctataattggattgtcttaatttttaaaccagtaggcttttgctgtgtttttaataaagtaaatatgacttttgtaaattga

SEQ ID NO: 3767 - DNA, 4637 bp, Homo sapiens
  source 1..4637: mol_type = unassigned DNA
accgatggaccagccgctccgtggggaggactccggaccctggtgggggggcgggggggttctttcgcccccgtggcggagggcccctgagaggcggatacgggtgtgcctttgggggtgatgtggcgtgtggggggaaaggtccgagctcgcctggagggggagggtttttcccttaagtcatccctcccaggacttgctttttctgctctgagccggacgccggaatggagtttgaggaagagattcttcgctgctgctgccttaccgccgagaaccaccacccgccaggcgtcttgcggccacacccctggcgggttcaggcaggctacgcccacgcgacccctcccgtttccctgctttggccaatggaggagctacgaatggcacgacctgctcgagcttggcagtctccagttgggctgtgcatggaagcttgggaagactttgttggaaggggaggcggggagagagtgctggaggctctggggcgatggcttccgcacctcttccaaccaccctctttccctggagtcggcggaccacagctcagccaattggcttggagatgtggcgggttgccacttccctgtgggtctctgcggcactcttctgcctggtgactgacaccttggaaatgaagtttatgacgtcatcgttgcggctggccaatagaaaaagctcccgcggagaggtgttccttccccttcgactcagcttcttcacccgcgtgagcgagcgcgcgcgcgcggagggggtggggaaaagctcaagcagggtggcgcgcatgagcggcgaagctcctcctccccgcctatatataaagggctggcgcggggctcggcggcgccatttcgtgctggagtggagcagcctctagaacgagctggaggattctgcctaccgatacagagccttcgagtcgtccggggccgccattacaatccacctccatccgcttggaaatggccttcgtcccggcctatgactggtcccagcgggcagtacagaccccctagaagcccctggagctcccctttttcgggccccgcccaatcctcggagtctgtccaccccctctactccgccctcaagaggatttcaaagatggaggcggcggctccctaaaccacttttcgtgttcatccgcctccatccgagatcgaaacgggacctcgtcggccccgtaggggcccgacaagaagagggaatccctgcagaccaacagcgggctatattgacgacggtgtctgagatcggggaccgtcttttgaagagtcagtccctccttagttgcccgcctcagctgaggccgccgccattttcttgctgtccgccgtctgcagagcgcgccaagctgcccggagctctccgagaggccccaaagagactgctttcgtgccggccaggcagggggtttgtcgcctggaggcccaagaggaacggcctccccccaacttagcgggttatgctggaccgggcggtgaggggaaccgaggccacccggactttccgcggctgagggcagcgccggttccttgcggtcaagatgctgcaaaacgtgactccccacaataagctccctggggaagggaatgcagggttgctggggctgggcccagaagcagcagcaccagggaagaggattcgaaaaccctctctcttgtatgagggctttgagagccccacaatggcttcggtgcctgctttgcaacttacccctgccaacccaccacccccggaggtgtccaatcccaaaaagccaggacgagttaccaaccagctgcaatacctacacaaggtagtgatgaaggctctgtggaaacatcagttcgcatggccattccggcagcctgtggatgctgtcaaactgggtctaccgattcccacctcgggttgggagaggaccacggtggccaaaattcttagcttcttcctttccctcatgcagcccatggatagccagccccagaggattatcacaaaattataaaacagcctatggacatgggtactattaagaggagacttgaaaacaattattattgggctgcttcagagtgtatgcaagattttaataccatgttcaccaactgttacatttacaacaagcccactgatgatattgtcctaatggcacaaacgctggaaaagatattcctacagaaggttgcatcaatgccacaagaagaacaagagctggtagtgaccatccctaagaacagccacaagaagggggccaagttggcagcgctccagggcagtgttaccagtgcccatcaggtgcctgccgtctcttctgtgtcacacacagccctgtatactcctccacctgagatacctaccactgtcctcaacattccccacccatcagtcatttcctctccacttctcaagtccttgcactctgctggacccccgctccttgctgttactgcagctcctccagcccagccccttgccaagaaaaaaggcgtaaagcggaaagcagatactaccacccctacacctacagccatcttggctcctggttctccagctagccctcctgggagtcttgagcctaaggcagcacggcttccccctatgcgtagagagagtggtcgccccatcaagcccccacgcaaagacttgcctgactctcagcaacaacaccagagctctaagaaaggaaagctttcagaacagttaaaacattgcaatggcattttgaaggagttactctctaagaagcatgctgcctatgcttggcctttctataaaccagtggatgcttctgcacttggcctgcatgactaccatgacatcattaagcaccccatggacctcagcactgtcaagcggaagatggagaaccgtgattaccgggatgcacaggagtttgctgctgatgtacggcttatgttctccaactgctataagtacaatcccccagatcacgatgttgtggcaatggcacgaaagctacaggatgtatttgagttccgttatgccaagatgccagatgaaccactagaaccagggcctttaccagtctctactgccatgccccctggcttggccaaatcgtcttcagagtcctccagtgaggaaagtagcagtgagagctcctctgaggaagaggaggaggaagatgaggaggacgaggaggaagaagagagtgaaagctcagactcagaggaagaaagggctcatcgcttagcagaactacaggaacagcttcgggcagtacatgaacaactggctgctctgtcccagggtccaatatccaagcccaagaggaaaagagagaaaaaagagaaaaagaagaaacggaaggcagagaagcatcgaggccgagctggggccgatgaagatgacaaggggcctagggcaccccgcccacctcaacctaagaagtccaagaaagcaagtggcagtgggggtggcagtgctgctttaggcccttctggctttggaccttctggaggaagtggcaccaagctccccaaaaaggccacaaagacagccccacctgccctgcctacaggttatgattcagaggaggaggaagagagcaggcccatgagttacgatgagaagcggcagctgagcctggacatcaacaaattacctggggagaagctgggccgagttgtgcatataatccaagccagggagccctctttacgtgattcaaacccagaagagattgagattgattttgaaacactcaagccatccacacttagagagcttgagcgctatgtcctttcctgcctacgtaagaaaccccggaagccctacaccattaagaagcctgtgggaaagacaaaggaggaactggctttggagaaaaagcgggaattagaaaagcggttacaagatgtcagcggacagctcaattctactaaaaagccccccaagaaagcgaatgagaaaacagagtcatcctctgcacagcaagtagcagtgtcacgccttagcgcttccagctccagctcagattccagctcctcctcttcctcgtcgtcgtcttcagacaccagtgattcagactcaggctaaggggtcaggccagatggggcaggaaggctccgcaggaccggacccctagaccaccctgccccacctgccccttccccctttgctgtgacacttcttcatctcacccccccccgcccccctctaggagagctggctctgcagtgggggagggatgcagggacatttactgaaggagggacatggacaaaacaacattgaattcccagccccattggggagtgatctcttggacacagagcccccattcaaaatggggcagggcaagggtgggagtgtgcaaagccctgatctggagttacctgaggccacagctgccctattcacttctaagggccctgttttgagattgtttgttctaatttattttaagctaggtaaggctggggggagggtggggccgtggtcccctcagcctccatggggagggaagaagggggagctctttttttacgttgatttttttttttctactctgttttccctttttccttccgctccatttggggccctgggggtttcagtcatctccccatttggtcccctggactgtctttgttgattctaacttgtaaataaagaaaatattattc

SEQ ID NO: 3768 - DNA, 3210 bp, Homo sapiens; identical to SEQ ID NO: 3762
  source 1..3210: mol_type = unassigned DNA

SEQ ID NO: 3769 - DNA, 1773 bp, Homo sapiens; identical to SEQ ID NO: 3758
  source 1..1773: mol_type = unassigned DNA

SEQ ID NO: 3770 - DNA, 3467 bp, Homo sapiens; identical to SEQ ID NO: 3766
  source 1..3467: mol_type = unassigned DNA

SEQ ID NO: 3771 - DNA, 3210 bp, Homo sapiens
  source 1..3210: mol_type = unassigned DNA
ggaacggtggtggcggctcggctactgctcgtggaggggaatacaggctccctggggaagggaatgcagggttgctggggctgggcccagaagcagcagcaccagggaagaggattcgaaaaccctctctcttgtatgagggctttgagagccccacaatggcttcggtgcctgctttgcaacttacccctgccaacccaccacccccggaggtgtccaatcccaaaaagccaggacgagttaccaaccagctgcaatacctacacaaggtagtgatgaaggctctgtggaaacatcagttcgcatggccattccggcagcctgtggatgctgtcaaactgggtctaccggattatcacaaaattataaaacagcctatggacatgggtactattaagaggagacttgaaaacaattattattgggctgcttcagagtgtatgcaagattttaataccatgttcaccaactgttacatttacaacaagcccactgatgatattgtcctaatggcacaaacgctggaaaagatattcctacagaaggttgcatcaatgccacaagaagaacaagagctggtagtgaccatccctaagaacagccacaagaagggggccaagttggcagcgctccagggcagtgttaccagtgcccatcaggtgcctgccgtctcttctgtgtcacacacagccctgtatactcctccacctgagatacctaccactgtcctcaacattccccacccatcagtcatttcctctccacttctcaagtccttgcactctgctggacccccgctccttgctgttactgcagctcctccagcccagccccttgccaagaaaaaaggcgtaaagcggaaagcagatactaccacccctacacctacagccatcttggctcctggttctccagctagccctcctgggagtcttgagcctaaggcagcacggcttccccctatgcgtagagagagtggtcgccccatcaagcccccacgcaaagacttgcctgactctcagcaacaacaccagagctctaagaaaggaaagctttcagaacagttaaaacattgcaatggcattttgaaggagttactctctaagaagcatgctgcctatgcttggcctttctataaaccagtggatgcttctgcacttggcctgcatgactaccatgacatcattaagcaccccatggacctcagcactgtcaagcggaagatggagaaccgtgattaccgggatgcacaggagtttgctgctgatgtacggcttatgttctccaactgctataagtacaatcccccagatcacgatgttgtggcaatggcacgaaagctacaggatgtatttgagttccgttatgccaagatgccagatgaaccactagaaccagggcctttaccagtctctactgccatgccccctggcttggccaaatcgtcttcagagtcctccagtgaggaaagtagcagtgagagctcctctgaggaagaggaggaggaagatgaggaggacgaggaggaagaagagagtgaaagctcagactcagaggaagaaagggctcatcgcttagcagaactacaggaacagcttcgggcagtacatgaacaactggctgctctgtcccagggtccaatatccaagcccaagaggaaaagagagaaaaaagagaaaaagaagaaacggaaggcagagaagcatcgaggccgagctggggccgatgaagatgacaaggggcctagggcaccccgcccacctcaacctaagaagtccaagaaagcaagtggcagtgggggtggcagtgctgctttaggcccttctggctttggaccttctggaggaagtggcaccaagctccccaaaaaggccacaaagacagccccacctgccctgcctacaggttatgattcagaggaggaggaagagagcaggcccatgagttacgatgagaagcggcagctgagcctggacatcaacaaattacctggggagaagctgggccgagttgtgcatataatccaagccagggagccctctttacgtgattcaaacccagaagagattgagattgattttgaaacactcaagccatccacacttagagagcttgagcgctatgtcctttcctgcctacgtaagaaaccccggaagccctacaccattaagaagcctgtgggaaagacaaaggaggaactggctttggagaaaaagcgggaattagaaaagcggttacaagatgtcagcggacagctcaattctactaaaaagccccccaagaaagcgaatgagaaaacagagtcatcctctgcacagcaagtagcagtgtcacgccttagcgcttccagctccagctcagattccagctcctcctcttcctcgtcgtcgtcttcagacaccagtgattcagactcaggctaaggggtcaggccagatggggcaggaaggctccgcaggaccggacccctagaccaccctgccccacctgccccttccccctttgctgtgacacttcttcatctcacccccccccgcccccctctaggagagctggctctgcagtgggggagggatgcagggacatttactgaaggagggacatggacaaaacaacattgaattcccagccccattggggagtgatctcttggacacagagcccccattcaaaatggggcagggcaagggtgggagtgtgcaaagccctgatctggagttacctgaggccacagctgccctattcacttctaagggccctgttttgagattgtttgttctaatttattttaagctaggtaaggctggggggagggtggggccgtggtcccctcagcctccatggggagggaagaagggggagctctttttttacgttgatttttttttttctactctgttttccctttttccttccgctccatttggggccctgggggtttcagtcatctccccatttggtcccctggactgtctttgttgattctaacttgtaaataaagaaaatattattcaagttttgagttaccttaatatttgcttttgtagtgtttcaaaaggaacatcataagaattgtcttgataattttgagggaaatattactgcagtgagaaaaggcaatagctaacctataattggattgtcttaatttttaaaccagtaggcttttgctgtgtttttaataaagtaaatatgacttttgtaaattga

SEQ ID NO: 3772 - DNA, 3013 bp, Homo sapiens
  source 1..3013: mol_type = unassigned DNA
ggaacggtggtggcggctcggctactgctcgtggaggggaatacaggctccctggggaagggaatgcagggttgctggggctgggcccagaagcagcagcaccagggaagaggattcgaaaaccctctctcttgtatgagggctttgagagccccacaatggcttcggtgcctgctttgcaacttacccctgccaacccaccacccccggaggtgtccaatcccaaaaagccaggacgagttaccaaccagctgcaatacctacacaaggtagtgatgaaggctctgtggaaacatcagttcgcatggccattccggcagcctgtggatgctgtcaaactgggtctaccggattatcacaaaattataaaacagcctatggacatgggtactattaagaggagacttgaaaacaattattattgggctgcttcagagtgtatgcaagattttaataccatgttcaccaactgttacatttacaacaagcccactgatgatattgtcctaatggcacaaacgctggaaaagatattcctacagaaggttgcatcaatgccacaagaagaacaagagctggtagtgaccatccctaagaacagccacaagaagggggccaagttggcagcgctccagggcagtgttaccagtgcccatcaggtgcctgccgtctcttctgtgtcacacacagccctgtatactcctccacctgagatacctaccactgtcctcaacattccccacccatcagtcatttcctctccacttctcaagtccttgcactctgctggacccccgctccttgctgttactgcagctcctccagcccagccccttgccaagaaaaaaggcgtaaagcggaaagcagatactaccacccctacacctacagccatcttggctcctggttctccagctagccctcctgggagtcttgagcctaaggcagcacggcttccccctatgcgtagagagagtggtcgccccatcaagcccccacgcaaagacttgcctgactctcagcaacaacaccagagctctaagaaaggaaagctttcagaacagttaaaacattgcaatggcattttgaaggagttactctctaagaagcatgctgcctatgcttggcctttctataaaccagtggatgcttctgcacttggcctgcatgactaccatgacatcattaagcaccccatggacctcagcactgtcaagcggaagatggagaaccgtgattaccgggatgcacaggagtttgctgctgatgtacggcttatgttctccaactgctataagtacaatcccccagatcacgatgttgtggcaatggcacgaaagctacaggatgtatttgagttccgttatgccaagatgccagatgaaccactagaaccagggcctttaccagtctctactgccatgccccctggcttggccaaatcgtcttcagagtcctccagtgaggaaagtagcagtgagagctcctctgaggaagaggaggaggaagatgaggaggacgaggaggaagaagagagtgaaagctcagactcagaggaagaaagggctcatcgcttagcagaactacaggaacagcttcgggcagtacatgaacaactggctgctctgtcccagggtccaatatccaagcccaagaggaaaagagagaaaaaagagaaaaagaagaaacggaaggcagagaagcatcgaggccgagctggggccgatgaagatgacaaggggcctagggcaccccgcccacctcaacctaagaagtccaagaaagcaagtggcagtgggggtggcagtgctgctttaggcccttctggctttggaccttctggaggaagtggcaccaagctccccaaaaaggccacaaagacagccccacctgccctgcctacaggttatgattcagaggaggaggaagagagcaggcccatgagttacgatgagaagcggcagctgagcctggacatcaacaaattacctggggagaagctgggccgagttgtgcatataatccaagccagggagccctctttacgtgattcaaacccagaagagattgagattgattttgaaacactcaagccatccacacttagagagcttgagcgctatgtcctttcctgcctacgtaagaaaccccggaagccctacaccattaagaagcctgtgggaaagacaaaggaggaactggctttggagaaaaagcgggaattagaaaagcggttacaagatgtcagcggacagctcaattctactaaaaagccccccaagaaagcgaatgagaaaacagagtcatcctctgcacagcaagtagcagtgtcacgccttagcgcttccagctccagctcagattccagctcctcctcttcctcgtcgtcgtcttcagacaccagtgattcagactcaggctaaggggtcaggccagatggggcaggaaggctccgcaggaccggacccctagaccaccctgccccacctgccccttccccctttgctgtgacacttcttcatctcacccccccccgcccccctctaggagagctggctctgcagtgggggagggatgcagggacatttactgaaggagggacatggacaaaacaacattgaattcccagccccattggggagtgatctcttggacacagagcccccattcaaaatggggcagggcaagggtgggagtgtgcaaagccctgatctggagttacctgaggccacagctgccctattcacttctaagggccctgttttgagattgtttgttctaatttattttaagctaggtaaggctggggggagggtggggccgtggtcccctcagcctccatggggagggaagaagggggagctctttttttacgttgatttttttttttctactctgttttccctttttccttccgctccatttggggccctgggggtttcagtcatctccccatttggtcccctggactgtctttgttgattctaacttgtaaataaagaaaatattattc

SEQ ID NO: 3773 - DNA, 4807 bp, Homo sapiens
  source 1..4807: mol_type = unassigned DNA
ggagggggagggctagtctgagccgcagccgccgcctcctccgctcgccctcctccctggcgctgaccgatggaccagccgctccgtggggaggactccggaccctggtgggggggcgggggggttctttcgcccccgtggcggagggcccctgagaggcggatacgggtgtgcctttgggggtgatgtggcgtgtggggggaaaggtccgagctcgcctggagggggagggtttttcccttaagtcatccctcccaggacttgctttttctgctctgagccggacgccggaatggagtttgaggaagagattcttcgctgctgctgccttaccgccgagaaccaccacccgccaggcgtcttgcggccacacccctggcgggttcaggcaggctacgcccacgcgacccctcccgtttccctgctttggccaatggaggagctacgaatggcacgacctgctcgagcttggcagtctccagttgggctgtgcatggaagcttgggaagactttgttggaaggggaggcggggagagagtgctggaggctctggggcgatggcttccgcacctcttccaaccaccctctttccctggagtcggcggaccacagctcagccaattggcttggagatgtggcgggttgccacttccctgtgggtctctgcggcactcttctgcctggtgactgacaccttggaaatgaagtttatgacgtcatcgttgcggctggccaatagaaaaagctcccgcggagaggtgttccttccccttcgactcagcttcttcacccgcgtgagcgagcgcgcgcgcgcggagggggtggggaaaatctcaagcagggtggcgcgcatgagcggcgaagctcctcctccccgcctatatataaagggctggcgcggggctcggcggcgccatttcgtgctggagtggagcagcctctagaacgagctggaggattctgcctaccgatacagagccttcgagtcgtccggggccgccattacaatccacctccatccgcttggaaatggccttcgtcccggcctatgactggtcccagcgggcagtacagaccccctagaagcccctggagctcccctttttcgggccccgcccaatcctcggagtctgtccaccccctctactccgccctcaagaggatttcaaagatggaggcggcggctccctaaaccacttttcgtgttcatccgcctccatccgagatcgaaacgggacctcgtcggccccgtaggggcccgacaagaagagggaatccctgcagaccaacagcgggctatattgacgacggtgtctgagatcggggaccgtcttttgaagagtcagtccctccttagttgcccgcctcagctgaggccgccgccattttcttgctgtccgccgtctgcagagcgcgccaagctgcccggagctctccgagaggccccaaagagactgctttcgtgccggccaggcagggggtttgtcgcctggaggcccaagaggaacggcctccccccaacttagcgggttatgctggaccgggcggtgaggggaaccgaggccacccggactttccgcggctgagggcagcgccggttccttgcggtcaagatgctgcaaaacgtgactccccacaataagctccctggggaagggaatgcagggttgctggggctgggcccagaagcagcagcaccagggaaaaggattcgaaaaccctctctcttgtatgagggctttgagagccccacaatggcttcggtgcctgctttgcaacttacccctgccaacccaccacccccggaggtgtccaatcccaaaaagccaggacgagttaccaaccagctgcaatacctacacaaggtagtgatgaaggctctgtggaaacatcagttcgcatggccattccggcagcctgtggatgctgtcaaactgggtctaccggattatcacaaaattataaaacagcctatggacatgggtactattaagaggagacttgaaaacaattattattgggctgcttcagagtgtatgcaagattttaataccatgttcaccaactgttacatttacaacaagcccactgatgatattgtcctaatggcacaaacgctggaaaagatattcctacagaaggttgcatcaatgccacaagaagaacaagagctggtagtgaccatccctaagaacagccacaagaagggggccaagttggcagcgctccagggcagtgttaccagtgcccatcaggtgcctgccgtctcttctgtgtcacacacagccctgtatactcctccacctgagatacctaccactgtcttcaacattccccacccatcagtcatttcctctccacttctcaagtccttgcactctgctggacccccgctccttgctgttactgcagctcctccagcccagccccttgccaagaaaaaaggcgtaaagcggaaagcagatactaccacccctacacctacagccatcttggctcctggttctccagctagccctcctgggagtcttgagcctaaggcagcacggcttccccctatgcgtagagagagtggtcgccccatcaagcccccacgcaaagacttgcctgactctcagcaacaacaccagagctctaagaaaggaaagctttcagaacagttaaaacattgcaatggcattttgaaggagttactctctaagaagcatgctgcctatgcttggcctttctataaaccagtggatgcttctgcacttggcctgcatgactaccatgacatcattaagcaccccatggacctcagcactgtcaagcggaagatggagaaccgtgattaccgggatgcacaggagtttgctgctgatgtacggcttatgttctccaactgctataagtacaatcccccagatcacgatgttgtggcaatggcacgaaagctacaggatgtatttgagttccgttatgccaagatgccagatgaaccactagaaccagggcctttaccagtctctactgccatgccccctggcttggccaaatcgtcttcagagtcctccagtgaggaaagtagcagtgagagctcctctgaggaagaggaggaggaagatgaggaggacgaggaggaagaagagagtgaaagctcagactcagaggaagaaagggctcatcgcttagcagaactacaggaacagcttcgggcagtacatgaacaactggctgctctgtcccagggtccaatatccaagcccaagaggaaaagagagaaaaaagagaaaaagaagaaacggaaggcagagaagcatcgaggccgagctggggccgatgaagatgacaaggggcctagggcaccccgcccacctcaacctaagaagtccaagaaagcaagtggcagtgggggtggcagtgctgctttaggcccttccggctttggaccttctggaggaagtggcaccaagctccccaaaaaggccacaaagacagccccacctgccctgcctacaggttatgattcagaggaggaggaagagagcaggcccatgagttacgatgagaagcggcagctgagcctggacatcaacaaattacctggggagaagctgggccgagttgtgcatataatccaagccagggagccctctttacgtgattcaaacccagaagagattgagattgattttgaaacactcaagccatccacacttagagagcttgagcgctatgtcctttcctgcctacgtaagaaaccccggaagccctacaccattaagaagcctgtgggaaagacaaaggaggaactggctttggagaaaaagcgggaattagaaaagcggttacaagatgtcagcggacagctcaattctactaaaaagccccccaagaaagcgaatgagaaaacagagtcatcctctgcacagcaagtagcagtgtcacgccttagcgcttccagctccagctcagattccagctcctcctcttcctcgtcgtcgtcttcagacaccagtgattcagactcaggctaaggggtcaggccagatggggcaggaaggctccgcaggaccggacccctagaccaccctgccccacctgccccttccccctttgctgtgacacttcttcatctcacccccccctgcccccctctaggagagctggctctgcagtgggggagggatgcagggacatttactgaaggagggacatggacaaaacaacattgaattcccagccccattggggagtgatctcttggacacagagcccccattcaaaatggggcagggcaagggtgggagtgtgcaaagccctgatctggagttacctgaggccatagctgccctattcacttctaagggccctgttttgagattgtttgttctaatttattttaagctaggtaaggctggggggagggtggggccgtggtcccctcagcctccatggggagggaagaagggggagctctttttttacgttgatttttttttttctactctgttttccctttttccttccgctccatttggggccctgggggtttcagtcatctccccatttggtcccctggactgtctttgttgattctaacttgtaaataaagaaaatattattcaagttttgagttaccttaatatttgcttttgtagtgtttcaaaaggaacatcataagaattgtcttgataattttgagggaaatattactgcagtgagaaaaggcaatagctaacctataattggattgtcttaatttttaaaccagtaggcttttgctgtgtttttaataaagtaaatatgacttttgtaaattga

SEQ ID NO: 3774 - DNA, 887 bp, Homo sapiens
  source 1..887: mol_type = unassigned DNA
ttcgtcccctgggggtacagcagccgggagccaggctccctggggaagggaatgcagggttgctggggctgggcccagaagcagcagcaccagggaaaaggattcgaaaaccctctctcttgtatgagggctttgagagccccacaatggcttcggtgcctgctttgcaacttacccctgccaacccaccacccccggaggtgtccaatcccaaaaagccaggacgagttaccaaccagctgcaatacctacacaaggtagtgatgaaggctctgtggaaacatcagttcgcatggccattccggcagcctgtggatgctgtcaaactgggtctaccggattatcacaaaattataaaacagcctatggacatgggtactattaagaggagacttgaaaacaattattattgggctgcttcagagtgtatgcaagattttaataccatgttcaccaactgttacatttacaacaagcccactgatgatattgtcctaatggcacaaacgctggaaaagatattcctacagaaggttgcatcaatgccacaagaagaacaagagctggtagtgaccatccctaagaacagccacaagaagggggccaagttggcagcgctccagggcagtgttaccagtgcccatcaggtgcctgccgtctcttctgtgtcacacacagccctgtatactcctccacctgagatacctaccactgtcctcaacattccccacccatcagtcatttcctctccacttctcaagtccttgcactctgctggacccccgctccttgctgttactgcagctcctccagcccagccccttgccaagaaaaaaggcgtaaagcggaaagcagatactaccacccctacacctacagccatcttg

SEQ ID NO: 3775 - DNA, 3467 bp, Homo sapiens
  source 1..3467: mol_type = unassigned DNA
cccaaagagactgctttcgtgccggccaggcagggggtttgtcgcctggaggcccaagaggaacggcctccccccaacttagcgggttatgctggaccgggcggtgaggggaaccgaggccacccggactttccgcggctgagggcagcgccggttccttgcggtcaagatgctgcaaaacgtgactccccacaataagctccctggggaagggaatgcagggttgctggggctgggcccagaagcagcagcaccagggaaaaggattcgaaaaccctctctcttgtatgagggctttgagagccccacaatggcttcggtgcctgctttgcaacttacccctgccaacccaccacccccggaggtgtccaatcccaaaaagccaggacgagttaccaaccagctgcaatacctacacaaggtagtgatgaaggctctgtggaaacatcagttcgcatggccattccggcagcctgtggatgctgtcaaactgggtctaccggattatcacaaaattataaaacagcctatggacatgggtactattaagaggagacttgaaaacaattattattgggctgcttcagagtgtatgcaagattttaataccatgttcaccaactgttacatttacaacaagcccactgatgatattgtcctaatggcacaaacgctggaaaagatattcctacagaaggttgcatcaatgccacaagaagaacaagagctggtagtgaccatccctaagaacagccacaagaagggggccaagttggcagcgctccagggcagtgttaccagtgcccatcaggtgcctgccgtctcttctgtgtcacacacagccctgtatactcctccacctgagatacctaccactgtcttcaacattccccacccatcagtcatttcctctccacttctcaagtccttgcactctgctggacccccgctccttgctgttactgcagctcctccagcccagccccttgccaagaaaaaaggcgtaaagcggaaagcagatactaccacccctacacctacagccatcttggctcctggttctccagctagccctcctgggagtcttgagcctaaggcagcacggcttccccctatgcgtagagagagtggtcgccccatcaagcccccacgcaaagacttgcctgactctcagcaacaacaccagagctctaagaaaggaaagctttcagaacagttaaaacattgcaatggcattttgaaggagttactctctaagaagcatgctgcctatgcttggcctttctataaaccagtggatgcttctgcacttggcctgcatgactaccatgacatcattaagcaccccatggacctcagcactgtcaagcggaagatggagaaccgtgattaccgggatgcacaggagtttgctgctgatgtacggcttatgttctccaactgctataagtacaatcccccagatcacgatgttgtggcaatggcacgaaagctacaggatgtatttgagttccgttatgccaagatgccagatgaaccactagaaccagggcctttaccagtctctactgccatgccccctggcttggccaaatcgtcttcagagtcctccagtgaggaaagtagcagtgagagctcctctgaggaagaggaggaggaagatgaggaggacgaggaggaagaagagagtgaaagctcagactcagaggaagaaagggctcatcgcttagcagaactacaggaacagcttcgggcagtacatgaacaactggctgctctgtcccagggtccaatatccaagcccaagaggaaaagagagaaaaaagagaaaaagaagaaacggaaggcagagaagcatcgaggccgagctggggccgatgaagatgacaaggggcctagggcaccccgcccacctcaacctaagaagtccaagaaagcaagtggcagtgggggtggcagtgctgctttaggcccttccggctttggaccttctggaggaagtggcaccaaactccaggctggagtgcagtggcgtgatctcggcttactgcaacctccacttctcgggttcaagcgattctcctgcctcagcctcccaagtagccagaattacaggctccccaaaaaggccacaaagacagccccacctgccctgcctacaggttatgattcagaggaggaggaagagagcaggcccatgagttacgatgagaagcggcagctgagcctggacatcaacaaattacctggggagaagctgggccgagttgtgcatataatccaagccagggagccctctttacgtgattcaaacccagaagagattgagattgattttgaaacactcaagccatccacacttagagagcttgagcgctatgtcctttcctgcctacgtaagaaaccccggaagccctacaccattaagaagcctgtgggaaagacaaaggaggaactggctttggagaaaaagcgggaattagaaaagcggttacaagatgtcagcggacagctcaattctactaaaaagccccccaagaaagcgaatgagaaaacagagtcatcctctgcacagcaagtagcagtgtcacgccttagcgcttccagctccagctcagattccagctcctcctcttcctcgtcgtcgtcttcagacaccagtgattcagactcaggctaaggggtcaggccagatggggcaggaaggctccgcaggaccggacccctagaccaccctgccccacctgccccttccccctttgctgtgacacttcttcatctcacccccccctgcccccctctaggagagctggctctgcagtgggggagggatgcagggacatttactgaaggagggacatggacaaaacaacattgaattcccagccccattggggagtgatctcttggacacagagcccccattcaaaatggggcagggcaagggtgggagtgtgcaaagccctgatctggagttacctgaggccatagctgccctattcacttctaagggccctgttttgagattgtttgttctaatttattttaagctaggtaaggctggggggagggtggggccgtggtcccctcagcctccatggggagggaagaagggggagctctttttttacgttgatttttttttttctactctgttttccctttttccttccgctccatttggggccctgggggtttcagtcatctccccatttggtcccctggactgtctttgttgattctaacttgtaaataaagaaaatattattcaagttttgagttaccttaatatttgcttttgtagtgtttcaaaaggaacatcataagaattgtcttgataattttgagggaaatattactgcagtgagaaaaggcaatagctaacctataattggattgtcttaatttttaaaccagtaggcttttgctgtgtttttaataaagtaaatatgacttttgtaaattga

SEQ ID NO: 3776 - DNA, 1773 bp, Homo sapiens; identical to SEQ ID NO: 3758
  source 1..1773: mol_type = unassigned DNA

SEQ ID NO: 3777 - DNA, 887 bp, Homo sapiens; identical to SEQ ID NO: 3754
  source 1..887: mol_type = unassigned DNA

SEQ ID NO: 3778 - DNA, 887 bp, Homo sapiens
  source 1..887: mol_type = unassigned DNA
ttcgtcccctgggggtacagcagccgggagccaggctccctggggaagggaatgcagggttgctggggctgggcccagaagcagcagcaccagggaagaggattcgaaaaccctctctcttgtatgagggctttgagagccccacaatggcttcggtgcctgctttgcaacttacccctgccaacccaccacccccggaggtgtccaatcccaaaaagccaggacgagttaccaaccagctgcaatacctacacaaggtagtgatgaaggctctgtggaaacatcagttcgcatggccattccggcagcctgtggatgctgtcaaactgggtctaccggattatcacaaaattataaaacagcctatggacatgggtactattaagaggagacttgaaaacaattattattgggctgcttcagagtgtatgcaagattttaataccatgttcaccaactgttacatttacaacaagcccactgatgatattgtcctaatggcacaaacgctggaaaagatattcctacagaaggttgcatcaatgccacaagaagaacaagagctggtagtgaccatccctaagaacagccacaagaagggggccaagttggcagcgctccagggcagtgttaccagtgcccatcaggtgcctgccgtctcttctgtgtcacacacagccctgtatactcctccacctgagatacctaccactgtcctcaacattccccacccatcagtcatttcctctccacttctcaagtccttgcactctgctggacccccgctccttgctgttactgcagctcctccagcccagccccttgccaagaaaaaaggcgtaaagcggaaagcagatactaccacccctacacctacagccatcttg

SEQ ID NO: 3779 - DNA, 1858 bp, Homo sapiens
  source 1..1858: mol_type = unassigned DNA
ggaacggtggtggcggctcggctactgctcgtggaggggaatacaggctccctggggaagggaatgcagggttgctggggctgggcccagaagcagcagcaccagggaagaggattcgaaaaccctctctcttgtatgagggctttgagagccccacaatggcttcggtgcctgctttgcaacttacccctgccaacccaccacccccggaggtgtccaatcccaaaaagccaggacgagttaccaaccagctgcaatacctacacaaggtagtgatgaaggctctgtggaaacatcagttcgcatggccattccggcagcctgtggatgctgtcaaactgggtctaccggattatcacaaaattataaaacagcctatggacatgggtactattaagaggagacttgaaaacaattattattgggctgcttcagagtgtatgcaagattttaataccatgttcaccaactgttacatttacaacaagcccactgatgatattgtcctaatggcacaaacgctggaaaagatattcctacagaaggttgcatcaatgccacaagaagaacaagagctggtagtgaccatccctaagaacagccacaagaagggggccaagttggcagcgctccagggcagtgttaccagtgcccatcaggtgcctgccgtctcttctgtgtcacacacagccctctatactcctccacctgagatacctaccactgtcctcaacattccccacccatcagtcatttcctctccacttctcaagtccttgcactctgctggacccccgctccttgctgttactgcagctcctccagcccagccccttgccaagaaaaaaggcgtaaagcggaaagcagatactaccacccctacacctacagccatcttggctcctggttctccagctagccctcctgggagtcttgagcctaaggcagcacggcttccccctatgcgtagagagagtggtcgccccatcaagcccccacgcaaagacttgcctgactctcagcaacaacaccagagctctaagaaaggaaagctttcagaacagttaaaacattgcaatggcattttgaaggagttactctctaagaagcatgctgcctatgcttggcctttctataaaccagtggatgcttctgcacttggcctgcatgactaccatgacatcattaagcaccccatggacctcagcactgtcaagcggaagatggagaaccgtgattaccgggatgcacaggagtttgctgctgatgtacggcttatgttctccaactgctataagtacaatcccccagatcacgatgttgtggcaatggcacgaaagctacaggatgtatttgagttccgttatgccaagatgccagatgaaccactagaaccagggcctttaccagtctctactgccatgccccctggcttggccaaatcgtcttcagagtcctccagtgaggaaagtagcagtgagagctcctctgaggaagaggaggaggaagatgaggaggacgaggaggaagaagagagtgaaagctcagactcagaggaagaaagggctcatcgcttagcagaactacaggaacagcttcgggcagtacatgaacaactggctgctctgtcccagggtccaatatccaagcccaagaggaaaagagagaaaaaagagaaaaagaagaaacggaaggcagagaagcatcgaggccgagctggggccgatgaagatgacaaggggcctagggcaccccgcccacctcaacctaagaagtccaagaaagcaagtggcagtgggggtggcagtgctgctttaggcccttctggctttggaccttctggaggaagtggcaccaa

SEQ ID NO: 3780 - DNA, 1773 bp, Homo sapiens; identical to SEQ ID NO: 3758
  source 1..1773: mol_type = unassigned DNA

SEQ ID NO: 3781 - DNA, 4637 bp, Homo sapiens
  source 1..4637: mol_type = unassigned DNA
accgatggaccagccgctccgtggggaggactccggaccctggtgggggggcgggggggttctttcgcccccgtggcggagggcccctgagaggcggatacgggtgtgcctttgggggtgatgtggcgtgtggggggaaaggtccgagctcgcctggagggggagggtttttcccttaagtcatccctcccaggacttgctttttctgctctgagccggacgccggaatggagtttgaggaagagattcttcgctgctgctgccttaccgccgagaaccaccacccgccaggcgtcttgcggccacacccctggcgggttcaggcaggctacgcccacgcgacccctcccgtttccctgctttggccaatggaggagctacgaatggcacgacctgctcgagcttggcagtctccagttgggctgtgcatggaagcttgggaagactttgttggaaggggaggcggggagagagtgctggaggctctggggcgatggcttccgcacctcttccaaccaccctctttccctggagtcggcggaccacagctcagccaattggcttggagatgtggcgggttgccacttccctgtgggtctctgcggcactcttctgcctggtgactgacaccttggaaatgaagtttatgacgtcatcgttgcggctggccaatagaaaaagctcccgcggagaggtgttccttccccttcgactcagcttcttcacccgcgtgagcgagcgcgcgcgcgcggagggggtggggaaaatctcaagcagggtggcgcgcatgagcggcgaagctcctcctccccgcctatatataaagggctggcgcggggctcggcggcgccatttcgtgctggagtggagcagcctctagaacgagctggaggattctgcctaccgatacagagccttcgagtcgtccggggccgccattacaatccacctccatccgcttggaaatggccttcgtcccggcctatgactggtcccagcgggcagtacagaccccctagaagcccctggagctcccctttttcgggccccgcccaatcctcggagtctgtccaccccctctactccgccctcaagaggatttcaaagatggaggcggcggctccctaaaccacttttcgtgttcatccgcctccatccgagatcgaaacgggacctcgtcggccccgtaggggcccgacaagaagagggaatccctgcagaccaacagcgggctatattgacgacggtgtctgagatcggggaccgtcttttgaagagtcagtccctccttagttgcccgcctcagctgaggccgccgccattttcttgctgtccgccgtctgcagagcgcgccaagctgcccggagctctccgagaggccccaaagagactgctttcgtgccggccaggcagggggtttgtcgcctggaggcccaagaggaacggcctccccccaacttagcgggttatgctggaccgggcggtgaggggaaccgaggccacccggactttccgcggctgagggcagcgccggttccttgcggtcaagatgctgcaaaacgtgactccccacaataagctccctggggaagggaatgcagggttgctggggctgggcccagaagcagcagcaccagggaaaaggattcgaaaaccctctctcttgtatgagggctttgagagccccacaatggcttcggtgcctgctttgcaacttacccctgccaacccaccacccccggaggtgtccaatcccaaaaagccaggacgagttaccaaccagctgcaatacctacacaaggtagtgatgaaggctctgtggaaacatcagttcgcatggccattccggcagcctgtggatgctgtcaaactgggtctaccgattcccacctcgggttgggagaggaccacggtggccaaaattcttagcttcttcctttccctcatgcagcccatggatagccagccccagaggattatcacaaaattataaaacagcctatggacatgggtactattaagaggagacttgaaaacaattattattgggctgcttcagagtgtatgcaagattttaataccatgttcaccaactgttacatttacaacaagcccactgatgatattgtcctaatggcacaaacgctggaaaagatattcctacagaaggttgcatcaatgccacaagaagaacaagagctggtagtgaccatccctaagaacagccacaagaagggggccaagttggcagcgctccagggcagtgttaccagtgcccatcaggtgcctgccgtctcttctgtgtcacacacagccctgtatactcctccacctgagatacctaccactgtcttcaacattccccacccatcagtcatttcctctccacttctcaagtccttgcactctgctggacccccgctccttgctgttactgcagctcctccagcccagccccttgccaagaaaaaaggcgtaaagcggaaagcagatactaccacccctacacctacagccatcttggctcctggttctccagctagccctcctgggagtcttgagcctaaggcagcacggcttccccctatgcgtagagagagtggtcgccccatcaagcccccacgcaaagacttgcctgactctcagcaacaacaccagagctctaagaaaggaaagctttcagaacagttaaaacattgcaatggcattttgaaggagttactctctaagaagcatgctgcctatgcttggcctttctataaaccagtggatgcttctgcacttggcctgcatgactaccatgacatcattaagcaccccatggacctcagcactgtcaagcggaagatggagaaccgtgattaccgggatgcacaggagtttgctgctgatgtacggcttatgttctccaactgctataagtacaatcccccagatcacgatgttgtggcaatggcacgaaagctacaggatgtatttgagttccgttatgccaagatgccagatgaaccactagaaccagggcctttaccagtctctactgccatgccccctggcttggccaaatcgtcttcagagtcctccagtgaggaaagtagcagtgagagctcctctgaggaagaggaggaggaagatgaggaggacgaggaggaagaagagagtgaaagctcagactcagaggaagaaagggctcatcgcttagcagaactacaggaacagcttcgggcagtacatgaacaactggctgctctgtcccagggtccaatatccaagcccaagaggaaaagagagaaaaaagagaaaaagaagaaacggaaggcagagaagcatcgaggccgagctggggccgatgaagatgacaaggggcctagggcaccccgcccacctcaacctaagaagtccaagaaagcaagtggcagtgggggtggcagtgctgctttaggcccttccggctttggaccttctggaggaagtggcaccaagctccccaaaaaggccacaaagacagccccacctgccctgcctacaggttatgattcagaggaggaggaagagagcaggcccatgagttacgatgagaagcggcagctgagcctggacatcaacaaattacctggggagaagctgggccgagttgtgcatataatccaagccagggagccctctttacgtgattcaaacccagaagagattgagattgattttgaaacactcaagccatccacacttagagagcttgagcgctatgtcctttcctgcctacgtaagaaaccccggaagccctacaccattaagaagcctgtgggaaagacaaaggaggaactggctttggagaaaaagcgggaattagaaaagcggttacaagatgtcagcggacagctcaattctactaaaaagccccccaagaaagcgaatgagaaaacagagtcatcctctgcacagcaagtagcagtgtcacgccttagcgcttccagctccagctcagattccagctcctcctcttcctcgtcgtcgtcttcagacaccagtgattcagactcaggctaaggggtcaggccagatggggcaggaaggctccgcaggaccggacccctagaccaccctgccccacctgccccttccccctttgctgtgacacttcttcatctcacccccccctgcccccctctaggagagctggctctgcagtgggggagggatgcagggacatttactgaaggagggacatggacaaaacaacattgaattcccagccccattggggagtgatctcttggacacagagcccccattcaaaatggggcagggcaagggtgggagtgtgcaaagccctgatctggagttacctgaggccatagctgccctattcacttctaagggccctgttttgagattgtttgttctaatttattttaagctaggtaaggctggggggagggtggggccgtggtcccctcagcctccatggggagggaagaagggggagctctttttttacgttgatttttttttttctactctgttttccctttttccttccgctccatttggggccctgggggtttcagtcatctccccatttggtcccctggactgtctttgttgattctaacttgtaaataaagaaaatattattc

SEQ ID NO: 3782 - DNA, 3013 bp, Homo sapiens
  source 1..3013: mol_type = unassigned DNA
ggaacggtggtggcggctcggctactgctcgtggaggggaatacaggctccctggggaagggaatgcagggttgctggggctgggcccagaagcagcagcaccagggaaaaggattcgaaaaccctctctcttgtatgagggctttgagagccccacaatggcttcggtgcctgctttgcaacttacccctgccaacccaccacccccggaggtgtccaatcccaaaaagccaggacgagttaccaaccagctgcaatacctacacaaggtagtgatgaaggctctgtggaaacatcagttcgcatggccattccggcagcctgtggatgctgtcaaactgggtctaccggattatcacaaaattataaaacagcctatggacatgggtactattaagaggagacttgaaaacaattattattgggctgcttcagagtgtatgcaagattttaataccatgttcaccaactgttacatttacaacaagcccactgatgatattgtcctaatggcacaaacgctggaaaagatattcctacagaaggttgcatcaatgccacaagaagaacaagagctggtagtgaccatccctaagaacagccacaagaagggggccaagttggcagcgctccagggcagtgttaccagtgcccatcaggtgcctgccgtctcttctgtgtcacacacagccctgtatactcctccacctgagatacctaccactgtcttcaacattccccacccatcagtcatttcctctccacttctcaagtccttgcactctgctggacccccgctccttgctgttactgcagctcctccagcccagccccttgccaagaaaaaaggcgtaaagcggaaagcagatactaccacccctacacctacagccatcttggctcctggttctccagctagccctcctgggagtcttgagcctaaggcagcacggcttccccctatgcgtagagagagtggtcgccccatcaagcccccacgcaaagacttgcctgactctcagcaacaacaccagagctctaagaaaggaaagctttcagaacagttaaaacattgcaatggcattttgaaggagttactctctaagaagcatgctgcctatgcttggcctttctataaaccagtggatgcttctgcacttggcctgcatgactaccatgacatcattaagcaccccatggacctcagcactgtcaagcggaagatggagaaccgtgattaccgggatgcacaggagtttgctgctgatgtacggcttatgttctccaactgctataagtacaatcccccagatcacgatgttgtggcaatggcacgaaagctacaggatgtatttgagttccgttatgccaagatgccagatgaaccactagaaccagggcctttaccagtctctactgccatgccccctggcttggccaaatcgtcttcagagtcctccagtgaggaaagtagcagtgagagctcctctgaggaagaggaggaggaagatgaggaggacgaggaggaagaagagagtgaaagctcagactcagaggaagaaagggctcatcgcttagcagaactacaggaacagcttcgggcagtacatgaacaactggctgctctgtcccagggtccaatatccaagcccaagaggaaaagagagaaaaaagagaaaaagaagaaacggaaggcagagaagcatcgaggccgagctggggccgatgaagatgacaaggggcctagggcaccccgcccacctcaacctaagaagtccaagaaagcaagtggcagtgggggtggcagtgctgctttaggcccttccggctttggaccttctggaggaagtggcaccaagctccccaaaaaggccacaaagacagccccacctgccctgcctacaggttatgattcagaggaggaggaagagagcaggcccatgagttacgatgagaagcggcagctgagcctggacatcaacaaattacctggggagaagctgggccgagttgtgcatataatccaagccagggagccctctttacgtgattcaaacccagaagagattgagattgattttgaaacactcaagccatccacacttagagagcttgagcgctatgtcctttcctgcctacgtaagaaaccccggaagccctacaccattaagaagcctgtgggaaagacaaaggaggaactggctttggagaaaaagcgggaattagaaaagcggttacaagatgtcagcggacagctcaattctactaaaaagccccccaagaaagcgaatgagaaaacagagtcatcctctgcacagcaagtagcagtgtcacgccttagcgcttccagctccagctcagattccagctcctcctcttcctcgtcgtcgtcttcagacaccagtgattcagactcaggctaaggggtcaggccagatggggcaggaaggctccgcaggaccggacccctagaccaccctgccccacctgccccttccccctttgctgtgacacttcttcatctcacccccccctgcccccctctaggagagctggctctgcagtgggggagggatgcagggacatttactgaaggagggacatggacaaaacaacattgaattcccagccccattggggagtgatctcttggacacagagcccccattcaaaatggggcagggcaagggtgggagtgtgcaaagccctgatctggagttacctgaggccatagctgccctattcacttctaagggccctgttttgagattgtttgttctaatttattttaagctaggtaaggctggggggagggtggggccgtggtcccctcagcctccatggggagggaagaagggggagctctttttttacgttgatttttttttttctactctgttttccctttttccttccgctccatttggggccctgggggtttcagtcatctccccatttggtcccctggactgtctttgttgattctaacttgtaaataaagaaaatattattc

SEQ ID NO: 3783 - DNA, 4898 bp, Homo sapiens
  source 1..4898: mol_type = unassigned DNA
tagtctgagccgcagccgccgcctcctccgctcgccctcctccctggcgctgaccgatggaccagccgctccgtggggaggactccggaccctggtgggggggcgggggggttctttcgcccccgtggcggagggcccctgagaggcggatacgggtgtgcctttgggggtgatgtggcgtgtggggggaaaggtccgagctcgcctggagggggagggtttttcccttaagtcatccctcccaggacttgctttttctgctctgagccggacgccggaatggagtttgaggaagagattcttcgctgctgctgccttaccgccgagaaccaccacccgccaggcgtcttgcggccacacccctggcgggttcaggcaggctacgcccacgcgacccctcccgtttccctgctttggccaatggaggagctacgaatggcacgacctgctcgagcttggcagtctccagttgggctgtgcatggaagcttgggaagactttgttggaaggggaggcggggagagagtgctggaggctctggggcgatggcttccgcacctcttccaaccaccctctttccctggagtcggcggaccacagctcagccaattggcttggagatgtggcgggttgccacttccctgtgggtctctgcggcactcttctgcctggtgactgacaccttggaaatgaagtttatgacgtcatcgttgcggctggccaatagaaaaagctcccgcggagaggtgttccttccccttcgactcagcttcttcacccgcgtgagcgagcgcgcgcgcgcggagggggtggggaaaatctcaagcagggtggcgcgcatgagcggcgaagctcctcctccccgcctatatataaagggctggcgcggggctcggcggcgccatttcgtgctggagtggagcagcctctagaacgagctggaggattctgcctaccgatacagagccttcgagtcgtccggggccgccattacaatccacctccatccgcttggaaatggccttcgtcccggcctatgactggtcccagcgggcagtacagaccccctagaagcccctggagctcccctttttcgggccccgcccaatcctcggagtctgtccaccccctctactccgccctcaagaggatttcaaagatggaggcggcggctccctaaaccacttttcgtgttcatccgcctccatccgagatcgaaacgggacctcgtcggccccgtaggggcccgacaagaagagggaatccctgcagaccaacagcgggctatattgacgacggtgtctgagatcggggaccgtcttttgaagagtcagtccctccttagttgcccgcctcagctgaggccgccgccattttcttgctgtccgccgtctgcagagcgcgccaagctgcccggagctctccgagaggccccaaagagactgctttcgtgccggccaggcagggggtttgtcgcctggaggcccaagaggaacggcctccccccaacttagcgggttatgctggaccgggcggtgaggggaaccgaggccacccggactttccgcggctgagggcagcgccggttccttgcggtcaagatgctgcaaaacgtgactccccacaataagctccctggggaagggaatgcagggttgctggggctgggcccagaagcagcagcaccagggaagaggattcgaaaaccctctctcttgtatgagggctttgagagccccacaatggcttcggtgcctgctttgcaacttacccctgccaacccaccacccccggaggtgtccaatcccaaaaagccaggacgagttaccaaccagctgcaatacctacacaaggtagtgatgaaggctctgtggaaacatcagttcgcatggccattccggcagcctgtggatgctgtcaaactgggtctaccggattatcacaaaattataaaacagcctatggacatgggtactattaagaggagacttgaaaacaattattattgggctgcttcagagtgtatgcaagattttaataccatgttcaccaactgttacatttacaacaagcccactgatgatattgtcctaatggcacaaacgctggaaaagatattcctacagaaggttgcatcaatgccacaagaagaacaagagctggtagtgaccatccctaagaacagccacaagaagggggccaagttggcagcgctccagggcagtgttaccagtgcccatcaggtgcctgccgtctcttctgtgtcacacacagccctctatactcctccacctgagatacctaccactgtcctcaacattccccacccatcagtcatttcctctccacttctcaagtccttgcactctgctggacccccgctccttgctgttactgcagctcctccagcccagccccttgccaagaaaaaaggcgtaaagcggaaagcagatactaccacccctacacctacagccatcttggctcctggttctccagctagccctcctgggagtcttgagcctaaggcagcacggcttccccctatgcgtagagagagtggtcgccccatcaagcccccacgcaaagacttgcctgactctcagcaacaacaccagagctctaagaaaggaaagctttcagaacagttaaaacattgcaatggcattttgaaggagttactctctaagaagcatgctgcctatgcttggcctttctataaaccagtggatgcttctgcacttggcctgcatgactaccatgacatcattaagcaccccatggacctcagcactgtcaagcggaagatggagaaccgtgattaccgggatgcacaggagtttgctgctgatgtacggcttatgttctccaactgctataagtacaatcccccagatcacgatgttgtggcaatggcacgaaagctacaggatgtatttgagttccgttatgccaagatgccagatgaaccactagaaccagggcctttaccagtctctactgccatgccccctggcttggccaaatcgtcttcagagtcctccagtgaggaaagtagcagtgagagctcctctgaggaagaggaggaggaagatgaggaggacgaggaggaagaagagagtgaaagctcagactcagaggaagaaagggctcatcgcttagcagaactacaggaacagcttcgggcagtacatgaacaactggctgctctgtcccagggtccaatatccaagcccaagaggaaaagagagaaaaaagagaaaaagaagaaacggaaggcagagaagcatcgaggccgagctggggccgatgaagatgacaaggggcctagggcaccccgcccacctcaacctaagaagtccaagaaagcaagtggcagtgggggtggcagtgctgctttaggcccttctggctttggaccttctggaggaagtggcaccaaactccaggctggagtgcagtggcgtgatctcggcttactgcaacctccacttctcgggttcaagcgattctcctgcctcagcctcccaagtagccaggattacaggctccccaaaaaggccacaaagacagccccacctgccctgcctacaggttatgattcagaggaggaggaagagagcaggcccatgagttacgatgagaagcggcagctgagcctggacatcaacaaattacctggggagaagctgggccgagttgtgcatataatccaagccagggagccctctttacgtgattcaaacccagaagagattgagattgattttgaaacactcaagccatccacacttagagagcttgagcgctatgtcctttcctgcctacgtaagaaaccccggaagccctacaccattaagaagcctgtgggaaagacaaaggaggaactggctttggagaaaaagcgggaattagaaaagcggttacaagatgtcagcggacagctcaattctactaaaaagccccccaagaaagcgaatgagaaaacagagtcatcctctgcacagcaagtagcagtgtcacgccttagcgcttccagctctagctcagattccagctcctcctcttcctcgtcgtcgtcttcagacaccagtgattcagactcaggctaaggggtcaggccagatggggcaggaaggctccgcaggaccggacccctagaccaccctgccccacctgccccttccccctttgctgtgacacttcttcatctcacccccccctgcccccctctaggagagctggctctgcagtgggggagggatgcagggacatttactgaaggagggacatggacaaaacaacattgaattcccagccccattggggagtgatctcttggacacagagcccccattcaaaatggggcagggcaagggtgggagtgtgcaaagccctgatctggagttacctgaggccatagctgccctattcacttctaagggccctgttttgagattgtttgttctaatttattttaagctaggtaaggctggggggagggtggggccgtggtcccctcagcctccatggggagggaagaagggggagctctttttttacgttgatttttttttttctactctgttttccctttttccttccgctccatttggggccctgggggtttcagtcatctccccatttggtcccctggactgtctttgttgattctaacttgtaaataaagaaaatattattcaagttttgagttaccttaatatttgcttttgtagtgtttcaaaaggaacatcataagaattgtcttgataattttgagggaaatattactgcagtgagaaaaggcaatagctaacctataattggattgtcttaatttttaaaccagtaggcttttgctgtgtttttaataaagtaaatatgacttttgtaaattg

SEQ ID NO: 3784 - DNA, 4637 bp, Homo sapiens
  source 1..4637: mol_type = unassigned DNA
accgatggaccagccgctccgtggggaggactccggaccctggtgggggggcgggggggttctttcgcccccgtggcggagggcccctgagaggcggatacgggtgtgcctttgggggtgatgtggcgtgtggggggaaaggtccgagctcgcctggagggggagggtttttcccttaagtcatccctcccaggacttgctttttctgctctgagccggacgccggaatggagtttgaggaagagattcttcgctgctgctgccttaccgccgagaaccaccacccgccaggcgtcttgcggccacacccctggcgggttcaggcaggctacgcccacgcgacccctcccgtttccctgctttggccaatggaggagctacgaatggcacgacctgctcgagcttggcagtctccagttgggctgtgcatggaagcttgggaagactttgttggaaggggaggcggggagagagtgctggaggctctggggcgatggcttccgcacctcttccaaccaccctctttccctggagtcggcggaccacagctcagccaattggcttggagatgtggcgggttgccacttccctgtgggtctctgcggcactcttctgcctggtgactgacaccttggaaatgaagtttatgacgtcatcgttgcggctggccaatagaaaaagctcccgcggagaggtgttccttccccttcgactcagcttcttcacccgcgtgagcgagcgcgcgcgcgcggagggggtggggaaaatctcaagcagggtggcgcgcatgagcggcgaagctcctcctccccgcctatatataaagggctggcgcggggctcggcggcgccatttcgtgctggagtggagcagcctctagaacgagctggaggattctgcctaccgatacagagccttcgagtcgtccggggccgccattacaatccacctccatccgcttggaaatggccttcgtcccggcctatgactggtcccagcgggcagtacagaccccctagaagcccctggagctcccctttttcgggccccgcccaatcctcggagtctgtccaccccctctactccgccctcaagaggatttcaaagatggaggcggcggctccctaaaccacttttcgtgttcatccgcctccatccgagatcgaaacgggacctcgtcggccccgtaggggcccgacaagaagagggaatccctgcagaccaacagcgggctatattgacgacggtgtctgagatcggggaccgtcttttgaagagtcagtccctccttagttgcccgcctcagctgaggccgccgccattttcttgctgtccgccgtctgcagagcgcgccaagctgcccggagctctccgagaggccccaaagagactgctttcgtgccggccaggcagggggtttgtcgcctggaggcccaagaggaacggcctccccccaacttagcgggttatgctggaccgggcggtgaggggaaccgaggccacccggactttccgcggctgagggcagcgccggttccttgcggtcaagatgctgcaaaacgtgactccccacaataagctccctggggaagggaatgcagggttgctggggctgggcccagaagcagcagcaccagggaaaaggattcgaaaaccctctctcttgtatgagggctttgagagccccacaatggcttcggtgcctgctttgcaacttacccctgccaacccaccacccccggaggtgtccaatcccaaaaagccaggacgagttaccaaccagctgcaatacctacacaaggtagtgatgaaggctctgtggaaacatcagttcgcatggccattccggcagcctgtggatgctgtcaaactgggtctaccgattcccacctcgggttgggagaggaccacggtggccaaaattcttagcttcttcctttccctcatgcagcccatggatagccagccccagaggattatcacaaaattataaaacagcctatggacatgggtactattaagaggagacttgaaaacaattattattgggctgcttcagagtgtatgcaagattttaataccatgttcaccaactgttacatttacaacaagcccactgatgatattgtcctaatggcacaaacgctggaaaagatattcctacagaaggttgcatcaatgccacaagaagaacaagagctggtagtgaccatccctaagaacagccacaagaagggggccaagttggcagcgctccagggcagtgttaccagtgcccatcaggtgcctgccgtctcttctgtgtcacacacagccctgtatactcctccacctgagatacctaccactgtcctcaacattccccacccatcagtcatttcctctccacttctcaagtccttgcactctgctggacccccgctccttgctgttactgcagctcctccagcccagccccttgccaagaaaaaaggcgtaaagcggaaagcagatactaccacccctacacctacagccatcttggctcctggttctccagctagccctcctgggagtcttgagcctaaggcagcacggcttccccctatgcgtagagagagtggtcgccccatcaagcccccacgcaaagacttgcctgactctcagcaacaacaccagagctctaagaaaggaaagctttcagaacagttaaaacattgcaatggcattttgaaggagttactctctaagaagcatgctgcctatgcttggcctttctataaaccagtggatgcttctgcacttggcctgcatgactaccatgacatcattaagcaccccatggacctcagcactgtcaagcggaagatggagaaccgtgattaccgggatgcacaggagtttgctgctgatgtacggcttatgttctccaactgctataagtacaatcccccagatcacgatgttgtggcaatggcacgaaagctacaggatgtatttgagttccgttatgccaagatgccagatgaaccactagaaccagggcctttaccagtctctactgccatgccccctggcttggccaaatcgtcttcagagtcctccagtgaggaaagtagcagtgagagctcctctgaggaagaggaggaggaagatgaggaggacgaggaggaagaagagagtgaaagctcagactcagaggaagaaagggctcatcgcttagcagaactacaggaacagcttcgggcagtacatgaacaactggctgctctgtcccagggtccaatatccaagcccaagaggaaaagagagaaaaaagagaaaaagaagaaacggaaggcagagaagcatcgaggccgagctggggccgatgaagatgacaaggggcctagggcaccccgcccacctcaacctaagaagtccaagaaagcaagtggcagtgggggtggcagtgctgctttaggcccttctggctttggaccttctggaggaagtggcaccaagctccccaaaaaggccacaaagacagccccacctgccctgcctacaggttatgattcagaggaggaggaagagagcaggcccatgagttacgatgagaagcggcagctgagcctggacatcaacaaattacctggggagaagctgggccgagttgtgcatataatccaagccagggagccctctttacgtgattcaaacccagaagagattgagattgattttgaaacactcaagccatccacacttagagagcttgagcgctatgtcctttcctgcctacgtaagaaaccccggaagccctacaccattaagaagcctgtgggaaagacaaaggaggaactggctttggagaaaaagcgggaattagaaaagcggttacaagatgtcagcggacagctcaattctactaaaaagccccccaagaaagcgaatgagaaaacagagtcatcctctgcacagcaagtagcagtgtcacgccttagcgcttccagctccagctcagattccagctcctcctcttcctcgtcgtcgtcttcagacaccagtgattcagactcaggctaaggggtcaggccagatggggcaggaaggctccgcaggaccggacccctagaccaccctgccccacctgccccttccccctttgctgtgacacttcttcatctcacccccccctgcccccctctaggagagctggctctgcagtgggggagggatgcagggacatttactgaaggagggacatggacaaaacaacattgaattcccagccccattggggagtgatctcttggacacagagcccccattcaaaatggggcagggcaagggtgggagtgtgcaaagccctgatctggagttacctgaggccatagctgccctattcacttctaagggccctgttttgagattgtttgttctaatttattttaagctaggtaaggctggggggagggtggggccgtggtcccctcagcctccatggggagggaagaagggggagctctttttttacgttgatttttttttttctactctgttttccctttttccttccgctccatttggggccctgggggtttcagtcatctccccatttggtcccctggactgtctttgttgattctaacttgtaaataaagaaaatattattc

SEQ ID NO: 3785 - DNA, 4898 bp, Homo sapiens; identical to SEQ ID NO: 3783
  source 1..4898: mol_type = unassigned DNA

SEQ ID NO: 3786 - DNA, 3013 bp, Homo sapiens
  source 1..3013: mol_type = unassigned DNA
ggaacggtggtggcggctcggctactgctcgtggaggggaatacaggctccctggggaagggaatgcagggttgctggggctgggcccagaagcagcagcaccagggaaaaggattcgaaaaccctctctcttgtatgagggctttgagagccccacaatggcttcggtgcctgctttgcaacttacccctgccaacccaccacccccggaggtgtccaatcccaaaaagccaggacgagttaccaaccagctgcaatacctacacaaggtagtgatgaaggctctgtggaaacatcagttcgcatggccattccggcagcctgtggatgctgtcaaactgggtctaccggattatcacaaaattataaaacagcctatggacatgggtactattaagaggagacttgaaaacaattattattgggctgcttcagagtgtatgcaagattttaataccatgttcaccaactgttacatttacaacaagcccactgatgatattgtcctaatggcacaaacgctggaaaagatattcctacagaaggttgcatcaatgccacaagaagaacaagagctggtagtgaccatccctaagaacagccacaagaagggggccaagttggcagcgctccagggcagtgttaccagtgcccatcaggtgcctgccgtctcttctgtgtcacacacagccctgtatactcctccacctgagatacctaccactgtcctcaacattccccacccatcagtcatttcctctccacttctcaagtccttgcactctgctggacccccgctccttgctgttactgcagctcctccagcccagccccttgccaagaaaaaaggcgtaaagcggaaagcagatactaccacccctacacctacagccatcttggctcctggttctccagctagccctcctgggagtcttgagcctaaggcagcacggcttccccctatgcgtagagagagtggtcgccccatcaagcccccacgcaaagacttgcctgactctcagcaacaacaccagagctctaagaaaggaaagctttcagaacagttaaaacattgcaatggcattttgaaggagttactctctaagaagcatgctgcctatgcttggcctttctataaaccagtggatgcttctgcacttggcctgcatgactaccatgacatcattaagcaccccatggacctcagcactgtcaagcggaagatggagaaccgtgattaccgggatgcacaggagtttgctgctgatgtacggcttatgttctccaactgctataagtacaatcccccagatcacgatgttgtggcaatggcacgaaagctacaggatgtatttgagttccgttatgccaagatgccagatgaaccactagaaccagggcctttaccagtctctactgccatgccccctggcttggccaaatcgtcttcagagtcctccagtgaggaaagtagcagtgagagctcctctgaggaagaggaggaggaagatgaggaggacgaggaggaagaagagagtgaaagctcagactcagaggaagaaagggctcatcgcttagcagaactacaggaacagcttcgggcagtacatgaacaactggctgctctgtcccagggtccaatatccaagcccaagaggaaaagagagaaaaaagagaaaaagaagaaacggaaggcagagaagcatcgaggccgagctggggccgatgaagatgacaaggggcctagggcaccccgcccacctcaacctaagaagtccaagaaagcaagtggcagtgggggtggcagtgctgctttaggcccttctggctttggaccttctggaggaagtggcaccaagctccccaaaaaggccacaaagacagccccacctgccctgcctacaggttatgattcagaggaggaggaagagagcaggcccatgagttacgatgagaagcggcagctgagcctggacatcaacaaattacctggggagaagctgggccgagttgtgcatataatccaagccagggagccctctttacgtgattcaaacccagaagagattgagattgattttgaaacactcaagccatccacacttagagagcttgagcgctatgtcctttcctgcctacgtaagaaaccccggaagccctacaccattaagaagcctgtgggaaagacaaaggaggaactggctttggagaaaaagcgggaattagaaaagcggttacaagatgtcagcggacagctcaattctactaaaaagccccccaagaaagcgaatgagaaaacagagtcatcctctgcacagcaagtagcagtgtcacgccttagcgcttccagctccagctcagattccagctcctcctcttcctcgtcgtcgtcttcagacaccagtgattcagactcaggctaaggggtcaggccagatggggcaggaaggctccgcaggaccggacccctagaccaccctgccccacctgccccttccccctttgctgtgacacttcttcatctcacccccccctgcccccctctaggagagctggctctgcagtgggggagggatgcagggacatttactgaaggagggacatggacaaaacaacattgaattcccagccccattggggagtgatctcttggacacagagcccccattcaaaatggggcagggcaagggtgggagtgtgcaaagccctgatctggagttacctgaggccatagctgccctattcacttctaagggccctgttttgagattgtttgttctaatttattttaagctaggtaaggctggggggagggtggggccgtggtcccctcagcctccatggggagggaagaagggggagctctttttttacgttgatttttttttttctactctgttttccctttttccttccgctccatttggggccctgggggtttcagtcatctccccatttggtcccctggactgtctttgttgattctaacttgtaaataaagaaaatattattc

SEQ ID NO: 3787 - DNA, 4637 bp, Homo sapiens
  source 1..4637: mol_type = unassigned DNA
accgatggaccagccgctccgtggggaggactccggaccctggtgggggggcgggggggttctttcgcccccgtggcggagggcccctgagaggcggatacgggtgtgcctttgggggtgatgtggcgtgtggggggaaaggtccgagctcgcctggagggggagggtttttcccttaagtcatccctcccaggacttgctttttctgctctgagccggacgccggaatggagtttgaggaagagattcttcgctgctgctgccttaccgccgagaaccaccacccgccaggcgtcttgcggccacacccctggcgggttcaggcaggctacgcccacgcgacccctcccgtttccctgctttggccaatggaggagctacgaatggcacgacctgctcgagcttggcagtctccagttgggctgtgcatggaagcttgggaagactttgttggaaggggaggcggggagagagtgctggaggctctggggcgatggcttccgcacctcttccaaccaccctctttccctggagtcggcggaccacagctcagccaattggcttggagatgtggcgggttgccacttccctgtgggtctctgcggcactcttctgcctggtgactgacaccttggaaatgaagtttatgacgtcatcgttgcggctggccaatagaaaaagctcccgcggagaggtgttccttccccttcgactcagcttcttcacccgcgtgagcgagcgcgcgcgcgcggagggggtggggaaaatctcaagcagggtggcgcgcatgagcggcgaagctcctcctccccgcctatatataaagggctggcgcggggctcggcggcgccatttcgtgctggagtggagcagcctctagaacgagctggaggattctgcctaccgatacagagccttcgagtcgtccggggccgccattacaatccacctccatccgcttggaaatggccttcgtcccggcctatgactggtcccagcgggcagtacagaccccctagaagcccctggagctcccctttttcgggccccgcccaatcctcggagtctgtccaccccctctactccgccctcaagaggatttcaaagatggaggcggcggctccctaaaccacttttcgtgttcatccgcctccatccgagatcgaaacgggacctcgtcggccccgtaggggcccgacaagaagagggaatccctgcagaccaacagcgggctatattgacgacggtgtctgagatcggggaccgtcttttgaagagtcagtccctccttagttgcccgcctcagctgaggccgccgccattttcttgctgtccgccgtctgcagagcgcgccaagctgcccggagctctccgagaggccccaaagagactgctttcgtgccggccaggcagggggtttgtcgcctggaggcccaagaggaacggcctccccccaacttagcgggttatgctggaccgggcggtgaggggaaccgaggccacccggactttccgcggctgagggcagcgccggttccttgcggtcaagatgctgcaaaacgtgactccccacaataagctccctggggaagggaatgcagggttgctggggctgggcccagaagcagcagcaccagggaagaggattcgaaaaccctctctcttgtatgagggctttgagagccccacaatggcttcggtgcctgctttgcaacttacccctgccaacccaccacccccggaggtgtccaatcccaaaaagccaggacgagttaccaaccagctgcaatacctacacaaggtagtgatgaaggctctgtggaaacatcagttcgcatggccattccggcagcctgtggatgctgtcaaactgggtctaccgattcccacctcgggttgggagaggaccacggtggccaaaattcttagcttcttcctttccctcatgcagcccatggatagccagccccagaggattatcacaaaattataaaacagcctatggacatgggtactattaagaggagacttgaaaacaattattattgggctgcttcagagtgtatgcaagattttaataccatgttcaccaactgttacatttacaacaagcccactgatgatattgtcctaatggcacaaacgctggaaaagatattcctacagaaggttgcatcaatgccacaagaagaacaagagctggtagtgaccatccctaagaacagccacaagaagggggccaagttggcagcgctccagggcagtgttaccagtgcccatcaggtgcctgccgtctcttctgtgtcacacacagccctctatactcctccacctgagatacctaccactgtcctcaacattccccacccatcagtcatttcctctccacttctcaagtccttgcactctgctggacccccgctccttgctgttactgcagctcctccagcccagccccttgccaagaaaaaaggcgtaaagcggaaagcagatactaccacccctacacctacagccatcttggctcctggttctccagctagccctcctgggagtcttgagcctaaggcagcacggcttccccctatgcgtagagagagtggtcgccccatcaagcccccacgcaaagacttgcctgactctcagcaacaacaccagagctctaagaaaggaaagctttcagaacagttaaaacattgcaatggcattttgaaggagttactctctaagaagcatgctgcctatgcttggcctttctataaaccagtggatgcttctgcacttggcctgcatgactaccatgacatcattaagcaccccatggacctcagcactgtcaagcggaagatggagaaccgtgattaccgggatgcacaggagtttgctgctgatgtacggcttatgttctccaactgctataagtacaatcccccagatcacgatgttgtggcaatggcacgaaagctacaggatgtatttgagttccgttatgccaagatgccagatgaaccactagaaccagggcctttaccagtctctactgccatgccccctggcttggccaaatcgtcttcagagtcctccagtgaggaaagtagcagtgagagctcctctgaggaagaggaggaggaagatgaggaggacgaggaggaagaagagagtgaaagctcagactcagaggaagaaagggctcatcgcttagcagaactacaggaacagcttcgggcagtacatgaacaactggctgctctgtcccagggtccaatatccaagcccaagaggaaaagagagaaaaaagagaaaaagaagaaacggaaggcagagaagcatcgaggccgagctggggccgatgaagatgacaaggggcctagggcaccccgcccacctcaacctaagaagtccaagaaagcaagtggcagtgggggtggcagtgctgctttaggcccttctggctttggaccttctggaggaagtggcaccaagctccccaaaaaggccacaaagacagccccacctgccctgcctacaggttatgattcagaggaggaggaagagagcaggcccatgagttacgatgagaagcggcagctgagcctggacatcaacaaattacctggggagaagctgggccgagttgtgcatataatccaagccagggagccctctttacgtgattcaaacccagaagagattgagattgattttgaaacactcaagccatccacacttagagagcttgagcgctatgtcctttcctgcctacgtaagaaaccccggaagccctacaccattaagaagcctgtgggaaagacaaaggaggaactggctttggagaaaaagcgggaattagaaaagcggttacaagatgtcagcggacagctcaattctactaaaaagccccccaagaaagcgaatgagaaaacagagtcatcctctgcacagcaagtagcagtgtcacgccttagcgcttccagctctagctcagattccagctcctcctcttcctcgtcgtcgtcttcagacaccagtgattcagactcaggctaaggggtcaggccagatggggcaggaaggctccgcaggaccggacccctagaccaccctgccccacctgccccttccccctttgctgtgacacttcttcatctcacccccccctgcccccctctaggagagctggctctgcagtgggggagggatgcagggacatttactgaaggagggacatggacaaaacaacattgaattcccagccccattggggagtgatctcttggacacagagcccccattcaaaatggggcagggcaagggtgggagtgtgcaaagccctgatctggagttacctgaggccatagctgccctattcacttctaagggccctgttttgagattgtttgttctaatttattttaagctaggtaaggctggggggagggtggggccgtggtcccctcagcctccatggggagggaagaagggggagctctttttttacgttgatttttttttttctactctgttttccctttttccttccgctccatttggggccctgggggtttcagtcatctccccatttggtcccctggactgtctttgttgattctaacttgtaaataaagaaaatattattc

SEQ ID NO: 3788 - DNA, 4898 bp, Homo sapiens
  source 1..4898: mol_type = unassigned DNA
tagtctgagccgcagccgccgcctcctccgctcgccctcctccctggcgctgaccgatggaccagccgctccgtggggaggactccggaccctggtgggggggcgggggggttctttcgcccccgtggcggagggcccctgagaggcggatacgggtgtgcctttgggggtgatgtggcgtgtggggggaaaggtccgagctcgcctggagggggagggtttttcccttaagtcatccctcccaggacttgctttttctgctctgagccggacgccggaatggagtttgaggaagagattcttcgctgctgctgccttaccgccgagaaccaccacccgccaggcgtcttgcggccacacccctggcgggttcaggcaggctacgcccacgcgacccctcccgtttccctgctttggccaatggaggagctacgaatggcacgacctgctcgagcttggcagtctccagttgggctgtgcatggaagcttgggaagactttgttggaaggggaggcggggagagagtgctggaggctctggggcgatggcttccgcacctcttccaaccaccctctttccctggagtcggcggaccacagctcagccaattggcttggagatgtggcgggttgccacttccctgtgggtctctgcggcactcttctgcctggtgactgacaccttggaaatgaagtttatgacgtcatcgttgcggctggccaatagaaaaagctcccgcggagaggtgttccttccccttcgactcagcttcttcacccgcgtgagcgagcgcgcgcgcgcggagggggtggggaaaatctcaagcagggtggcgcgcatgagcggcgaagctcctcctccccgcctatatataaagggctggcgcggggctcggcggcgccatttcgtgctggagtggagcagcctctagaacgagctggaggattctgcctaccgatacagagccttcgagtcgtccggggccgccattacaatccacctccatccgcttggaaatggccttcgtcccggcctatgactggtcccagcgggcagtacagaccccctagaagcccctggagctcccctttttcgggccccgcccaatcctcggagtctgtccaccccctctactccgccctcaagaggatttcaaagatggaggcggcggctccctaaaccacttttcgtgttcatccgcctccatccgagatcgaaacgggacctcgtcggccccgtaggggcccgacaagaagagggaatccctgcagaccaacagcgggctatattgacgacggtgtctgagatcggggaccgtcttttgaagagtcagtccctccttagttgcccgcctcagctgaggccgccgccattttcttgctgtccgccgtctgcagagcgcgccaagctgcccggagctctccgagaggccccaaagagactgctttcgtgccggccaggcagggggtttgtcgcctggaggcccaagaggaacggcctccccccaacttagcgggttatgctggaccgggcggtgaggggaaccgaggccacccggactttccgcggctgagggcagcgccggttccttgcggtcaagatgctgcaaaacgtgactccccacaataagctccctggggaagggaatgcagggttgctggggctgggcccagaagcagcagcaccagggaaaaggattcgaaaaccctctctcttgtatgagggctttgagagccccacaatggcttcggtgcctgctttgcaacttacccctgccaacccaccacccccggaggtgtccaatcccaaaaagccaggacgagttaccaaccagctgcaatacctacacaaggtagtgatgaaggctctgtggaaacatcagttcgcatggccattccggcagcctgtggatgctgtcaaactgggtctaccggattatcacaaaattataaaacagcctatggacatgggtactattaagaggagacttgaaaacaattattattgggctgcttcagagtgtatgcaagattttaataccatgttcaccaactgttacatttacaacaagcccactgatgatattgtcctaatggcacaaacgctggaaaagatattcctacagaaggttgcatcaatgccacaagaagaacaagagctggtagtgaccatccctaagaacagccacaagaagggggccaagttggcagcgctccagggcagtgttaccagtgcccatcaggtgcctgccgtctcttctgtgtcacacacagccctgtatactcctccacctgagatacctaccactgtcctcaacattccccacccatcagtcatttcctctccacttctcaagtccttgcactctgctggacccccgctccttgctgttactgcagctcctccagcccagccccttgccaagaaaaaaggcgtaaagcggaaagcagatactaccacccctacacctacagccatcttggctcctggttctccagctagccctcctgggagtcttgagcctaaggcagcacggcttccccctatgcgtagagagagtggtcgccccatcaagcccccacgcaaagacttgcctgactctcagcaacaacaccagagctctaagaaaggaaagctttcagaacagttaaaacattgcaatggcattttgaaggagttactctctaagaagcatgctgcctatgcttggcctttctataaaccagtggatgcttctgcacttggcctgcatgactaccatgacatcattaagcaccccatggacctcagcactgtcaagcggaagatggagaaccgtgattaccgggatgcacaggagtttgctgctgatgtacggcttatgttctccaactgctataagtacaatcccccagatcacgatgttgtggcaatggcacgaaagctacaggatgtatttgagttccgttatgccaagatgccagatgaaccactagaaccagggcctttaccagtctctactgccatgccccctggcttggccaaatcgtcttcagagtcctccagtgaggaaagtagcagtgagagctcctctgaggaagaggaggaggaagatgaggaggacgaggaggaagaagagagtgaaagctcagactcagaggaagaaagggctcatcgcttagcagaactacaggaacagcttcgggcagtacatgaacaactggctgctctgtcccagggtccaatatccaagcccaagaggaaaagagagaaaaaagagaaaaagaagaaacggaaggcagagaagcatcgaggccgagctggggccgatgaagatgacaaggggcctagggcaccccgcccacctcaacctaagaagtccaagaaagcaagtggcagtgggggtggcagtgctgctttaggcccttctggctttggaccttctggaggaagtggcaccaaactccaggctggagtgcagtggcgtgatctcggcttactgcaacctccacttctcgggttcaagcgattctcctgcctcagcctcccaagtagccaggattacaggctccccaaaaaggccacaaagacagccccacctgccctgcctacaggttatgattcagaggaggaggaagagagcaggcccatgagttacgatgagaagcggcagctgagcctggacatcaacaaattacctggggagaagctgggccgagttgtgcatataatccaagccagggagccctctttacgtgattcaaacccagaagagattgagattgattttgaaacactcaagccatccacacttagagagcttgagcgctatgtcctttcctgcctacgtaagaaaccccggaagccctacaccattaagaagcctgtgggaaagacaaaggaggaactggctttggagaaaaagcgggaattagaaaagcggttacaagatgtcagcggacagctcaattctactaaaaagccccccaagaaagcgaatgagaaaacagagtcatcctctgcacagcaagtagcagtgtcacgccttagcgcttccagctccagctcagattccagctcctcctcttcctcgtcgtcgtcttcagacaccagtgattcagactcaggctaaggggtcaggccagatggggcaggaaggctccgcaggaccggacccctagaccaccctgccccacctgccccttccccctttgctgtgacacttcttcatctcacccccccctgcccccctctaggagagctggctctgcagtgggggagggatgcagggacatttactgaaggagggacatggacaaaacaacattgaattcccagccccattggggagtgatctcttggacacagagcccccattcaaaatggggcagggcaagggtgggagtgtgcaaagccctgatctggagttacctgaggccatagctgccctattcacttctaagggccctgttttgagattgtttgttctaatttattttaagctaggtaaggctggggggagggtggggccgtggtcccctcagcctccatggggagggaagaagggggagctctttttttacgttgatttttttttttctactctgttttccctttttccttccgctccatttggggccctgggggtttcagtcatctccccatttggtcccctggactgtctttgttgattctaacttgtaaataaagaaaatattattcaagttttgagttaccttaatatttgcttttgtagtgtttcaaaaggaacatcataagaattgtcttgataattttgagggaaatattactgcagtgagaaaaggcaatagctaacctataattggattgtcttaatttttaaaccagtaggcttttgctgtgtttttaataaagtaaatatgacttttgtaaattg

SEQ ID NO: 3789 - DNA, 4898 bp, Homo sapiens
  source 1..4898: mol_type = unassigned DNA
tagtctgagccgcagccgccgcctcctccgctcgccctcctccctggcgctgaccgatggaccagccgctccgtggggaggactccggaccctggtgggggggcgggggggttctttcgcccccgtggcggagggcccctgagaggcggatacgggtgtgcctttgggggtgatgtggcgtgtggggggaaaggtccgagctcgcctggagggggagggtttttcccttaagtcatccctcccaggacttgctttttctgctctgagccggacgccggaatggagtttgaggaagagattcttcgctgctgctgccttaccgccgagaaccaccacccgccaggcgtcttgcggccacacccctggcgggttcaggcaggctacgcccacgcgacccctcccgtttccctgctttggccaatggaggagctacgaatggcacgacctgctcgagcttggcagtctccagttgggctgtgcatggaagcttgggaagactttgttggaaggggaggcggggagagagtgctggaggctctggggcgatggcttccgcacctcttccaaccaccctctttccctggagtcggcggaccacagctcagccaattggcttggagatgtggcgggttgccacttccctgtgggtctctgcggcactcttctgcctggtgactgacaccttggaaatgaagtttatgacgtcatcgttgcggctggccaatagaaaaagctcccgcggagaggtgttccttccccttcgactcagcttcttcacccgcgtgagcgagcgcgcgcgcgcggagggggtggggaaaatctcaagcagggtggcgcgcatgagcggcgaagctcctcctccccgcctatatataaagggctggcgcggggctcggcggcgccatttcgtgctggagtggagcagcctctagaacgagctggaggattctgcctaccgatacagagccttcgagtcgtccggggccgccattacaatccacctccatccgcttggaaatggccttcgtcccggcctatgactggtcccagcgggcagtacagaccccctagaagcccctggagctcccctttttcgggccccgcccaatcctcggagtctgtccaccccctctactccgccctcaagaggatttcaaagatggaggcggcggctccctaaaccacttttcgtgttcatccgcctccatccgagatcgaaacgggacctcgtcggccccgtaggggcccgacaagaagagggaatccctgcagaccaacagcgggctatattgacgacggtgtctgagatcggggaccgtcttttgaagagtcagtccctccttagttgcccgcctcagctgaggccgccgccattttcttgctgtccgccgtctgcagagcgcgccaagctgcccggagctctccgagaggccccaaagagactgctttcgtgccggccaggcagggggtttgtcgcctggaggcccaagaggaacggcctccccccaacttagcgggttatgctggaccgggcggtgaggggaaccgaggccacccggactttccgcggctgagggcagcgccggttccttgcggtcaagatgctgcaaaacgtgactccccacaataagctccctggggaagggaatgcagggttgctggggctgggcccagaagcagcagcaccagggaaaaggattcgaaaaccctctctcttgtatgagggctttgagagccccacaatggcttcggtgcctgctttgcaacttacccctgccaacccaccacccccggaggtgtccaatcccaaaaagccaggacgagttaccaaccagctgcaatacctacacaaggtagtgatgaaggctctgtggaaacatcagttcgcatggccattccggcagcctgtggatgctgtcaaactgggtctaccggattatcacaaaattataaaacagcctatggacatgggtactattaagaggagacttgaaaacaattattattgggctgcttcagagtgtatgcaagattttaataccatgttcaccaactgttacatttacaacaagcccactgatgatattgtcctaatggcacaaacgctggaaaagatattcctacagaaggttgcatcaatgccacaagaagaacaagagctggtagtgaccatccctaagaacagccacaagaagggggccaagttggcagcgctccagggcagtgttaccagtgcccatcaggtgcctgccgtctcttctgtgtcacacacagccctgtatactcctccacctgagatacctaccactgtcttcaacattccccacccatcagtcatttcctctccacttctcaagtccttgcactctgctggacccccgctccttgctgttactgcagctcctccagcccagccccttgccaagaaaaaaggcgtaaagcggaaagcagatactaccacccctacacctacagccatcttggctcctggttctccagctagccctcctgggagtcttgagcctaaggcagcacggcttccccctatgcgtagagagagtggtcgccccatcaagcccccacgcaaagacttgcctgactctcagcaacaacaccagagctctaagaaaggaaagctttcagaacagttaaaacattgcaatggcattttgaaggagttactctctaagaagcatgctgcctatgcttggcctttctataaaccagtggatgcttctgcacttggcctgcatgactaccatgacatcattaagcaccccatggacctcagcactgtcaagcggaagatggagaaccgtgattaccgggatgcacaggagtttgctgctgatgtacggcttatgttctccaactgctataagtacaatcccccagatcacgatgttgtggcaatggcacgaaagctacaggatgtatttgagttccgttatgccaagatgccagatgaaccactagaaccagggcctttaccagtctctactgccatgccccctggcttggccaaatcgtcttcagagtcctccagtgaggaaagtagcagtgagagctcctctgaggaagaggaggaggaagatgaggaggacgaggaggaagaagagagtgaaagctcagactcagaggaagaaagggctcatcgcttagcagaactacaggaacagcttcgggcagtacatgaacaactggctgctctgtcccagggtccaatatccaagcccaagaggaaaagagagaaaaaagagaaaaagaagaaacggaaggcagagaagcatcgaggccgagctggggccgatgaagatgacaaggggcctagggcaccccgcccacctcaacctaagaagtccaagaaagcaagtggcagtgggggtggcagtgctgctttaggcccttccggctttggaccttctggaggaagtggcaccaaactccaggctggagtgcagtggcgtgatctcggcttactgcaacctccacttctcgggttcaagcgattctcctgcctcagcctcccaagtagccagaattacaggctccccaaaaaggccacaaagacagccccacctgccctgcctacaggttatgattcagaggaggaggaagagagcaggcccatgagttacgatgagaagcggcagctgagcctggacatcaacaaattacctggggagaagctgggccgagttgtgcatataatccaagccagggagccctctttacgtgattcaaacccagaagagattgagattgattttgaaacactcaagccatccacacttagagagcttgagcgctatgtcctttcctgcctacgtaagaaaccccggaagccctacaccattaagaagcctgtgggaaagacaaaggaggaactggctttggagaaaaagcgggaattagaaaagcggttacaagatgtcagcggacagctcaattctactaaaaagccccccaagaaagcgaatgagaaaacagagtcatcctctgcacagcaagtagcagtgtcacgccttagcgcttccagctccagctcagattccagctcctcctcttcctcgtcgtcgtcttcagacaccagtgattcagactcaggctaaggggtcaggccagatggggcaggaaggctccgcaggaccggacccctagaccaccctgccccacctgccccttccccctttgctgtgacacttcttcatctcacccccccctgcccccctctaggagagctggctctgcagtgggggagggatgcagggacatttactgaaggagggacatggacaaaacaacattgaattcccagccccattggggagtgatctcttggacacagagcccccattcaaaatggggcagggcaagggtgggagtgtgcaaagccctgatctggagttacctgaggccatagctgccctattcacttctaagggccctgttttgagattgtttgttctaatttattttaagctaggtaaggctggggggagggtggggccgtggtcccctcagcctccatggggagggaagaagggggagctctttttttacgttgatttttttttttctactctgttttccctttttccttccgctccatttggggccctgggggtttcagtcatctccccatttggtcccctggactgtctttgttgattctaacttgtaaataaagaaaatattattcaagttttgagttaccttaatatttgcttttgtagtgtttcaaaaggaacatcataagaattgtcttgataattttgagggaaatattactgcagtgagaaaaggcaatagctaacctataattggattgtcttaatttttaaaccagtaggcttttgctgtgtttttaataaagtaaatatgacttttgtaaattg

SEQ ID NO: 3790 - DNA, 3013 bp, Homo sapiens
  source 1..3013: mol_type = unassigned DNA
ggaacggtggtggcggctcggctactgctcgtggaggggaatacaggctccctggggaagggaatgcagggttgctggggctgggcccagaagcagcagcaccagggaagaggattcgaaaaccctctctcttgtatgagggctttgagagccccacaatggcttcggtgcctgctttgcaacttacccctgccaacccaccacccccggaggtgtccaatcccaaaaagccaggacgagttaccaaccagctgcaatacctacacaaggtagtgatgaaggctctgtggaaacatcagttcgcatggccattccggcagcctgtggatgctgtcaaactgggtctaccggattatcacaaaattataaaacagcctatggacatgggtactattaagaggagacttgaaaacaattattattgggctgcttcagagtgtatgcaagattttaataccatgttcaccaactgttacatttacaacaagcccactgatgatattgtcctaatggcacaaacgctggaaaagatattcctacagaaggttgcatcaatgccacaagaagaacaagagctggtagtgaccatccctaagaacagccacaagaagggggccaagttggcagcgctccagggcagtgttaccagtgcccatcaggtgcctgccgtctcttctgtgtcacacacagccctctatactcctccacctgagatacctaccactgtcctcaacattccccacccatcagtcatttcctctccacttctcaagtccttgcactctgctggacccccgctccttgctgttactgcagctcctccagcccagccccttgccaagaaaaaaggcgtaaagcggaaagcagatactaccacccctacacctacagccatcttggctcctggttctccagctagccctcctgggagtcttgagcctaaggcagcacggcttccccctatgcgtagagagagtggtcgccccatcaagcccccacgcaaagacttgcctgactctcagcaacaacaccagagctctaagaaaggaaagctttcagaacagttaaaacattgcaatggcattttgaaggagttactctctaagaagcatgctgcctatgcttggcctttctataaaccagtggatgcttctgcacttggcctgcatgactaccatgacatcattaagcaccccatggacctcagcactgtcaagcggaagatggagaaccgtgattaccgggatgcacaggagtttgctgctgatgtacggcttatgttctccaactgctataagtacaatcccccagatcacgatgttgtggcaatggcacgaaagctacaggatgtatttgagttccgttatgccaagatgccagatgaaccactagaaccagggcctttaccagtctctactgccatgccccctggcttggccaaatcgtcttcagagtcctccagtgaggaaagtagcagtgagagctcctctgaggaagaggaggaggaagatgaggaggacgaggaggaagaagagagtgaaagctcagactcagaggaagaaagggctcatcgcttagcagaactacaggaacagcttcgggcagtacatgaacaactggctgctctgtcccagggtccaatatccaagcccaagaggaaaagagagaaaaaagagaaaaagaagaaacggaaggcagagaagcatcgaggccgagctggggccgatgaagatgacaaggggcctagggcaccccgcccacctcaacctaagaagtccaagaaagcaagtggcagtgggggtggcagtgctgctttaggcccttctggctttggaccttctggaggaagtggcaccaagctccccaaaaaggccacaaagacagccccacctgccctgcctacaggttatgattcagaggaggaggaagagagcaggcccatgagttacgatgagaagcggcagctgagcctggacatcaacaaattacctggggagaagctgggccgagttgtgcatataatccaagccagggagccctctttacgtgattcaaacccagaagagattgagattgattttgaaacactcaagccatccacacttagagagcttgagcgctatgtcctttcctgcctacgtaagaaaccccggaagccctacaccattaagaagcctgtgggaaagacaaaggaggaactggctttggagaaaaagcgggaattagaaaagcggttacaagatgtcagcggacagctcaattctactaaaaagccccccaagaaagcgaatgagaaaacagagtcatcctctgcacagcaagtagcagtgtcacgccttagcgcttccagctctagctcagattccagctcctcctcttcctcgtcgtcgtcttcagacaccagtgattcagactcaggctaaggggtcaggccagatggggcaggaaggctccgcaggaccggacccctagaccaccctgccccacctgccccttccccctttgctgtgacacttcttcatctcacccccccctgcccccctctaggagagctggctctgcagtgggggagggatgcagggacatttactgaaggagggacatggacaaaacaacattgaattcccagccccattggggagtgatctcttggacacagagcccccattcaaaatggggcagggcaagggtgggagtgtgcaaagccctgatctggagttacctgaggccatagctgccctattcacttctaagggccctgttttgagattgtttgttctaatttattttaagctaggtaaggctggggggagggtggggccgtggtcccctcagcctccatggggagggaagaagggggagctctttttttacgttgatttttttttttctactctgttttccctttttccttccgctccatttggggccctgggggtttcagtcatctccccatttggtcccctggactgtctttgttgattctaacttgtaaataaagaaaatattattc

SEQ ID NO: 3791 - DNA, 4893 bp, Homo sapiens
  source 1..4893: mol_type = unassigned DNA
ggaccgcgggataggaagctggggatatggacaagcagcagcgttatagcgctctgggtttcgggacataggcctgggccatgcggcccccttggccccttggcgcgacccccaggaacgttcggaaagctggtcctcgtggctgggggaaaggcggggggtgggggggaagcgggcacgtgaccccggtcagccaatctgggtgctgctgacgtggccgcgcggccccgatgctctccccacccccccagcccgttcgggaagggaggggctgggggctacgccccctcccccagcacggcttcgttttctgggggggggttgacaccccggattacataccccgtaccaagccgagggcaactttggaggccccctggaaggctttaggatccagattcttcgctgctgctgccttaccgccgagaaccaccacccgccaggcgtcttgcggccacacccctggcgggttcaggcaggctacgcccacgcgacccctcccgtttccctgctttggccaatggaggagctacgaatggcacgacctgctcgagcttggcagtctccagttgggctgtgcatggaagcttgggaagactttgttggaaggggaggcggggagagagtgctggaggctctggggcgatggcttccgcacctcttccaaccaccctctttccctggagtcggcggaccacagctcagccaattggcttggagatgtggcgggttgccacttccctgtgggtctctgcggcactcttctgcctggtgactgacaccttggaaatgaagtttatgacgtcatcgttgcggctggccaatagaaaaagctcccgcggagaggtgttccttccccttcgactcagcttcttcacccgcgtgagcgagcgcgcgcgcgcggagggggtggggaaaatctcaagcagggtggcgcgcatgagcggcgaagctcctcctccccgcctatatataaagggctggcgcggggctcggcggcgccatttcgtgctggagtggagcagcctctagaacgagctggaggattctgcctaccgatacagagccttcgagtcgtccggggccgccattacaatccacctccatccgcttggaaatggccttcgtcccggcctatgactggtcccagcgggcagtacagaccccctagaagcccctggagctcccctttttcgggccccgcccaatcctcggagtctgtccaccccctctactccgccctcaagaggatttcaaagatggaggcggcggctccctaaaccacttttcgtgttcatccgcctccatccgagatcgaaacgggacctcgtcggccccgtaggggcccgacaagaagagggaatccctgcagaccaacagcgggctatattgacgacggtgtctgagatcggggaccgtcttttgaagagtcagtccctccttagttgcccgcctcagctgaggccgccgccattttcttgctgtccgccgtctgcagagcgcgccaagctgcccggagctctccgagaggccccaaagagactgctttcgtgccggccaggcagggggtttgtcgcctggaggcccaagaggaacggcctccccccaacttagcgggttatgctggaccgggcggtgaggggaaccgaggccacccggactttccgcggctgagggcagcgccggttccttgcggtcaagatgctgcaaaacgtgactccccacaataagctccctggggaagggaatgcagggttgctggggctgggcccagaagcagcagcaccagggaagaggattcgaaaaccctctctcttgtatgagggctttgagagccccacaatggcttcggtgcctgctttgcaacttacccctgccaacccaccacccccggaggtgtccaatcccaaaaagccaggacgagttaccaaccagctgcaatacctacacaaggtagtgatgaaggctctgtggaaacatcagttcgcatggccattccggcagcctgtggatgctgtcaaactgggtctaccggattatcacaaaattataaaacagcctatggacatgggtactattaagaggagacttgaaaacaattattattgggctgcttcagagtgtatgcaagattttaataccatgttcaccaactgttacatttacaacaagcccactgatgatattgtcctaatggcacaaacgctggaaaagatattcctacagaaggttgcatcaatgccacaagaagaacaagagctggtagtgaccatccctaagaacagccacaagaagggggccaagttggcagcgctccagggcagtgttaccagtgcccatcaggtgcctgccgtctcttctgtgtcacacacagccctctatactcctccacctgagatacctaccactgtcctcaacattccccacccatcagtcatttcctctccacttctcaagtccttgcactctgctggacccccgctccttgctgttactgcagctcctccagcccagccccttgccaagaaaaaaggcgtaaagcggaaagcagatactaccacccctacacctacagccatcttggctcctggttctccagctagccctcctgggagtcttgagcctaaggcagcacggcttccccctatgcgtagagagagtggtcgccccatcaagcccccacgcaaagacttgcctgactctcagcaacaacaccagagctctaagaaaggaaagctttcagaacagttaaaacattgcaatggcattttgaaggagttactctctaagaagcatgctgcctatgcttggcctttctataaaccagtggatgcttctgcacttggcctgcatgactaccatgacatcattaagcaccccatggacctcagcactgtcaagcggaagatggagaaccgtgattaccgggatgcacaggagtttgctgctgatgtacggcttatgttctccaactgctataagtacaatcccccagatcacgatgttgtggcaatggcacgaaagctacaggatgtatttgagttccgttatgccaagatgccagatgaaccactagaaccagggcctttaccagtctctactgccatgccccctggcttggccaaatcgtcttcagagtcctccagtgaggaaagtagcagtgagagctcctctgaggaagaggaggaggaagatgaggaggacgaggaggaagaagagagtgaaagctcagactcagaggaagaaagggctcatcgcttagcagaactacaggaacagcttcgggcagtacatgaacaactggctgctctgtcccagggtccaatatccaagcccaagaggaaaagagagaaaaaagagaaaaagaagaaacggaaggcagagaagcatcgaggccgagctggggccgatgaagatgacaaggggcctagggcaccccgcccacctcaacctaagaagtccaagaaagcaagtggcagtgggggtggcagtgctgctttaggcccttctggctttggaccttctggaggaagtggcaccaagctccccaaaaaggccacaaagacagccccacctgccctgcctacaggttatgattcagaggaggaggaagagagcaggcccatgagttacgatgagaagcggcagctgagcctggacatcaacaaattacctggggagaagctgggccgagttgtgcatataatccaagccagggagccctctttacgtgattcaaacccagaagagattgagattgattttgaaacactcaagccatccacacttagagagcttgagcgctatgtcctttcctgcctacgtaagaaaccccggaagccctacaccattaagaagcctgtgggaaagacaaaggaggaactggctttggagaaaaagcgggaattagaaaagcggttacaagatgtcagcggacagctcaattctactaaaaagccccccaagaaagcgaatgagaaaacagagtcatcctctgcacagcaagtagcagtgtcacgccttagcgcttccagctctagctcagattccagctcctcctcttcctcgtcgtcgtcttcagacaccagtgattcagactcaggctaaggggtcaggccagatggggcaggaaggctccgcaggaccggacccctagaccaccctgccccacctgccccttccccctttgctgtgacacttcttcatctcacccccccctgcccccctctaggagagctggctctgcagtgggggagggatgcagggacatttactgaaggagggacatggacaaaacaacattgaattcccagccccattggggagtgatctcttggacacagagcccccattcaaaatggggcagggcaagggtgggagtgtgcaaagccctgatctggagttacctgaggccatagctgccctattcacttctaagggccctgttttgagattgtttgttctaatttattttaagctaggtaaggctggggggagggtggggccgtggtcccctcagcctccatggggagggaagaagggggagctctttttttacgttgatttttttttttctactctgttttccctttttccttccgctccatttggggccctgggggtttcagtcatctccccatttggtcccctggactgtctttgttgattctaacttgtaaataaagaaaatattattcaagttttgagttaccttaatatttgcttttgtagtgtttcaaaaggaacatcataagaattgtcttgataattttgagggaaatattactgcagtgagaaaaggcaatagctaacctataattggattgtcttaatttttaaaccagtaggcttttgctgtgtttttaataaagtaaatatgacttttgtaaattg

SEQ ID NO: 3792 - DNA, 4637 bp, Homo sapiens; identical to SEQ ID NO: 3787
  source 1..4637: mol_type = unassigned DNA

SEQ ID NO: 3793 - DNA, 5198 bp, Homo sapiens
  source 1..5198: mol_type = unassigned DNA
attctttggaatactactgctagaagtctgacttaagacccagcttatgggccacatggcacccagctgcttctgcagagaaggcaggccactgatgggtacagcaaagtgtggtgctgctggccaagccaaagacccgtgtaggatgactgggcctctgccccttgtgggtgttgccactgtgcttgagtgcctggtgaagaatgtgatgggatcactagcatgtctgcggagagcggccctgggacgagattgagaaatctgccagtaatgggggatggactagaaacttcccaaatgtctacaacacaggcccaggcccaaccccagccagccaacgcagccagcaccaaccccccgcccccagagacctccaaccctaacaagcccaagaggcagaccaaccaactgcaatacctgctcagagtggtgctcaagacactatggaaacaccagtttgcatggcctttccagcagcctgtggatgccgtcaagctgaacctccctgattactataagatcattaaaacgcctatggatatgggaacaataaagaagcgcttggaaaacaactattactggaatgctcaggaatgtatccaggacttcaacactatgtttacaaattgttacatctacaacaagcctggagatgacatagtcttaatggcagaagctctggaaaagctcttcttgcaaaaaataaatgagctacccacagaagaaaccgagatcatgatagtccaggcaaaaggaagaggacgtgggaggaaagaaacagggacagcaaaacctggcgtttccacggtaccaaacacaactcaagcatcgactcctccgcagacccagacccctcagccgaatcctcctcctgtgcaggccacgcctcaccccttccctgccgtcaccccggacctcatcgtccagacccctgtcatgacagtggtgcctccccagccactgcagacgcccccgccagtgcccccccagccacaacccccacccgctccagctccccagcccgtacagagccacccacccatcatcgcggccaccccacagcctgtgaagacaaagaagggagtgaagaggaaagcagacaccaccacccccaccaccattgaccccattcacgagccaccctcgctgcccccggagcccaagaccaccaagctgggccagcggcgggagagcagccggcctgtgaaacctccaaagaaggacgtgcccgactctcagcagcacccagcaccagagaagagcagcaaggtctcggagcagctcaagtgctgcagcggcatcctcaaggagatgtttgccaagaagcacgccgcctacgcctggcccttctacaagcctgtggacgtggaggcactgggcctacacgactactgtgacatcatcaagcaccccatggacatgagcacaatcaagtctaaactggaggcccgtgagtaccgtgatgctcaggagtttggtgctgacgtccgattgatgttctccaactgctataagtacaaccctcctgaccatgaggtggtggccatggcccgcaagctccaggatgtgttcgaaatgcgctttgccaagatgccggacgagcctgaggagccagtggtggccgtgtcctccccggcagtgccccctcccaccaaggttgtggccccgccctcatccagcgacagcagcagcgatagctcctcggacagtgacagttcgactgatgactctgaggaggagcgagcccagcggctggctgagctccaggagcagctcaaagccgtgcacgagcagcttgcagccctctctcagccccagcagaacaaaccaaagaaaaaggagaaagacaagaaggaaaagaaaaaagaaaagcacaaaaggaaagaggaagtggaagagaataaaaaaagcaaagccaaggaacctcctcctaaaaagacgaagaaaaataatagcagcaacagcaatgtgagcaagaaggagccagcgcccatgaagagcaagccccctcccacgtatgagtcggaggaagaggacaagtgcaagcctatgtcctatgaggagaagcggcagctcagcttggacatcaacaagctccccggcgagaagctgggccgcgtggtgcacatcatccagtcacgggagccctccctgaagaattccaaccccgacgagattgaaatcgactttgagaccctgaagccgtccacactgcgtgagctggagcgctatgtcacctcctgtttgcggaagaaaaggaaacctcaagctgagaaagttgatgtgattgccggctcctccaagatgaagggcttctcgtcctcagagtcggagagctccagtgagtccagctcctctgacagcgaagactccgaaacagagatggctccgaagtcaaaaaagaaggggcaccccgggagggagcagaagaagcaccatcatcaccaccatcagcagatgcagcaggccccggctcctgtgccccagcagccgcccccgcctccccagcagcccccaccgcctccacctccgcagcagcaacagcagccgccacccccgcctcccccaccctccatgccgcagcaggcagccccggcgatgaagtcctcgcccccacccttcattgccacccaggtgcccgtcctggagccccagctcccaggcagcgtctttgaccccatcggccacttcacccagcccatcctgcacctgccgcagcctgagctgccccctcacctgccccagccgcctgagcacagcactccaccccatctcaaccagcacgcagtggtctctcctccagctttgcacaacgcactaccccagcagccatcacggcccagcaaccgagccgctgccctgcctcccaagcccgcccggcccccagccgtgtcaccagccttgacccaaacacccctgctcccacagccccccatggcccaacccccccaagtgctgctggaggatgaagagccacctgccccacccctcacctccatgcagatgcagctgtacctgcagcagctgcagaaggtgcagccccctacgccgctactcccttccgtgaaggtgcagtcccagcccccaccccccctgccgcccccaccccacccctctgtgcagcagcagctgcagcagcagccgccaccacccccaccaccccagccccagcctccaccccagcagcagcatcagccccctccacggcccgtgcacttgcagcccatgcagttttccacccacatccaacagcccccgccaccccagggccagcagcccccccatccgcccccaggccagcagccacccccgccgcagcctgccaagcctcagcaagtcatccagcaccaccattcaccccggcaccacaagtcggacccctactcaaccggtcacctccgcgaagccccctccccgcttatgatacattccccccagatgtcacagttccagagcctgacccaccagtctccaccccagcaaaacgtccagcctaagaaacaggagctgcgtgctgcctccgtggtccagccccagcccctcgtggtggtgaaggaggagaagatccactcacccatcatccgcagcgagcccttcagcccctcgctgcggccggagccccccaagcacccggagagcatcaaggcccccgtccacctgccccagcggccggaaatgaagcctgtggatgtcgggaggcctgtgatccggcccccagagcagaacgcaccgccaccaggggcccctgacaaggacaaacagaaacaggagccgaagactccagttgcgcccaaaaaggacctgaaaatcaagaacatgggctcctgggccagcctagtgcagaagcatccgaccaccccctcctccacagccaagtcatccagcgacagcttcgagcagttccgccgcgccgctcgggagaaagaggagcgtgagaaggccctgaaggctcaggccgagcacgctgagaaggagaaggagcggctgcggcaggagcgcatgaggagccgagaggacgaggatgcgctggagcaggcccggcgggcccatgaggaggcacgtcggcgccaggagcagcagcagcagcagcgccaggagcaacagcagcagcagcaacagcaagcagctgcggtggctgccgccgccaccccacaggcccagagctcccagccccagtccatgctggaccagcagagggagttggcccggaagcgggagcaggagcgaagacgccgggaagccatggcagctaccattgacatgaatttccagagtgatctattgtcaatatttgaagaaaatcttttctgagcgcacctaggtggcttctgactttgattttctggcaaaacattgactttccatagtgttaggggcggtggtggaggtgggatcagcggccaggggatgcctcagggcctggccctcctgcatgctatgcccggggcaggcctgacgggcagctgaggattgcagagcctgtctgccttacggccagtcggacagacgtcccgccacccaccacccctcacaggacgtccgctcagcacacgccttgttacgagcaagtgccggctggacccaagccctgcatccccacatgcggggcagaggcccttctctccgccaaatgtctacacagtatacacaggacatcgttgctgccgccgtgactggttttctgtccccaagaacgtgacgttcgtgatgtcctgcccgccgggagtctttccccacaccccagccatcgccgcccgctcccaggaggccagggcaggcctgcgtgggctggaggcgggcgaggccggcccaccccctcgctggcactgactttgccttgaacagaccccccgaccctcccccacaagcctttaattgagagccgctctctgtaagtgtttgcttgtgcaaaagggaatagtgccgtggaggtgtgtgtgtccatggcatccggagcgaggcgactgtcctgcgtgggtagccctcggccggggagtgaggccaccaaccaaagtcagttccttcccacctgtgtttctgtttcgtttttttttttcttttttttctatatatattttttgttgaattctattttatttttaattctctcttctcctccagacacaatggcactgcttatctccgaaatggtgtgatcgtctcctcattgagcagcggctgccaccgcgctgtgggta

SEQ ID NO: 3794 - DNA, 3235 bp, Homo sapiens
  source 1..3235: mol_type = unassigned DNA
gacgtcagtgcgctggcggcggcggcggcggcggcggcggcggctgggctgtttgttctggtctcccgcagccgaggagccgaagcagtggcggcggcagcggctgcggcggctgccggcggtgcccgcgggcgagcgcggcctgtgagctcggcagagcggcgggcgggccccggcgccgcgcaggcagctcggggagggggcggcggcagcgggcggacggccggcgggggcggcgtgcggcctagcgtctcagagtgcctggtgaagaatgtgatgggatcactagcatgtctgcggagagcggccctgggacgagattgagaaatctgccagtaatgggggatggactagaaacttcccaaatgtctacaacacaggcccaggcccaaccccagccagccaacgcagccagcaccaaccccccgcccccagagacctccaaccctaacaagcccaagaggcagaccaaccaactgcaatacctgctcagagtggtgctcaagacactatggaaacaccagtttgcatggcctttccagcagcctgtggatgccgtcaagctgaacctccctgattactataagatcattaaaacgcctatggatatgggaacaataaagaagcgcttggaaaacaactattactggaatgctcaggaatgtatccaggacttcaacactatgtttacaaattgttacatctacaacaagcctggagatgacatagtcttaatggcagaagctctggaaaagctcttcttgcaaaaaataaatgagctacccacagaagaaaccgagatcatgatagtccaggcaaaaggaagaggacgtgggaggaaagaaacagggacagcaaaacctggcgtttccacggtaccaaacacaactcaagcatcgactcctccgcagacccagacccctcagccgaatcctcctcctgtgcaggccacgcctcaccccttccctgccgtcaccccggacctcatcgtccagacccctgtcatgacagtggtgcctccccagccactgcagacgcccccgccagtgcccccccagccacaacccccacccgctccagctccccagcccgtacagagccacccacccatcatcgcggccaccccacagcctgtgaagacaaagaagggagtgaagaggaaagcagacaccaccacccccaccaccattgaccccattcacgagccaccctcgctgcccccggagcccaagaccaccaagctgggccagcggcgggagagcagccggcctgtgaaacctccaaagaaggacgtgcccgactctcagcagcacccagcaccagagaagagcagcaaggtctcggagcagctcaagtgctgcagcggcatcctcaaggagatgtttgccaagaagcacgccgcctacgcctggcccttctacaagcctgtggacgtggaggcactgggcctacacgactactgtgacatcatcaagcaccccatggacatgagcacaatcaagtctaaactggaggcccgtgagtaccgtgatgctcaggagtttggtgctgacgtccgattgatgttctccaactgctataagtacaaccctcctgaccatgaggtggtggccatggcccgcaagctccaggatgtgttcgaaatgcgctttgccaagatgccggacgagcctgaggagccagtggtggccgtgtcctccccggcagtgccccctcccaccaaggttgtggccccgccctcatccagcgacagcagcagcgatagctcctcggacagtgacagttcgactgatgactctgaggaggagcgagcccagcggctggctgagctccaggagcagctcaaagccgtgcacgagcagcttgcagccctctctcagccccagcagaacaaaccaaagaaaaaggagaaagacaagaaggaaaagaaaaaagaaaagcacaaaaggaaagaggaagtggaagagaataaaaaaagcaaagccaaggaacctcctcctaaaaagacgaagaaaaataatagcagcaacagcaatgtgagcaagaaggagccagcgcccatgaagagcaagccccctcccacgtatgagtcggaggaagaggacaagtgcaagcctatgtcctatgaggagaagcggcagctcagcttggacatcaacaagctccccggcgagaagctgggccgcgtggtgcacatcatccagtcacgggagccctccctgaagaattccaaccccgacgagattgaaatcgactttgagaccctgaagccgtccacactgcgtgagctggagcgctatgtcacctcctgtttgcggaagaaaaggaaacctcaagctgagaaagttgatgtgattgccggctcctccaagatgaagggcttctcgtcctcagagtcggagagctccagtgagtccagctcctctgacagcgaagactccgaaacagctttctgcaccagtggagacttcgtgtccccagggccttccccgtatcacagtcacgtgcagtgcggccgcttcagggagatgcttcgctggtttctggtggatgtggagcagactgcagctggccagccgcatcgccagtctgctgctggccctgccatcacctgggccccagccattgcctacccctccccagagtgtgctcgttgctgtgttggctgctcctgaatctgccctaactccacacgcacctggacttgcgtgtccctcctgcagttctaactaacagtcccttcttttcaagccccgtgggtctgcacgttggaccctgggttccccattagagcccaccttctgagcagcagcctcagtgggaggtggaggcaggtagtgatgctgggtgccaggtgggagtggagaggggactgctctcctccaagtgtgcactttcctcattattctcaggggcgcagatgctcaggctggcgcaggggagaggctagggagggagccatggtgcccagaaggcctggcgaccagcccctgctgagagatggagctaacatcctgtgtttacggccaacggggttgccgctaggctggtgcagctgtcagtgagctggcgtgctgcagaccacctgagagctggccctagggtctcaggcagactggggagtggggatccacagtgggaaacctgtgttttggcagtagactcctgcatgttctcccacgggcctgtcccatccctgggattttattctaactagaaataaatgctaaccctc

SEQ ID NO: 3795 - DNA, 4635 bp, Homo sapiens
  source 1..4635: mol_type = unassigned DNA
attctttggaatactactgctagaagtctgacttaagacccagcttatgggccacatggcacccagctgcttctgcagagaaggcaggccactgatgggtacagcaaagtgtggtgctgctggccaagccaaagacccgtgtaggatgactgggcctctgccccttgtgggtgttgccactgtgcttgagtgcctggtgaagaatgtgatgggatcactagcatgtctgcggagagcggccctgggacgagattgagaaatctgccagtaatgggggatggactagaaacttcccaaatgtctacaacacaggcccaggcccaaccccagccagccaacgcagccagcaccaaccccccgcccccagagacctccaaccctaacaagcccaagaggcagaccaaccaactgcaatacctgctcagagtggtgctcaagacactatggaaacaccagtttgcatggcctttccagcagcctgtggatgccgtcaagctgaacctccctgattactataagatcattaaaacgcctatggatatgggaacaataaagaagcgcttggaaaacaactattactggaatgctcaggaatgtatccaggacttcaacactatgtttacaaattgttacatctacaacaagcctggagatgacatagtcttaatggcagaagctctggaaaagctcttcttgcaaaaaataaatgagctacccacagaagaaaccgagatcatgatagtccaggcaaaaggaagaggacgtgggaggaaagaaacagggacagcaaaacctggcgtttccacggtaccaaacacaactcaagcatcgactcctccgcagacccagacccctcagccgaatcctcctcctgtgcaggccacgcctcaccccttccctgccgtcaccccggacctcatcgtccagacccctgtcatgacagtggtgcctccccagccactgcagacgcccccgccagtgcccccccagccacaacccccacccgctccagctccccagcccgtacagagccacccacccatcatcgcggccaccccacagcctgtgaagacaaagaagggagtgaagaggaaagcagacaccaccacccccaccaccattgaccccattcacgagccaccctcgctgcccccggagcccaagaccaccaagctgggccagcggcgggagagcagccggcctgtgaaacctccaaagaaggacgtgcccgactctcagcagcacccagcaccagagaagagcagcaaggtctcggagcagctcaagtgctgcagcggcatcctcaaggagatgtttgccaagaagcacgccgcctacgcctggcccttctacaagcctgtggacgtggaggcactgggcctacacgactactgtgacatcatcaagcaccccatggacatgagcacaatcaagtctaaactggaggcccgtgagtaccgtgatgctcaggagtttggtgctgacgtccgattgatgttctccaactgctataagtacaaccctcctgaccatgaggtggtggccatggcccgcaagctccaggatgtgttcgaaatgcgctttgccaagatgccggacgagcctgaggagccagtggtggccgtgtcctccccggcagtgccccctcccaccaaggttgtggccccgccctcatccagcgacagcagcagcgatagctcctcggacagtgacagttcgactgatgactctgaggaggagcgagcccagcggctggctgagctccaggagcagctcaaagccgtgcacgagcagcttgcagccctctctcagccccagcagaacaaaccaaagaaaaaggagaaagacaagaaggaaaagaaaaaagaaaagcacaaaaggaaagaggaagtggaagagaataaaaaaagcaaagccaaggaacctcctcctaaaaagacgaagaaaaataatagcagcaacagcaatgtgagcaagaaggagccagcgcccatgaagagcaagccccctcccacgtatgagtcggaggaagaggacaagtgcaagcctatgtcctatgaggagaagcggcagctcagcttggacatcaacaagctccccggcgagaagctgggccgcgtggtgcacatcatccagtcacgggagccctccctgaagaattccaaccccgacgagattgaaatcgactttgagaccctgaagccgtccacactgcgtgagctggagcgctatgtcacctcctgtttgcggaagaaaaggaaacctcaagctgagaaagttgatgtgattgccggctcctccaagatgaagggcttctcgtcctcagagtcggagagctccagtgagtccagctcctctgacagcgaagactccgaaacaggtcctgcctaatcattggacacggactcttaataaaacggtcttcagttccagattccttcccagcaagctatagcttaagtccattttcttccgtgaaagggacaggactccatcaagttatggaattcctcagagccctgggcctgtcccccggggtggattagtcatgtccagcagcacacgcctagtcccgccttcgggaaggctgcctgcctggccagccgcccaggcctctctgtgtaaagactgcctggctgtcctgcccagccttcctggttctctggggtcctctgggtgggtggcatctcctggagggtgatgacaatccccaacacatgcattcatgtggtgctactctgtgtgcaaagccagaccccaagtatgttttctctctttgtcccatccctctttttctgggactttggaccctaactacttccctcctgaaccttgcagtgacatcagtccaggagagctctcgttcagtgtgcggaagaacactctgacctctagagctgtcctagataaggagtgggagctttagaggcaaggcctctagaccctggaaggctcagtgaggctcttcccacagcatgcttctcactggtgccctgtaaggctcgagccaccgctgactctgagccttttggagtctttcctccttcgtctccattgttcccgtgcatttccaaaagcttaagttgcctggtgggcatttccccagtttctttggcctccgtcttctcaagtcacatagggaaagtacctcctggaaccaggctgcagtatgcaggacctgccaggcaggcactggtgaagggccttgggcctatcatccccccaaccccacctcaccccacccgcctcctctagtggggtgagtctgggctggtggaccagagagggtgtcacagaccctcagggactgccccatggacacctctgactggtgttaacagtgtgaacattttccccgtcttcagtcccttagaatgacgacagcccctggggttggggcaggcgagtgtggccacatcatccaagccctcccagagacacaaataggcttttttgctctaaaaataaataccagcccttttttggtcacaaatccagcatctcagcagaaaactgcctgacatgaaaagtcccctgaggaactgcatctgcgtttcaggggcttttcattttttctccttttttaaagtgtagattgtgggtgcttcctagaggcctgccttcttctggaactggaagtgggctatcaccatgggcaagcccttgggtgcaggctccccacctgcctgggaactctggcagctctcctcagctccttgggcttgagcagctgcaactgccccagatttgctgtggaagcaggggctagccctggcctcaccagggcctcccggggccctgcattgatgctcaggagttcctgggctgctcttgatcctttctgggcatccagcttccagttaagctctgtttgccaaacaaactattctcagctgccctttggcctgcgcctgatgtgttcctgttgcagtcccgcctgcctgagacaggagcaggcaggagagccttcatgcccagattcccacaggacaattggggagctgctggcattgtctttctgggaagattctgctttcttggaccaaatggcagcctgattaccagtgtcgggcctgcatgctgcccccgacacacgcacgcacgcgcacacacgtgtgcacatgggccatagccacaagccagctctcctccagggtcctttcaacctcgctgtccagggaccctgtccttcttgcccgtggggcttccatctggcagagaacgttcagggcttgttgaacttgaaagctcattagacttaagctgtcacctgtgcttggtgccccaggaacagccagagaggacagtgcccactcacttcttgttggcagcctcctgtgcaggaagtgccagccgggcctcgacgcaccagctggctgtgggtcctgaggaggggcgggaggcggccgctcagtgcagatggggactcctctcctctgccctgaccttaccctccattacctccttcactggagtggggctggggggtgggtggaatcagtgttttaatcggatttttaaaaaacattttatttctttgtacaattaccatcctatgtaaagatgaaatttgtgttgagttgaagattgtcatggaataaagatcacaccgtacttgaggccatcttcatgtaa

SEQ ID NO: 3796 - DNA, 3696 bp, Homo sapiens
  source 1..3696: mol_type = unassigned DNA
tataaaagcgcctgtcgcgcgaccgccattacaacaaaaactggcggcgaggaactgcggagaactgttgccctgcaccgcttcattttgtgcagcctgaaaggggcaatcacataaggtcggttttgtaatatacaggtaacatacaggtaatgtaccctccacagggggtgctgccttaggccggccccgaggtgcggccttgggtgggaacaaccgttttttcccccctctcccctccccgaccccatcaacatcgtgcgacagtccgggcagttgagaaggccaccccgcttcgtgcctgcagcccagttcctcttaggtcttggactggtgtggatcgctgctgcctgtactgtaattttggaaatgcaggagaaagtacggagcgtttagctttagctggcattttgtgtttattctgcaagtggtcatttgggacggggaagttcgggttcttgcttcatttatttattcaattaactttattaagcccctggaacgtctgaaccctcttttgggtactgcaggattgtggtgggctttacttcaaggcgcgctggcctgtattaagaattaagatagaggaggccgggtgcagtggctcgcccctgtaatctcagcactttcggaggccgaggcaagtggatcacctgaggtcaggagttcaagaccagcctggccaacataatgaaatgcccatctctaccaaaaatacaaaaattagctgggtgtgatggcaggcgcctgtagtcccagctactcgggaggctgaggcaggagaatcgcttgaacccaggaggcggaagttgcagtgcgccgagatcacgccagtgcactccagcctgggcgacagagtgagactccgtctccccgctccccccaaaaaagaaagaggattattataccattataaaaaacccaatggatttaaatacaattaagaagcgcttggagaataaatattatgcgaaggcttcagaatgtatagaagacttcaatacaatgttctcaaattgttatttatataacaagcctggagatgacattgttcttatggcacaagctctagagaagctgtttatgcagaaattatctcagatgccacaagaagagcaagttgtgggtgttaaggaaagaatcaagaaaggcactcaacagaatatagctgtttcttctgctaaagaaaaatcatcacccagcgcaacagaaaaagtatttaagcagcaagaaattccttctgtatttcctaagacatctatttctcccttgaacgtggtacagggagcttcagtcaactccagttcacaaactgcggcccaagttacaaaaggtgtgaagaggaaagcagatacaacaactcctgcaacttcagcagttaaagcaagtagtgaattttctccaacattcacagaaaaatcagtggcactgccacctataaaagaaaatatgccaaagaatgttttgccagattctcagcaacaatataatgttgtgaagactgttaaagtaactgaacaattaaggcactgtagtgagattcttaaagaaatgcttgcaaagaaacatttttcatatgcatggcccttttataatcctgttgacgttaatgctttgggactccataactactatgacgttgtcaaaaatccgatggatcttggaactattaaggagaaaatggataaccaagaatataaggatgcatacaaatttgcggcagatgttagattaatgttcatgaattgctacaagtacaatcctccagatcacgaagttgtgacaatggcaagaatgcttcaggatgttttcgaaacgcatttttcaaagatcccgattgaacctgttgagagtatgcctttatgttacatcaaaacagatatcacagaaaccactggtagagagaacactaatgaagcctcctctgaagggaactcttctgatgattctgaagatgagcgagttaagcgtcttgcaaagcttcaggagcagcttaaagctgtacatcaacagctccaggttttgtcccaagtacctttccgtaagctaaataaaaagaaagagaagtctaaaaaggaaaagaaaaaagaaaaggttaataacagcaatgaaaatccaagaaaaatgtgtgagcaaatgaggctaaaggaaaagtccaagagaaatcagccaaagaaaaggaaacaacagttcattggtctaaaatctgaagatgaagataatgctaaacctatgaactatgatgagaaaaggcagttaagtctgaatataaacaaactccctggagataaacttgggcgagtagttcacataatacaatcaagagagccttctctgagcaattccaatcctgatgagatagagatagactttgaaacactgaaagcatcaacactaagagaattagaaaaatatgtttcggcatgtctaagaaagagaccattaaaacctcctgctaagaaaataatgatgtccaaagaagaacttcactcacagaaaaaacaggaattggaaaagcggttactggatgttaataatcagttaaattctagaaaacgtcaaacaaaatctgataaaacgcaaccatccaaagctgttgaaaatgtttcccgactgagtgagagcagcagcagcagcagcagctcatcagagtctgaaagtagcagcagtgacttaagctcttcagacagcagtgattctgaatcagaaatgttccctaagtttacagaagtaaaaccaaatgattctccttctaaagagaatgtaaagaaaatgaagaatgaatgcataccgcctgaaggaagaacaggcgtcacacagataggatattgtgtgcaagacacaacctctgccaatactacccttgttcatcagaccacaccttcacatgtaatgccaccaaatcaccaccaattagcatttaattatcaagaattagaacatttacagactgtgaaaaacatttcacctttacaaattctgcctccctcaggtgattctgaacagctctcaaatggcataactgtgatgcatccatctggtgatagtgacacaacgatgttagaatctgaatgtcaagctcctgtacagaaggatataaagattaagaatgcagattcatggaaaagtttaggcaaaccagtgaaaccatcaggtgtaatgaaatcctcagatgagctcttcaaccaatttagaaaagcagccatagaaaaggaagtaaaagctcggacacaggaactcatacggaagcatttggaacaaaatacaaaggaactaaaagcatctcaagaaaatcagagggatcttgggaatggattgactgtagaatctttttcaaataaaatacaaaacaagtgctctggagaagagcagaaagaacatcagcagtcatcagaagctcaagataaatccaaactctggcttctcaaagaccgtgatttagcaaggcagaaagaacaagagaggaggaggagagaagcaatggtgggtaccattgatatgacccttcaaagtgacattatgacaatgtttgaaaacaactttgattaaaactcagtttttaaattaaccatcaacttaaaatgaatggtaaaagatcaaaatgcatatggtaaaatgattgctttcagataacaagataccaatcttatattgtattttgactgctctaaaatgattaaacagttttcacttaca

SEQ ID NO: 3797 - DNA, 534 bp, Homo sapiens
  source 1..534: mol_type = unassigned DNA
acaacaaaaactggcggcgaggaactgcggagaactgttgccctgcaccgcttcattttgtgcagcctgaaaggggcaatcacataaggattgtggtgggctttacttcaaggcgcgctggcctgtattaagaattaagatagaggaggccgggtgcagtggctcgcccctgtaatctcagcactttcggaggccgaggcaagtggatcacctgaggtcaggagttcaagaccagcctggccaacataatgaaatgcccatctctaccaaaaatacaaaaattagctgggtgtgatggcaggcgcctgtagtcccagctactcgggaggctgaggcaggagaatcgcttgaacccaggaggcggaagttgcagtgcgccgagatcacgccagtgcactccagcctgggcgacagagtgagactccgtctccccgctccccccaaaaaagaaagaggacatgtacttgtagacaggattcaaagcagttaagaatgtctctgccaagtcgacaaacagctattattgttaaccct

SEQ ID NO: 3798 - DNA, 3409 bp, Homo sapiens
  source 1..3409: mol_type = unassigned DNA
tataaaagcgcctgtcgcgcgaccgccattacaacaaaaactggcggcgaggaactgcggagaactgttgccctgcaccgcttcattttgtgcagcctgaaaggggcaatcacataaggtcggttttgtaatatacaggtaacatacaggtaatgtaccctccacagggggtgctgccttaggccggccccgaggtgcggccttgggtgggaacaaccgttttttcccccctctcccctccccgaccccatcaacatcgtgcgacagtccgggcagttgagaaggccaccccgcttcgtgcctgcagcccagttcctcttaggtcttggactggtgtggatcgctgctgcctgtactgtaattttggaaatgcaggagaaagacatgtacttgtagacaggattcaaagcagttaagaatgtctctgccaagtcgacaaacagctattattgttaaccctcctccaccagaatatataaatactaagaaaaatgggcgattgacaaatcaacttcagtatctacaaaaagttgtcctaaaggatttatggaagcatagtttttcatggccctttcaacgtcctgtggatgctgtgaaactacagttgcctgattattataccattataaaaaacccaatggatttaaatacaattaagaagcgcttggagaataaatattatgcgaaggcttcagaatgtatagaagacttcaatacaatgttctcaaattgttatttatataacaagcctggagatgacattgttcttatggcacaagctctagagaagctgtttatgcagaaattatctcagatgccacaagaagagcaagttgtgggtgttaaggaaagaatcaagaaaggcactcaacagaatatagctgtttcttctgctaaagaaaaatcatcacccagcgcaacagaaaaagtatttaagcagcaagaaattccttctgtatttcctaagacatctatttctcccttgaacgtggtacagggagcttcagtcaactccagttcacaaactgcggcccaagttacaaaaggtgtgaagaggaaagcagatacaacaactcctgcaacttcagcagttaaagcaagtagtgaattttctccaacattcacagaaaaatcagtggcactgccacctataaaagaaaatatgccaaagaatgttttgccagattctcagcaacaatataatgttgtgaagactgttaaagtaactgaacaattaaggcactgtagtgagattcttaaagaaatgcttgcaaagaaacatttttcatatgcatggcccttttataatcctgttgacgttaatgctttgggactccataactactatgacgttgtcaaaaatccgatggatcttggaactattaaggagaaaatggataaccaagaatataaggatgcatacaaatttgcggcagatgttagattaatgttcatgaattgctacaagtacaatcctccagatcacgaagttgtgacaatggcaagaatgcttcaggatgttttcgaaacgcatttttcaaagatcccgattgaacctgttgagagtatgcctttatgttacatcaaaacagatatcacagaaaccactggtagagagaacactaatgaagcctcctctgaagggaactcttctgatgattctgaagatgagcgagttaagcgtcttgcaaagcttcaggagcagcttaaagctgtacatcaacagctccaggttttgtcccaagtacctttccgtaagctaaataaaaagaaagagaagtctaaaaaggaaaagaaaaaagaaaaggttaataacagcaatgaaaatccaagaaaaatgtgtgagcaaatgaggctaaaggaaaagtccaagagaaatcagccaaagaaaaggaaacaacagttcattggtctaaaatctgaagatgaagataatgctaaacctatgaactatgatgagaaaaggcagttaagtctgaatataaacaaactccctggagataaacttgggcgagtagttcacataatacaatcaagagagccttctctgagcaattccaatcctgatgagatagagatagactttgaaacactgaaagcatcaacactaagagaattagaaaaatatgtttcggcatgtctaagaaagagaccattaaaacctcctgctaagaaaataatgatgtccaaagaagaacttcactcacagaaaaaacaggaattggaaaagcggttactggatgttaataatcagttaaattctagaaaacgtcaaacaaaatctgataaaacgcaaccatccaaagctgttgaaaatgtttcccgactgagtgagagcagcagcagcagcagcagctcatcagagtctgaaagtagcagcagtgacttaagctcttcagacagcagtgattctgaatcagaaatgttccctaagtttacagaagtaaaaccaaatgattctccttctaaagagaatgtaaagaaaatgaagaatgaatgcataccgcctgaaggaagaacaggcgtcacacagataggatattgtgtgcaagacacaacctctgccaatactacccttgttcatcagaccacaccttcacatgtaatgccaccaaatcaccaccaattagcatttaattatcaagaattagaacatttacagactgtgaaaaacatttcacctttacaaattctgcctccctcaggtgattctgaacagctctcaaatggcataactgtgatgcatccatctggtgatagtgacacaacgatgttagaatctgaatgtcaagctcctgtacagaaggatataaagattaagaatgcagattcatggaaaagtttaggcaaaccagtgaaaccatcaggtgtaatgaaatcctcagatgagctcttcaaccaatttagaaaagcagccatagaaaaggaagtaaaagctcggacacaggaactcatacggaagcatttggaacaaaatacaaaggaactaaaagcatctcaagaaaatcagagggatcttgggaatggattgactgtagaatctttttcaaataaaatacaaaacaagtgctctggagaagagcagaaagaacatcagcagtcatcagaagctcaagataaatccaaactctggcttctcaaagaccgtgatttagcaaggcagaaagaacaagagaggaggaggagagaagcaatggtgggtaccattgatatgacccttcaaagtgacattatgacaatgtttgaaaacaactttgattaaaactcagtttttaaattaaccatcaacttaaaatgaatggtaaaagatcaaaatgcatatggtaaaatgattgctttcagataacaagataccaatcttatattgtattttgactgctctaaaatgattaaacagttttcacttaca

SEQ ID NO: 3799 - DNA, 3004 bp, Homo sapiens
  source 1..3004: mol_type = unassigned DNA
ataaaagcgcctgtcgcgcgaccgccattacaacaaaaactggcggcgaggaactgcggagaactgttgccctgcaccgcttcattttgtgcagcctgaaaggggcaatcacataaggacatgtacttgtagacaggattcaaagcagttaagaatgtctctgccaagtcgacaaacagctattattgttaaccctcctccaccagaatatataaatactaagaaaaatgggcgattgacaaatcaacttcagtatctacaaaaagttgtcctaaaggatttatggaagcatagtttttcatggccctttcaacgtcctgtggatgctgtgaaactacagttgcctcctggagatgacattgttcttatggcacaagctctagagaagctgtttatgcagaaattatctcagatgccacaagaagagcaagttgtgggtgttaaggaaagaatcaagaaaggcactcaacagaatatagctgtttcttctgctaaagaaaaatcatcacccagcgcaacagaaaaagtatttaagcagcaagaaattccttctgtatttcctaagacatctatttctcccttgaacgtggtacagggagcttcagtcaactccagttcacaaactgcggcccaagttacaaaaggtgtgaagaggaaagcagatacaacaactcctgcaacttcagcagttaaagcaagtagtgaattttctccaacattcacagaaaaatcagtggcactgccacctataaaagaaaatatgccaaagaatgttttgccagattctcagcaacaatataatgttgtgaagactgttaaagtaactgaacaattaaggcactgtagtgagattcttaaagaaatgcttgcaaagaaacatttttcatatgcatggcccttttataatcctgttgacgttaatgctttgggactccataactactatgacgttgtcaaaaatccgatggatcttggaactattaaggagaaaatggataaccaagaatataaggatgcatacaaatttgcggcagatgttagattaatgttcatgaattgctacaagtacaatcctccagatcacgaagttgtgacaatggcaagaatgcttcaggatgttttcgaaacgcatttttcaaagatcccgattgaacctgttgagagtatgcctttatgttacatcaaaacagatatcacagaaaccactggtagagagaacactaatgaagcctcctctgaagggaactcttctgatgattctgaagatgagcgagttaagcgtcttgcaaagcttcaggagcagcttaaagctgtacatcaacagctccaggttttgtcccaagtacctttccgtaagctaaataaaaagaaagagaagtctaaaaaggaaaagaaaaaagaaaaggttaataacagcaatgaaaatccaagaaaaatgtgtgagcaaatgaggctaaaggaaaagtccaagagaaatcagccaaagaaaaggaaacaacagttcattggtctaaaatctgaagatgaagataatgctaaacctatgaactatgatgagaaaaggcagttaagtctgaatataaacaaactccctggagataaacttgggcgagtagttcacataatacaatcaagagagccttctctgagcaattccaatcctgatgagatagagatagactttgaaacactgaaagcatcaacactaagagaattagaaaaatatgtttcggcatgtctaagaaagagaccattaaaacctcctgctaagaaaataatgatgtccaaagaagaacttcactcacagaaaaaacaggaattggaaaagcggttactggatgttaataatcagttaaattctagaaaacgtcaaacaaaatctgataaaacgcaaccatccaaagctgttgaaaatgtttcccgactgagtgagagcagcagcagcagcagcagctcatcagagtctgaaagtagcagcagtgacttaagctcttcagacagcagtgattctgaatcagaaatgttccctaagtttacagaagtaaaaccaaatgattctccttctaaagagaatgtaaagaaaatgaagaatgaatgcataccgcctgaaggaagaacaggcgtcacacagataggatattgtgtgcaagacacaacctctgccaatactacccttgttcatcagaccacaccttcacatgtaatgccaccaaatcaccaccaattagcatttaattatcaagaattagaacatttacagactgtgaaaaacatttcacctttacaaattctgcctccctcaggtgattctgaacagctctcaaatggcataactgtgatgcatccatctggtgatagtgacacaacgatgttagaatctgaatgtcaagctcctgtacagaaggatataaagattaagaatgcagattcatggaaaagtttaggcaaaccagtgaaaccatcaggtgtaatgaaatcctcagatgagctcttcaaccaatttagaaaagcagccatagaaaaggaagtaaaagctcggacacaggaactcatacggaagcatttggaacaaaatacaaaggaactaaaagcatctcaagaaaatcagagggatcttgggaatggattgactgtagaatctttttcaaataaaatacaaaacaagtgctctggagaagagcagaaagaacatcagcagtcatcagaagctcaagataaatccaaactctggcttctcaaagaccgtgatttagcaaggcagaaagaacaagagaggaggaggagagaagcaatggtgggtaccattgatatgacccttcaaagtgacattatgacaatgtttgaaaacaactttgattaaaactcagtttttaaattaaccatcaacttaaaatgaatggtaaaagatcaaaatgcatatggtaaaatgattgctttcagataacaagataccaatcttatattgtattttgactgctctaaaatgattaaacagttttcactt

SEQ ID NO: 3800 - DNA, 3345 bp, Homo sapiens
  source 1..3345: mol_type = unassigned DNA
tataaaagcgcctgtcgcgcgaccgccattacaacaaaaactggcggcgaggaactgcggagaactgttgccctgcaccgcttcattttgtgcagcctgaaaggggcaatcacataaggtcggttttgtaatatacaggtaacatacaggtaatgtaccctccacagggggtgctgccttaggccggccccgaggtgcggccttgggtgggaacaaccgttttttcccccctctcccctccccgaccccatcaacatcgtgcgacagtccgggcagttgagaaggccaccccgcttcgtgcctgcagcccaggacatgtacttgtagacaggattcaaagcagttaagaatgtctctgccaagtcgacaaacagctattattgttaaccctcctccaccagaatatataaatactaagaaaaatgggcgattgacaaatcaacttcagtatctacaaaaagttgtcctaaaggatttatggaagcatagtttttcatggccctttcaacgtcctgtggatgctgtgaaactacagttgcctgattattataccattataaaaaacccaatggatttaaatacaattaagaagcgcttggagaataaatattatgcgaaggcttcagaatgtatagaagacttcaatacaatgttctcaaattgttatttatataacaagcctggagatgacattgttcttatggcacaagctctagagaagctgtttatgcagaaattatctcagatgccacaagaagagcaagttgtgggtgttaaggaaagaatcaagaaaggcactcaacagaatatagctgtttcttctgctaaagaaaaatcatcacccagcgcaacagaaaaagtatttaagcagcaagaaattccttctgtatttcctaagacatctatttctcccttgaacgtggtacagggagcttcagtcaactccagttcacaaactgcggcccaagttacaaaaggtgtgaagaggaaagcagatacaacaactcctgcaacttcagcagttaaagcaagtagtgaattttctccaacattcacagaaaaatcagtggcactgccacctataaaagaaaatatgccaaagaatgttttgccagattctcagcaacaatataatgttgtgaagactgttaaagtaactgaacaattaaggcactgtagtgagattcttaaagaaatgcttgcaaagaaacatttttcatatgcatggcccttttataatcctgttgacgttaatgctttgggactccataactactatgacgttgtcaaaaatccgatggatcttggaactattaaggagaaaatggataaccaagaatataaggatgcatacaaatttgcggcagatgttagattaatgttcatgaattgctacaagtacaatcctccagatcacgaagttgtgacaatggcaagaatgcttcaggatgttttcgaaacgcatttttcaaagatcccgattgaacctgttgagagtatgcctttatgttacatcaaaacagatatcacagaaaccactggtagagagaacactaatgaagcctcctctgaagggaactcttctgatgattctgaagatgagcgagttaagcgtcttgcaaagcttcaggagcagcttaaagctgtacatcaacagctccaggttttgtcccaagtacctttccgtaagctaaataaaaagaaagagaagtctaaaaaggaaaagaaaaaagaaaaggttaataacagcaatgaaaatccaagaaaaatgtgtgagcaaatgaggctaaaggaaaagtccaagagaaatcagccaaagaaaaggaaacaacagttcattggtctaaaatctgaagatgaagataatgctaaacctatgaactatgatgagaaaaggcagttaagtctgaatataaacaaactccctggagataaacttgggcgagtagttcacataatacaatcaagagagccttctctgagcaattccaatcctgatgagatagagatagactttgaaacactgaaagcatcaacactaagagaattagaaaaatatgtttcggcatgtctaagaaagagaccattaaaacctcctgctaagaaaataatgatgtccaaagaagaacttcactcacagaaaaaacaggaattggaaaagcggttactggatgttaataatcagttaaattctagaaaacgtcaaacaaaatctgataaaacgcaaccatccaaagctgttgaaaatgtttcccgactgagtgagagcagcagcagcagcagcagctcatcagagtctgaaagtagcagcagtgacttaagctcttcagacagcagtgattctgaatcagaaatgttccctaagtttacagaagtaaaaccaaatgattctccttctaaagagaatgtaaagaaaatgaagaatgaatgcataccgcctgaaggaagaacaggcgtcacacagataggatattgtgtgcaagacacaacctctgccaatactacccttgttcatcagaccacaccttcacatgtaatgccaccaaatcaccaccaattagcatttaattatcaagaattagaacatttacagactgtgaaaaacatttcacctttacaaattctgcctccctcaggtgattctgaacagctctcaaatggcataactgtgatgcatccatctggtgatagtgacacaacgatgttagaatctgaatgtcaagctcctgtacagaaggatataaagattaagaatgcagattcatggaaaagtttaggcaaaccagtgaaaccatcaggtgtaatgaaatcctcagatgagctcttcaaccaatttagaaaagcagccatagaaaaggaagtaaaagctcggacacaggaactcatacggaagcatttggaacaaaatacaaaggaactaaaagcatctcaagaaaatcagagggatcttgggaatggattgactgtagaatctttttcaaataaaatacaaaacaagtgctctggagaagagcagaaagaacatcagcagtcatcagaagctcaagataaatccaaactctggcttctcaaagaccgtgatttagcaaggcagaaagaacaagagaggaggaggagagaagcaatggtgggtaccattgatatgacccttcaaagtgacattatgacaatgtttgaaaacaactttgattaaaactcagtttttaaattaaccatcaacttaaaatgaatggtaaaagatcaaaatgcatatggtaaaatgattgctttcagataacaagataccaatcttatattgtattttgactgctctaaaatgattaaacagttttcacttacattttt

SEQ ID NO: 3801 - DNA, 3125 bp, Homo sapiens
  source 1..3125: mol_type = unassigned DNA
aagagcattttaagaatcataatagttcagtgcagatgttcctgggaggtcaagttaagagtcaaaaataattcattagatttaacaatttagcatggacatgtacttgtagacaggattcaaagcagttaagaatgtctctgccaagtcgacaaacagctattattgttaaccctcctccaccagaatatataaatactaagaaaaatgggcgattgacaaatcaacttcagtatctacaaaaagttgtcctaaaggatttatggaagcatagtttttcatggccctttcaacgtcctgtggatgctgtgaaactacagttgcctgattattataccattataaaaaacccaatggatttaaatacaattaagaagcgcttggagaataaatattatgcgaaggcttcagaatgtatagaagacttcaatacaatgttctcaaattgttatttatataacaagcctggagatgacattgttcttatggcacaagctctagagaagctgtttatgcagaaattatctcagatgccacaagaagagcaagttgtgggtgttaaggaaagaatcaagaaaggcactcaacagaatatagctgtttcttctgctaaagaaaaatcatcacccagcgcaacagaaaaagtatttaagcagcaagaaattccttctgtatttcctaagacatctatttctcccttgaacgtggtacagggagcttcagtcaactccagttcacaaactgcggcccaagttacaaaaggtgtgaagaggaaagcagatacaacaactcctgcaacttcagcagttaaagcaagtagtgaattttctccaacattcacagaaaaatcagtggcactgccacctataaaagaaaatatgccaaagaatgttttgccagattctcagcaacaatataatgttgtgaagactgttaaagtaactgaacaattaaggcactgtagtgagattcttaaagaaatgcttgcaaagaaacatttttcatatgcatggcccttttataatcctgttgacgttaatgctttgggactccataactactatgacgttgtcaaaaatccgatggatcttggaactattaaggagaaaatggataaccaagaatataaggatgcatacaaatttgcggcagatgttagattaatgttcatgaattgctacaagtacaatcctccagatcacgaagttgtgacaatggcaagaatgcttcaggatgttttcgaaacgcatttttcaaagatcccgattgaacctgttgagagtatgcctttatgttacatcaaaacagatatcacagaaaccactggtagagagaacactaatgaagcctcctctgaagggaactcttctgatgattctgaagatgagcgagttaagcgtcttgcaaagcttcaggagcagcttaaagctgtacatcaacagctccaggttttgtcccaagtacctttccgtaagctaaataaaaagaaagagaagtctaaaaaggaaaagaaaaaagaaaaggttaataacagcaatgaaaatccaagaaaaatgtgtgagcaaatgaggctaaaggaaaagtccaagagaaatcagccaaagaaaaggaaacaacagttcattggtctaaaatctgaagatgaagataatgctaaacctatgaactatgatgagaaaaggcagttaagtctgaatataaacaaactccctggagataaacttgggcgagtagttcacataatacaatcaagagagccttctctgagcaattccaatcctgatgagatagagatagactttgaaacactgaaagcatcaacactaagagaattagaaaaatatgtttcggcatgtctaagaaagagaccattaaaacctcctgctaagaaaataatgatgtccaaagaagaacttcactcacagaaaaaacaggaattggaaaagcggttactggatgttaataatcagttaaattctagaaaacgtcaaacaaaatctgataaaacgcaaccatccaaagctgttgaaaatgtttcccgactgagtgagagcagcagcagcagcagcagctcatcagagtctgaaagtagcagcagtgacttaagctcttcagacagcagtgattctgaatcagaaatgttccctaagtttacagaagtaaaaccaaatgattctccttctaaagagaatgtaaagaaaatgaagaatgaatgcataccgcctgaaggaagaacaggcgtcacacagataggatattgtgtgcaagacacaacctctgccaatactacccttgttcatcagaccacaccttcacatgtaatgccaccaaatcaccaccaattagcatttaattatcaagaattagaacatttacagactgtgaaaaacatttcacctttacaaattctgcctccctcaggtgattctgaacagctctcaaatggcataactgtgatgcatccatctggtgatagtgacacaacgatgttagaatctgaatgtcaagctcctgtacagaaggatataaagattaagaatgcagattcatggaaaagtttaggcaaaccagtgaaaccatcaggtgtaatgaaatcctcagatgagctcttcaaccaatttagaaaagcagccatagaaaaggaagtaaaagctcggacacaggaactcatacggaagcatttggaacaaaatacaaaggaactaaaagcatctcaagaaaatcagagggatcttgggaatggattgactgtagaatctttttcaaataaaatacaaaacaagtgctctggagaagagcagaaagaacatcagcagtcatcagaagctcaagataaatccaaactctggcttctcaaagaccgtgatttagcaaggcagaaagaacaagagaggaggaggagagaagcaatggtgggtaccattgatatgacccttcaaagtgacattatgacaatgtttgaaaacaactttgattaaaactcagtttttaaattaaccatcaacttaaaatgaatggtaaaagatcaaaatgcatatggtaaaatgattgctttcagataacaagataccaatcttatattgtattttgactgctctaaaatgattaaacagttttcacttaca

SEQ ID NO: 3802 - DNA, 760 bp, Homo sapiens
  source 1..760: mol_type = unassigned DNA
ataaaagcgcctgtcgcgcgaccgccattacaacaaaaactggcggcgaggaactgcggagaactgttgccctgcaccgcttcattttgtgcagcctgaaaggggcaatcacataaggtcggttttgtaatatacaggtaacatacagtccgggcagttgagaaggccaccccgcttcgtgcctgcagcccaggacatgtacttgtagacaggattcaaagcagttaagaatgtctctgccaagtcgacaaacagctattattgttaaccctcctccaccagaatatataaatactaagaaaaatgggcgattgacaaatcaacttcagtatctacaaaaagttgtcctaaaggatttatggaagcatagtttttcatggccctttcaacgtcctgtggatgctgtgaaactacagttgcctgattattataccattataaaaaacccaatggatttaaatacaattaagaagcgcttggagaataaatattatgcgaaggcttcagaatgtatagaagacttcaatacaatgttctcaaattgttatttatataacaagcctggagatgacattgttcttatggcacaagctctagagaagctgtttatgcagaaattatctcagatgccacaagaagagcaagttgtgggtgttaaggaaagaatcaagaaaggcactcaacagaatatagctgtttcttctgctaaagaaaaatcatcacccagcgcaacagaaaaagtatttaagcagcaagaaat

SEQ ID NO: 3803 - DNA, 1707 bp, Homo sapiens
  source 1..1707: mol_type = unassigned DNA
acaacaaaaactggcggcgaggaactgcggagaactgttgccctgcaccgcttcattttgtgcagcctgaaaggggcaatcacataaggtcggttttgtaatatacaggtaacatacaggtaatgtaccctccacagggggtgctgccttaggccggccccgaggtgcggccttgggtgggaacaaccgttttttcccccctctcccctccccgaccccatcaacatcgtgcgacagtccgggcagttgagaaggccaccccgcttcgtgcctgcagcccaggacatgtacttgtagacaggattcaaagcagttaagaatgtctctgccaagtcgacaaacagctattattgttaaccctcctccaccagaatatataaatactaagaaaaatgggcgattgacaaatcaacttcagtatctacaaaaagttgtcctaaaggatttatggaagcatagtttttcatggccctttcaacgtcctgtggatgctgtgaaactacagttgcctgattattataccattataaaaaacccaatggatttaaatacaattaagaagcgcttggagaataaatattatgcgaaggcttcagaatgtatagaagacttcaatacaatgttctcaaattgttatttatataacaagcctggagatgacattgttcttatggcacaagctctagagaagctgtttatgcagaaattatctcagatgccacaagaagagcaagttgtgggtgttaaggaaagaatcaagaaaggcactcaacagaatatagctgtttcttctgctaaagaaaaatcatcacccagcgcaacagaaaaagtatttaagcagcaagaaattccttctgtatttcctaagacatctatttctcccttgaacgtggtacagggagcttcagtcaactccagttcacaaactgcggcccaagttacaaaaggtgtgaagaggaaagcagatacaacaactcctgcaacttcagcagttaaagcaagtagtgaattttctccaacattcacagaaaaatcagtggcactgccacctataaaagaaaatatgccaaagaatgttttgccagattctcagcaacaatataatgttgtgaagactgttaaagtaactgaacaattaaggcactgtagtgagattcttaaagaaatgcttgcaaagaaacatttttcatatgcatggcccttttataatcctgttgacgttaatgctttgggactccataactactatgacgttgtcaaaaatccgatggatcttggaactattaaggagaaaatggataaccaagaatataaggatgcatacaaatttgcggcagatgttagattaatgttcatgaattgctacaagtacaatcctccagatcacgaagttgtgacaatggcaagaatgcttcaggatgttttcgaaacgcatttttcaaagatcccgattgaacctgttgagagtatgcctttatgttacatcaaaacagatatcacagaaaccactggtagagagaacactaatgaagcctcctctgaagggaactcttctgatgattctgaagatgagcgagttaagcgtcttgcaaagcttcaggagcagcttaaagctgtacatcaacagctccaggttttgtcccaagtacctttccgtaagctaaataaaaagaaagagaagtctaaaaaggaaaagaaaaaagaaaa

SEQ ID NO: 3804 - DNA, 1363 bp, Homo sapiens
  source 1..1363: mol_type = unassigned DNA
attacaacaaaaactggcggcgaggaactgcggagaactgttgccctgcaccgcttcattttgtgcagcctgaaaggggcaatcacataaggtcggttttgtaatatacaggtaacatacaggtaatgtaccctccacagggggtgctgccttaggccggccccgaggtgcggccttgggtgggaacaaccgttttttcccccctctcccctccccgaccccatcaacatcgtgcgacagtccgggcagttgagaaggccaccccgcttcgtgcctgcagcccaggtcttggactggtgtggatcgctgctgcctgtactgtaattttggaaatgcaggagaaagtacggagcgtttagctttagctggcattttgtgtttattctgcaagtggtcatttgggacggggaagttcgggttcttgcttcatttatttattcaattaactttattaagcccctggaacgtctgaaccctcttttgggtactgcaggattgtggtgggctttacttcaaggcgcgctggcctgtattaagaattaagatagaggaggccgggtgcagtggctcgcccctgtaatctcagcactttcggaggccgaggcaagtggatcacctgaggtcaggagttcaagaccagcctggccaacataatgaaatgcccatctctaccaaaaatacaaaaattagctgggtgtgatggcaggcgcctgtagtcccagctactcgggaggctgaggcaggagaatcgcttgaacccaggaggcggaagttgcagtgcgccgagatcacgccagtgcactccagcctgggcgacagagtgagactccgtctccccgctccccccaaaaaagaaagaggacatgtacttgtagacaggattcaaagcagttaagaatgtctctgccaagtcgacaaacagctattattgttaaccctcctccaccagaatatataaatactaagaaaaatgggcgattgacaaatcaacttcagtatctacaaaaagttgtcctaaaggatttatggaagcatagtttttcatggccctttcaacgtcctgtggatgctgtgaaactacagttgcctgattattataccattataaaaaacccaatggatttaaatacaattaagaagcgcttggagaataaatattatgcgaaggcttcagaatgtatagaagacttcaatacaatgttctcaaattgttatttatataacaagcctggagatgacattgttcttatggcacaagctctagagaagctgtttatgcagaaattatctcagatgccacaagaagagcaagttgtgggtgttaaggaaagaatcaagaaaggcactcaacagaatatagctg

SEQ ID NO: 3805 - DNA, 788 bp, Homo sapiens
  source 1..788: mol_type = unassigned DNA
gtcgcgcgaccgccattacaacaaaaactggcggcgaggaactgcggagaactgttgccctgcaccgcttcattttgtgcagcctgaaaggggcaatcacataagtccgggcagttgagaaggccaccccgcttcgtgcctgcagcccaggacatgtacttgtagacaggattcaaagcagttaagaatgtctctgccaagtcgacaaacagctattattgttaaccctcctccaccagaatatataaatactaagaaaaatgggcgattgacaaatcaacttcagtatctacaaaaagttgtcctaaaggatttatggaagcatagtttttcatggccctttcaacgtcctgtggatgctgtgaaactacagttgcctgattattataccattataaaaaacccaatggatttaaatacaattaagaagcgcttggagaataaatattatgcgaaggcttcagaatgtatagaagacttcaatacaatgttctcaaattgttatttatataacaagcctggagatgacattgttcttatggcacaagctctagagaagctgtttatgcagaaattatctcagatgccacaagaagagcaagttgtgggtgttaaggaaagaatcaagaaaggcactcaacagaatatagctgtttcttctgctaaagaaaaatcatcacccagcgcaacagaaaaagtatttaagcagcaagaaattccttctgtatttcctaagacatctatttctcccttgaacgtggtacagggagcttcagtcaactccagtt

SEQ ID NO: 3806 - DNA, 591 bp, Homo sapiens
  source 1..591: mol_type = unassigned DNA
acaacaaaaactggcggcgaggaactgcggagaactgttgccctgcaccgcttcattttgtgcagcctgaaaggggcaatcacataaggacatgtacttgtagacaggattcaaagcagttaagaatgtctctgccaagtcgacaaacagctattattgttaaccctcctccaccagaatatataaatactaagaaaaatgggcgattgacaaatcaacttcagtatctacaaaaagttgtcctaaaggatttatggaagcatagtttttcatggccctttcaacgtcctgtggatgctgtgaaactacagttgcctgattattataccattataaaaaacccaatggatttaaatacaattaagaagcgcttggagaataaatattatgcgaaggcttcagaatgtatagaagacttcaatacaatgttctcaaattgttatttatataacaagcctggagatgacattgttcttatggcacaagctctagagaagctgtttatgcagaaattatctcagatgccacaagaagagcaagttgtgggtgttaaggaaagaatcaagaaaggcactcaacagaatatagctg

SEQ ID NO: 3807 - DNA, 550 bp, Homo sapiens
  source 1..550: mol_type = unassigned DNA
attacaacaaaaactggcggcgaggaactgcggagaactgttgccctgcaccgcttcattttgtgcagcctgaaaggggcaatcacataagctgggtgtgatggcaggcgcctgtagtcccagctactcgggaggctgaggcaggagaatcgcttgaacccaggaggcggaagttgcagtgcgccgagatcacgccagtgcactccagcctgggcgacagagtgagactccgtctccccgctccccccaaaaaagaaagagatagctgctatggctgggcgatctcagaggatcgcctgagtcgctcacgcctgtaatcccagcacttaggaggccgaggcgggtggatcacctgaggacatgtacttgtagacaggattcaaagcagttaagaatgtctctgccaagtcgacaaacagctattattgttaaccctcctccaccagaatatataaatactaagaaaaatgggcgattgacaaatcaacttcagtatctacaaaaagttgtcctaaaggatttatggaagcatagtttttcatggcccttt

SEQ ID NO: 3808 - DNA, 559 bp, Homo sapiens
  source 1..559: mol_type = unassigned DNA
aacaaaaactggcggcgaggaactgcggagaactgttgccctgcaccgcttcattttgtgcagcctgaaaggggcaatcacataaggtcggttttgtaatatacaggtaacatacagtccgggcagttgagaaggccaccccgcttcgtgcctgcagcccaggttcacagcaaaactgagcagtaaatagtgttcccatctaccccgtttcaacactagtacagcaccagagtggacatgtacttgtagacaggattcaaagcagttaagaatgtctctgccaagtcgacaaacagctattattgttaaccctcctccaccagaatatataaatactaagaaaaatgggcgattgacaaatcaacttcagtatctacaaaaagttgtcctaaaggatttatggaagcatagtttttcatggccctttcaacgtcctgtggatgctgtgaaactacagttgcctgattattataccattataaaaaacccaatggatttaaatacaattaagaagcgcttggagaataaatattatgcgaaggcttcagaatgtatagaa

SEQ ID NO: 3809 - DNA, 551 bp, Homo sapiens
  source 1..551: mol_type = unassigned DNA
actgttgccctgcaccgcttcattttgtgcagcctgaaaggggcaatcacataaggtcggttttgtaatatacaggtaacatacaggtaatgtaccctccacagggggtgctgccttaggccggccccgaggtgcggccttgggtgggaacaaccgttttttcccccctctcccctccccgaccccatcaacatcgtgcgacagtccgggcagttgagaaggccaccccgcttcgtgcctgcagcccagctgggtgtgatggcaggcgcctgtagtcccagctactcgggaggctgaggcaggagaatcgcttgaacccaggaggcggaagttgcagtgcgccgagatcacgccagtgcactccagcctgggcgacagagtgagactccgtctccccgctccccccaaaaaagaaagaggacatgtacttgtagacaggattcaaagcagttaagaatgtctctgccaagtcgacaaacagctattattgttaaccctcctccaccagaatatataaatactaagaaaaatgggcgattgacaaatcaact

SEQ ID NO: 3810 - DNA, 1744 bp, Homo sapiens
  source 1..1744: mol_type = unassigned DNA
tataaaagcgcctgtcgcgcgaccgccattacaacaaaaactggcggcgaggaactgcggagaactgttgccctgcaccgcttcattttgtgcagcctgaaaggggcaatcacataaggtcggttttgtaatatacaggtaacatacaggtaatgtaccctccacagggggtgctgccttaggccggccccgaggtgcggccttgggtgggaacaaccgttttttcccccctctcccctccccgaccccatcaacatcgtgcgacagtccgggcagttgagaaggccaccccgcttcgtgcctgcagcccaggacatgtacttgtagacaggattcaaagcagttaagaatgtctctgccaagtcgacaaacagctattattgttaaccctcctccaccagaatatataaatactaagaaaaatgggcgattgacaaatcaacttcagtatctacaaaaagttgtcctaaaggatttatggaagcatagtttttcatggccctttcaacgtcctgtggatgctgtgaaactacagttgcctgattattataccattataaaaaacccaatggatttaaatacaattaagaagcgcttggagaataaatattatgcgaaggcttcagaatgtatagaagacttcaatacaatgttctcaaattgttatttatataacaagcctggagatgacattgttcttatggcacaagctctagagaagctgtttatgcagaaattatctcagatgccacaagaagagcaagttgtgggtgttaaggaaagaatcaagaaaggcactcaacagaatatagctgtttcttctgctaaagaaaaatcatcacccagcgcaacagaaaaagtatttaagcagcaagaaattccttctgtatttcctaagacatctatttctcccttgaacgtggtacagggagcttcagtcaactccagttcacaaactgcggcccaagttacaaaaggtgtgaagaggaaagcagatacaacaactcctgcaacttcagcagttaaagcaagtagtgaattttctccaacattcacagaaaaatcagtggcactgccacctataaaagaaaatatgccaaagaatgttttgccagattctcagcaacaatataatgttgtgaagactgttaaagtaactgaacaattaaggcactgtagtgagattcttaaagaaatgcttgcaaagaaacatttttcatatgcatggcccttttataatcctgttgacgttaatgctttgggactccataactactatgacgttgtcaaaaatccgatggatcttggaactattaaggagaaaatggataaccaagaatataaggatgcatacaaatttgcggcagatgttagattaatgttcatgaattgctacaagtacaatcctccagatcacgaagttgtgacaatggcaagaatgcttcaggatgttttcgaaacgcatttttcaaagatcccgattgaacctgttgagagtatgcctttatgttacatcaaaacagatatcacagaaaccactggtagagagaacactaatgaagcctcctctgaagggaactcttctgatgattctgaagatgagcgagttaagcgtcttgcaaagcttcaggagcagcttaaagctgtacatcaacagctccaggttttgtcccaagtacctttccgtaagctaaataaaaagaaagagaagtctaaaaaggaaaagaaaaaagaaaagaaaaaa

SEQ ID NO: 3811 - DNA, 569 bp, Homo sapiens
  source 1..569: mol_type = unassigned DNA
aacaaaaactggcggcgaggaactgcggagaactgttgccctgcaccgcttcattttgtgcagcctgaaaggggcaatcacataaggtcggttttgtaatatacaggtaacatacagtccgggcagttgagaaggccaccccgcttcgtgcctgcagcccagttcctcttaggtcttggactggtgtggatcgctgctgcctgtactgtaattttggaaatgcaggagaaagacatgtacttgtagacaggattcaaagcagttaagaatgtctctgccaagtcgacaaacagctattattgttaaccctcctccaccagaatatataaatactaagaaaaatgggcgattgacaaatcaacttcagtatctacaaaaagttgtcctaaaggatttatggaagcatagtttttcatggccctttcaacgtcctgtggatgctgtgaaactacagttgcctgattattataccattataaaaaacccaatggatttaaatacaattaagaagcgcttggagaataaatattatgcgaaggcttcagaatgtatagaagacttcaatacaa

SEQ ID NO: 3812 - DNA, 6954 bp, Homo sapiens
  source 1..6954: mol_type = unassigned DNA
cggcgcccggccatggcggtctccaggctagatcgcctttttattttactggatactggcactactcctgttacaagaaaagctgctgcacagcaacttggagaagtggtgaagcttcatccccatgaactaaataatctcctgtctaaagtgttgatatatttaaggagtgcaaattgggatacccggattgcagcaggacaagctgttgaagctatagtgaaaaatgtacctgagtggaatccagtgccgagaaccagacaagaacctacttccgaaagttctatggaagattcacctactacagagcgattgaattttgacagatttgatatatgtagattgttacaacatggtgcatcactcctgggatctgctggtgccgaatttgaagtccaagatgaaaaatcaggtgaagtggatcctaaagagaggatagcacgccaacgaaaattattacagaagaaacttggccttaatatgggagaagcaattggaatgagtactgaagaacttttcaatgatgaggatttggattataccccaacttcagcatcctttgttaacaaacaacctactcttcaggcagctgaattgattgactcagagtttcgagcaggaatgagcaatagacaaaagaacaaagctaaaagaatggccaagttatttgcaaaacagagatccagggatgcagtggaaactaatgagaagagcaatgatagcactgatggggagccagaagaaaagagacggaaaatagcaaatgttgttattaatcagtctgcaaatgattccaaagtcttgattgataatattccagacagctcttccttaattgaagagacaaatgaatggcctttggaaagcttttgtgaagaactttgcaatgacctttttaatccctcctgggaggttcgacatggtgcaggcactggacttagggaaattcttaaagctcatgggaaaagtggtggtaaaatgggtgacagcactttagaagagatgattcagcagcatcaagagtggttggaagacttggttattagactcctttgtgtttttgcattagacagatttggagactttgtttctgatgaagttgtggcaccagttcgtgaaacttgtgctcaaacattaggtgtggttttaaaacacatgaacgaaacaggagttcataagactgtggatgtgctgctaaaattacttacacaagaacaatgggaagttagacatggtggtctgctgggaataaaatatgctttggcagtccgtcaggatgtaattaatactttattgcctaaagttttaactagaataattgaaggactccaggatcttgatgatgatgtcagagctgttgctgcagcatcattagtgcctgtagtagaaagccttgtctatcttcagacacaaaaggtgcccttcattataaatacattgtgggatgctcttctggaattagatgatctaacagcttcaacaaatagtattatgactctcctttcatccttgttaacttaccctcaggtccaacaatgcagtattcagcagtcactgacagttttagttccacgtgtctggccttttttgcatcacactatatcatcagttcgaagagcagcattggaaactctgtttacgttattatcaacacaggaccagaactcttcatcttggcttatacctatactgcctgatatgctccgacacatttttcagttctgtgttttggaaagcagccaggaaattctggaccttattcacaaggtttggatggaactgttgagtaaggcttcagttcagtatgtggtagcagctgcttgcccatggatgggtgcttggctttgcttgatgatgcagccttctcatttacctatcgatttaaatatgttgctagaagtaaaagctagagccaaggaaaaaacaggtggtaaggtgcgccaaggccaaagccagaataaagaagtacttcaggagtatattgcaggtgccgacaccatcatggaagacccagccaccagggattttgtagttatgcgggccagaatgatggcagccaagttgttaggagcactttgttgctgtatttgtgatccaggtgtaaatgtggtaactcaagaaattaaaccagctgaatccctgggccagttactactcttccatttgaactccaagtctgctttacagaggattagtgtagctttggtaatctgtgaatgggctgctttacaaaaggagtgtaaagctgttaccttagctgtgcagccgcgtttacttgatatcctttcagaacatttatattatgacgaaattgccgttccattcacacgaatgcagaatgaatgtaaacaacttatatcatcattagctgatgtacatattgaagttggtaatcgagtaaacaacaatgttttaacaatagatcaagctagtgacttggtcactactgtttttaatgaagccacatcatctttcgatttaaatcctcaagtgttacaacagttagatagtaaacgacagcaggtccaaatgacagttacagagaccaaccaggagtggcaagtgttgcagttgagagtgcatacttttgctgcctgtgcagttgtgagcttgcagcagcttccggagaaattaaatcctatcataaaaccattaatggagacaattaaaaaagaagagaatacactagtgcaaaactatgcagctcagtgcatagctaaactccttcagcagtgcacaacaaggacgccctgtcccaattcaaaaattattaaaaacctctgtagctcactttgtgtggacccatatctaactccttgtgtcacatgtccagtaccaacacaaagtggccaggaaaattctaaaggatccacctcagaaaaagatggaatgcaccatactgtcaccaagcacagaggtataattacactctacaggcaccagaaagctgcctttgctatcacaagtaggcgaggtcctacccccaaagcagtaaaagctcaaatagcagatcttcctgcaggaagtagtggaaatattcttgttgaacttgatgaggcccagaagccttacctggtacaacggagaggagctgaatttgctttgacaactatagtaaagcattttggtggtgaaatggcagtgaagttgccacatctctgggatgctatggttggcccattgaggaatacaatcgacataaataattttgatggaaaatccctcctggataagggagatagccctgctcaagaattggtgaattctctgcaggtttttgaaacagcagcagcttcaatggattctgagcttcatcccttgttggtccagcatttgccacatctttatatgtgccttcaataccccagtactgcagtgaggcacatggctgctcgttgtgtaggtgtcatgagcaaaatagctaccatggaaacaatgaatatttttttggagaaggttcttccgtggctgggagcaattgatgacagtgtcaaacaagagggtgcaattgaagcacttgcctgtgtaatggaacaactagatgttggtattgttccatatattgtccttttagttgttcctgtattaggaagaatgagtgatcagacagacagtgtgagattcatggccacgcagtgctttgcaacgctaattagactcatgccacttgaggcaggcattccagaccctccaaacatgtcagcagaattaatccaattgaaagccaaggagcgacactttttggagcaattgttagatgggaaaaaattggaaaattataaaattccagtaccaatcaatgctgaactcagaaaatatcagcaggatggtgtgaactggttagcatttcttaataagtataaacttcatggaattctgtgtgatgacatgggtttaggaaaaactttacagtccatctgcattctagcaggagatcattgtcatagggcccaggaatatgcaagatcaaaattagcagaatgtatgccacttccttccttagtggtttgtccgccaacattaacaggccattgggtggatgaagtaggtaaattttgctctagagaatatctcaacccgttgcattacactggacctcccactgaaagaataaggttacagcaccaagtaaaaaggcacaatctaatagtggcttcatatgatgttgtgaggaatgacatagatttctttagaaatattaaatttaactactgcattcttgatgaaggccatgtcatcaaaaatggaaaaacaaagttgtcaaaagcagtaaaacaactgactgctaattataggattattctttctggaacaccaatccagaacaacgttttggagctgtggtcattatttgatttcctcatgccaggatttttgggtactgaacgccagtttgctgctcgatatggtaaacctatattagcaagtagggatgctcgaagctccagtcgagagcaagaagcaggtgttcttgctatggatgcgctgcaccgccaagtactaccgtttcttttgagaagaatgaaagaagatgttttgcaggatcttccacctaaaattattcaagactattattgtactcttagtcctctccaggttcagctctatgaagattttgctaagtctcgtgccaagtgtgatgttgatgaaacagtttcttcagctacactttctgaagaaactgaaaaaccaaagcttaaagctacaggccacgtattccaggcattacagtacttacgtaaactgtgcaaccatccagcattagtcttaacacctcaacatccagaattcaagaccactgccgaaaaactggcagttcagaattcttctctacatgatattcaacatgcccctaagctctcagctttgaaacaattgctgttggactgcggtttgggaaatggcagcacttccgagagtggcacagagtctgttgtggcccagcacaggatactgatattctgtcagctgaaaagcatgcttgatatagtagagcatgatctcctcaaacctcacttgccctctgtcacttatttgagattagatggcagcatacctcctggtcagaggcattccattgtttcccggtttaataatgatccatctatagacgttctgttacttaccactcacgttggtggcctgggacttaatttgacaggcgctgacacagtagtatttgtggagcatgactggaatcctatgcgagatctacaagccatggaccgggcccatcgcattgggcagaaacgtgtggttaacgtataccgattgataaccagaggaacattggaagaaaaaataatggggttgcagaaattcaagatgaacatagcgaatactgttattagccaagagaattctagtttgcagagcatggggactgatcagcttcttgatctgtttactcttgataaggatggcaaagcagaaaaagctgacacctctacttctgggaaagcaagtatgaaatcaattcttgaaaacctgagtgatctttgggatcaagagcagtatgattcagagtacagcctggaaaattttatgcattctctcaagtaactatcaaatattgtaaatgcaattgctgctagttcagttacatttctgctgatattcagcaaatttctaagtttatggtgaacttttaactcaatgtgtaaatagatctggagaatattcagcataatgctggctcttgtttcactgggggaaacaagttattctcaaatatttgcactgtattaaatttaaatgttaatgtgaaatggtttaaattttacatgctgaaaagctgcagagcagaggaaccaaaccaggtttatttgtgctaccaggaggtgttcttaatgggaacaggcctcctatctttagtcactttgtacaggatgatatccatgagtactttagtgtttgtatatgttttttcttttaaatagaacttgtttttataattgatttaaaatagggctttttttctataaaagccttaatgagccataattttaagaatataagaataatgactatgatattggtcagtcttagaacatgaaaatgtcagacaatgaatttaatcgggcccttggtggaaacatttatatatttaatgcagatgcatagtgtttttcaaatctttaacatcattttttcaacttttaagatataatatcaactattctaaatacaggtaatggtatatttaaggctaccataacatcctatttagagggtggttttttttaatttatctaatggctacgatatagccagattcaaataacatatgtactcaataggtttcaatcatatatataatatattttttgtaactatgaacatacacagttttccagaaatagattttacactgtttagaattccaacacctacagtggaaagactgtttattgtagtaatgcatggctgaagcataaaagggagagagaatttctttatatacacaaacatacatgaatatgcatatctatatgcatagatgtacctatcctgcacccaaaaaggtgcctggtattggcactaaaatcatgtagttatactgggcagcaataataattgggcatgaggctgattactcaatggtgagggtaggtatatgtagatagatgtgcatgtatgtgtttgtatatataattttataagtttcacgcataaattaatacatgcctgtgtgcatacatatgtatgggatatatttgtatatatatgtacaggtaataaacatccccaaggtttgtggctggccatacacataggcatcagtttaacaaccatcagacctcagctgtacaataacaggtgttttgtttaattaaaattatactgttctgcagcatttagacatttgtcacatttcattagctttgacaaccatactgtaacattaaacctagcattccacaagagaataaatataagattgaaactgtaaaa

SEQ ID NO: 3813 - DNA, 3488 bp, Homo sapiens
  source 1..3488: mol_type = unassigned DNA
aaactctggttcaaaaatactgaagattacaggagaactgcgcttactaggctcacttcaggtgtaatggaacaactagatgttggtattgttccatatattgtccttttagttgttcctgtattaggaagaatgagtgatcagacagacagtgtgagattcatggccacgcagtgctttgcaacgctaattagactcatgccacttgaggcaggcattccagaccctccaaacatgtcagcagaattaatccaattgaaagccaaggagcgacactttttggagcaattgttagatgggaaaaaattggaaaattataaaattccagtaccaatcaatgctgaactcagaaaatatcagcaggatggtgtgaactggttagcatttcttaataagtataaacttcatggaattctgtgtgatgacatgggtttaggaaaaactttacagtccatctgcattctagcaggagatcattgtcatagggcccaggaatatgcaagatcaaaattagcagaatgtatgccacttccttccttagtggtttgtccgccaacattaacaggccattgggtggatgaagtaggtaaattttgctctagagaatatctcaacccgttgcattacactggacctcccactgaaagaataaggttacagcaccaagtaaaaaggcacaatctaatagtggcttcatatgatgttgtgaggaatgacatagatttctttagaaatattaaatttaactactgcattcttgatgaaggccatgtcatcaaaaatggaaaaacaaagttgtcaaaagcagtaaaacaactgactgctaattataggattattctttctggaacaccaatccagaacaacgttttggagctgtggtcattatttgatttcctcatgccaggatttttgggtactgaacgccagtttgctgctcgatatggtaaacctatattagcaagtagggatgctcgaagctccagtcgagagcaagaagcaggtgttcttgctatggatgcgctgcaccgccaagtactaccgtttcttttgagaagaatgaaagaagatgttttgcaggatcttccacctaaaattattcaagactattattgtactcttagtcctctccaggttcagctctatgaagattttgctaagtctcgtgccaagtgtgatgttgatgaaacagtttcttcagctacactttctgaagaaactgaaaaaccaaagcttaaagctacaggccacgtattccaggcattacagtacttacgtaaactgtgcaaccatccagcattagtcttaacacctcaacatccagaattcaagaccactgccgaaaaactggcagttcagaattcttctctacatgatattcaacatgcccctaagctctcagctttgaaacaattgctgttggactgcggtttgggaaatggcagcacttccgagagtggcacagagtctgttgtggcccagcacaggatactgatattctgtcagctgaaaagcatgcttgatatagtagagcatgatctcctcaaacctcacttgccctctgtcacttatttgagattagatggcagcatacctcctggtcagaggcattccattgtttcccggtttaataatgatccatctatagacgttctgttacttaccactcacgttggtggcctgggacttaatttgacaggcgctgacacagtagtatttgtggagcatgactggaatcctatgcgagatctacaagccatggaccgggcccatcgcattgggcagaaacgtgtggttaacgtataccgattgataaccagaggaacattggaagaaaaaataatggggttgcagaaattcaagatgaacatagcgaatactgttattagccaagagaattctagtttgcagagcatggggactgatcagcttcttgatctgtttactcttgataaggatggcaaagcagaaaaagctgacacctctacttctgggaaagcaagtatgaaatcaattcttgaaaacctgagtgatctttgggatcaagagcagtatgattcagagtacagcctggaaaattttatgcattctctcaagtaactatcaaatattgtaaatgcaattgctgctagttcagttacatttctgctgatattcagcaaatttctaagtttatggtgaacttttaactcaatgtgtaaatagatctggagaatattcagcataatgctggctcttgtttcactgggggaaacaagttattctcaaatatttgcactgtattaaatttaaatgttaatgtgaaatggtttaaattttacatgctgaaaagctgcagagcagaggaaccaaaccaggtttatttgtgctaccaggaggtgttcttaatgggaacaggcctcctatctttagtcactttgtacaggatgatatccatgagtactttagtgtttgtatatgttttttcttttaaatagaacttgtttttataattgatttaaaatagggctttttttctataaaagccttaatgagccataattttaagaatataagaataatgactatgatattggtcagtcttagaacatgaaaatgtcagacaatgaatttaatcgggcccttggtggaaacatttatatatttaatgcagatgcatagtgtttttcaaatctttaacatcattttttcaacttttaagatataatatcaactattctaaatacaggtaatggtatatttaaggctaccataacatcctatttagagggtggttttttttaatttatctaatggctacgatatagccagattcaaataacatatgtactcaataggtttcaatcatatatataatatattttttgtaactatgaacatacacagttttccagaaatagattttacactgtttagaattccaacacctacagtggaaagactgtttattgtagtaatgcatggctgaagcataaaagggagagagaatttctttatatacacaaacatacatgaatatgcatatctatatgcatagatgtacctatcctgcacccaaaaaggtgcctggtattggcactaaaatcatgtagttatactgggcagcaataataattgggcatgaggctgattactcaatggtgagggtaggtatatgtagatagatgtgcatgtatgtgtttgtatatataattttataagtttcacgcataaattaatacatgcctgtgtgcatacatatgtatgggatatatttgtatatatatgtacaggtaataaacatccccaaggtttgtggctggccatacacataggcatcagtttaacaaccatcagacctcagctgtacaataacaggtgttttgtttaattaaaattatactgttctgcagcatttagacatttgtcacatttcattagctttgacaaccatactgtaacattaaacctagcattccacaagagaataaatataagattgaaactgt

SEQ ID NO: 3814 - DNA, 2522 bp, Homo sapiens
  source 1..2522: mol_type = unassigned DNA
ctttatatgtgccttcaataccccagtactgcagtgaggcacatggctgctcgttgtgtaggtgtcatgagcaaaatagctaccatggaaacaatgaatatttttttggagaaggttcttccgtggctgggagcaattgatgacagtgtcaaacaagagggtgcaattgaagcacttgcctatatttcacagagctcaaaagatggatgaagatcaaatcagtagaaactctggttcaaaaatactgaagattacaggagaactgcgcttactaggctcacttcaggtgtaatggaacaactagatgttggtattgttccatatattgtccttttagttgttcctgtattaggaagaatgagtgatcagacagacagtgtgagattcatggccacgcagtgctttgcaacgctaattagactcatgccacttgaggcaggcattccagaccctccaaacatgtcagcagaattaatccaattgaaagccaaggagcgacactttttggagcaattgttagatgggaaaaaattggaaaattataaaattccagtaccaatcaatgctgaactcagaaaatatcagcaggatggtgtgaactggttagcatttcttaataagtataaacttcatggaattctgtgtgatgacatgggtttaggaaaaactttacagtccatctgcattctagcaggagatcattgtcatagggcccaggaatatgcaagatcaaaattagcagaatgtatgccacttccttccttagtggtttgtccgccaacattaacaggccattgggtggatgaagtaggtaaattttgctctagagaatatctcaacccgttgcattacactggacctcccactgaaagaataaggttacagcaccaagtaaaaaggcacaatctaatagtggcttcatatgatgttgtgaggaatgacatagatttctttagaaatattaaatttaactactgcattcttgatgaaggccatgtcatcaaaaatggaaaaacaaagttgtcaaaagcagtaaaacaactgactgctaattataggattattctttctggaacaccaatccagaacaacgttttggagctgtggtcattatttgatttcctcatgccaggatttttgggtactgaacgccagtttgctgctcgatatggtaaacctatattagcaagtagggatgctcgaagctccagtcgagagcaagaagcaggtgttcttgctatggatgcgctgcaccgccaagtactaccgtttcttttgagaagaatgaaagaagatgttttgcaggatcttccacctaaaattattcaagactattattgtactcttagtcctctccaggttcagctctatgaagattttgctaagtctcgtgccaagtgtgatgttgatgaaacagtttcttcagctacactttctgaagaaactgaaaaaccaaagcttaaagctacaggccacgtattccaggcattacagtacttacgtaaactgtgcaaccatccagcattagtcttaacacctcaacatccagaattcaagaccactgccgaaaaactggcagttcagaattcttctctacatgatattcaacatgcccctaagctctcagctttgaaacaattgctgttggactgcggtttgggaaatggcagcacttccgagagtggcacagagtctgttgtggcccagcacaggatactgatattctgtcagctgaaaagcatgcttgatatagtagagcatgatctcctcaaacctcacttgccctctgtcacttatttgagattagatggcagcatacctcctggtcagaggcattccattgtttcccggtttaataatgatccatctatagacgttctgttacttaccactcacgttggtggcctgggacttaatttgacaggcgctgacacagtagtatttgtggagcatgactggaatcctatgcgagatctacaagccatggaccgggcccatcgcattgggcagaaacgtgtggttaacgtataccgattgataaccagaggaacattggaagaaaaaataatggggttgcagaaattcaagatgaacatagcgaatactgttattagccaagagaattctagtttgcagagcatggggactgatcagcttcttgatctgtttactcttgataaggatggcaaagcagaaaaagctgacacctctacttctgggaaagcaagtatgaaatcaattcttgaaaacctgagtgatctttgggatcaagagcagtatgattcagagtacagcctggaaaattttatgcattctctcaagtaactatcaaatattgtaaatgcaattgctgctagttcagttacatttctgctgatattcagcaaatttctaagtttatggtgaacttttaactcaatgtgtaaatagatctggagaatattcagcataatgctggctcttgtttcactgggggaaacaagttattctcaaatatttgcactgtattaaatttaaatgtt

SEQ ID NO: 3815 - DNA, 2621 bp, Homo sapiens
  source 1..2621: mol_type = unassigned DNA
ggccggctccgcagcgccgcgcaggcgccccagggccacgccgaaccgagcccctcctgctccgtctaggagtcaaaatggcggcgaggggaacctggagcagtcccggagcctgagccactgacaggagaggagagggcggcggcggcggcggtgggaggaggatggccgggggtgctggcgccggtgcggacggcggtgctggtggcggcggcggcggaggcgacggcagcggtcccagcggcagcagcagcggcgggaggagcctccgggaaatggatgaaaagaggctgctggatccagggttgaaggttcataaaggcctctgggattatactctgaagaacccgcagacggaatgcctgagtgactgaagaaaatgggtgctaatgcatctaattatcctcattcatgttccccgagggtagggggaaattcacaggcccaacagacttttatagggacctcatcctattctcagcaaggctatggttgcgaatcaaagttgtatagccttgaccatggccatgagaaaccacaagacaaaaaaaagagaacctctggtcttgccaccctcaaaaagaagtttattaagcgtcggaaatctaataggtctgccgatcatgccaagcagatgcgagaactcctctctgggtgggatgttagagatgtcaatgcattagtggaggaatatgagggaacatcagcattaaaggagctttctctacaagccagtttggctagaccagaagcccggacattgcagaaagatatggctgatctttatgagtacaagtattgtactgatgtagacttaatatttcaagaaacttgttttcctgttcatcgtgccattttggcagcaaggtgtccattttttaaaacactgctttcttcctcaccagagtatggggcagagataataatggacatcaatacagctggtattgatatgcccatgttttctgctttgttacactacctttatacaggagagtttggaatggaggactcaaggtttcaaaatgtcgatatccttgttcagcttagtgaagaatttggaacaccaaattcccttgatgtagatatgcgtggactctttgattacatgtgttattatgatgtcgtccttagtttttcttcagactctgaactggttgaagcttttggtggaaatcagaactgtttagatgaagagctcaaagcccacaaggctgttatttctgcacggtccccattttttcgaaatttattacaaaggaggatacgaactggtgaagaaatcacagaccgaactttgaggactcccacaagaattatattagatgagtccattataccaaaaaaatatgcaacagtgatattacactgtatgtataccgacgtggtggacctctctgttttgcactgtagcccctctgtggggagtctcagtgaagttcaggctctcgtcgcagggaagccaaacatgaccagggcagaagaagccatggaactttaccacatagcactgttcttggaatttaacatgcttgcacaagaggagactacagtcatcaggcctgcctgtgcagcagagctttcaaacagctgcttactgcctcaatcttaaatatgaaaacccatccaaggataactggacatttgaggaaagcttccaaattgagacagagatcagagcaaaaagaacaaagtcctggaggaagcagacaatgaagggagcagaagaaaacttcagtagaatcaaaatatccttatataaaagaactttttatggaatcagtgagacataagcaggatgctattaaagtaaaaacaggagcttttagaaataagatagcagaaatgaaagatataatggaagcattgaaaggtacagttgaggaaatctagaaagtaaataatataataaagagatgagtggagacaaataaaactagagtattcatccagggtctaacatctaacaaatagtggctttagaaatatataccagagaaaagtgaagagaagacagtatctaaggagtaatataagaaatatttccaaaactaaaggaatttctatataaaaagtttctttttcagaacactggggaaaaagagacaattttaaaatgttgcagggaggagaaaaattaggttccatgcaaagaaataggaatcagatggtattgagattttcagtagcaacaactgaataccacaatacagtgaagtagtgtcttccaaaagctgatggaaaattattttaaacacaaaatcctatatttagccaaacagtcaatcaagtgtaaggctaaataaaggcatttttcagtcatacctcgaaaaactgcctgtgtagggatatttcccctgcttccccactcaggcagctgctgggaatgtattccaccaaatgacgaagcaaaccaagaacaaagaagtgaaggatctagaaaatgggctccaacacgggaaggaagcaaagggagatcccacgcatcagccacacagtaggtcttgtgggcattcagtctagcccagaccgggagggtgaaagtctccaaggaaagaggtgtctcggaagaaatcaattactttcaatgtttgaacattaaatagcaaatgacaaagcaa

SEQ ID NO: 3816 - DNA, 8430 bp, Homo sapiens
  source 1..8430: mol_type = unassigned DNA
gtcaaaatggcggcgaggggaacctggagcagtcccggagcctgagccactgacaggagaggagagggcggcggcggcggcggtgggaggaggatggccgggggtgctggcgccggtgcggacggcggtgctggtggcggcggcggcggaggcgacggcagcggtcccagcggcagcagcagcggcgggaggagcctccgggaaatggatgaaaagaggctgctggatccagggttgaaggttcataaaggcctctgggattatactctgaagaacccgcagacggaatgcctgagtgactgaagaaaatgggtgctaatgcatctaattatcctcattcatgttccccgagggtagggggaaattcacaggcccaacagacttttatagggacctcatcctattctcagcaaggctatggttgcgaatcaaagttgtatagccttgaccatggccatgagaaaccacaagacaaaaaaaagagaacctctggtcttgccaccctcaaaaagaagtttattaagcgtcggaaatctaataggtctgccgatcatgccaagcagatgcgagaactcctctctgggtgggatgttagagatgtcaatgcattagtggaggaatatgagggaacatcagcattaaaggagctttctctacaagccagtttggctagaccagaagcccggacattgcagaaagatatggctgatctttatgagtacaagtattgtactgatgtagacttaatatttcaagaaacttgttttcctgttcatcgtgccattttggcagcaaggtgtccattttttaaaacactgctttcttcctcaccagagtatggggcagagataataatggacatcaatacagctggtattgatatgcccatgttttctgctttgttacactacctttatacaggagagtttggaatggaggactcaaggtttcaaaatgtcgatatccttgttcagcttagtgaagaatttggaacaccaaattcccttgatgtagatatgcgtggactctttgattacatgtgttattatgatgtcgtccttagtttttcttcagactctgaactggttgaagcttttggtggaaatcagaactgtttagatgaagagctcaaagcccacaaggctgttatttctgcacggtccccattttttcgaaatttattacaaaggaggatacgaactggtgaagaaatcacagaccgaactttgaggactcccacaagaattatattagatgagtccattataccaaaaaaatatgcaacagtgatattacactgtatgtataccgacgtggtggacctctctgttttgcactgtagcccctctgtggggagtctcagtgaagttcaggctctcgtcgcagggaagccaaacatgaccagggcagaagaagccatggaactttaccacatagcactgttcttggaatttaacatgcttgcacaaggctgtgaggatatcattgctgagagcatctcattagataccttaattgccatcctcaagtggagttctcatccatatggctctaaatgggtgcaccgacaagctttacatttcctctgtgaggaattttcccaggtcatgacttcggatgttttttatgaactcagcaaagaccatctgcttactgctatccagtctgactacctacaggcaagtgaacaagatatccttaaatatctgattaaatggggagagcatcagttgatgaaaagaatagcagatagagagccaaacttactgagtggcactgcccatagtgtgaacaaaagaggtgtaaaaagacgggacctggacatggaagagctcagagagatcctttcttctctcttaccttttgtgcgaattgaacacatcttacctataaacagtgaagtcttaagtgatgcaatgaaaagaggcttgattagtactcctccatcagatatgcttcctacaacagaaggtgggaagtcaaatgcctggttacggcaaaaaaatgctggcatctatgttcgtcctcgactcttctctccctatgtggaagaagcaaagtcagtgctagatgagatgatggtggaacaaacggatcttgtgcgcttgcgaatggttagaatgtccaatgtgccagacacgctctacatggtcaataatgccgtgccacagtgttgtcacatgatcagccaccagcagatcagcagcaaccagtcaagccctccttcagttgtagccaacgaaattccagttcctcgtctcctcattatgaaagacatggtcagacgactgcaggaactgcggcacacggagcaggtgcagagggcctatgccctgaactgcggggaaggcgccactgtcagctatgaaattcagattcgagtgctaagagagtttggtcttgcagatgctgctgcagagctgttgcagaatcctcacaaattctttcctgatgaacgttttggggatgaaagtccactcttgacaatgagacagcctgggagatgtcgcgtaaacagtacacctcctgcagaaaccatgtttacagatctggactcttttgtggccttccatccacccttgccccctccaccacctccctaccaccccccagctaccccaatccataaccaactcaaagcaggctggaagcaaagacctcccagtcagcacccttcacgttcattttcttatccctgtaatcattcgctgttccactccagaacagctcctaaagctggccctcccccagtctacttgccgagtgtgaaagctgcaccgcctgattgtaccagcactgcaggactgggcagacagacggtggctgctgctgccgccaccaccacctcaacagcaacagcagcagcagcagcagcatctgagaagcaagtgcgaacacaacctgtgctgaatgatctgatgccagacatcgcggtgggtgtgtccacactgtcactcaaggacaggaggcttccagagcttgctgtagacacagaattaagccagtcagtttctgaagcaggaccagggcctccccagcatctgtcgtgtattccacagagacatacacacacttctcggaaaaaacacacactagagcaaaaaacagacaccagagaaaatccacaggaatatccggatttctatgacttctcaaatgctgcttgcagaccttctactcctgctctcagcagacgcaccccttccccttcgcaaggtggatattttggtcccgatctgtacagccacaataaggcatcaccaagtggcttaaagtcagcctacctacctggtcagacgtctcctaaaaaacaggaagaagctaggagagaatatccactttcccctgacgggcatctacacagacaaaagaatgagccgatacacctggatgtcgttgagcaacctccccagcggtcagactttcctttggcagccccagaaaatgctagtaccggtccagcccatgtcaggggacgaactgcagtagaaactgacttgacttttgggctgactcctaacagaccttcactttctgcatgtagctctgaagctcccgaagagagatccggtagaagactggcagacagtgagtccctgggccatggagctcagagaaatacagatttggaaagggaagattcaataagcagaggaaggaggtcaccaagcaagccggacttcctctacaaaaagtctgccctctgagagcaacctccaagtcgtctgtgcctgagatgtgaaacatcccattttatgatgtaacccaacaacttacagaccagttcatcaatgccagctgataactcggtttcacatgattttgttctagtttttgtgtatatatgtgtttattagacatggcatgctaagaaggttttgttttttttttttaatgttgcatctgtctaatttgtctttgaacaattatgtcgggaggcatttttaagaacaagcaggctggcactttttatttctctttacaaatgatggaatttttttgcacttgtacatttattttctctgtattgattttatatcagtatgttaaactttattgccacatttaaaggactgtattttcatacttttttgcattttacctttcatctaccaatccatgtgcattggattgcacactaagatgtattttcttacgaaatagttctgtgtttattttttaattatagaaattccaaagaacagcacatcagaatgctcctctcttttcagtaattgttttagttcagagatcttcccgctcagcctccataaatctaatgtcattttttttttaataagtcctaggagctgggcttcattcctccagcgggagtccagtcagggtcctgaagtttgctggttcaggaaagaacaggaaagagaaaagccttctgtgcccaggctaaagctgttacatttccacagtgtggatgcagtcagaatccctgcacattctggtcataaggattagagtcaccagatgaggctctaaacagatcgcatcccttggaattagaaagcagtggagaccgggcgcagtgactcacacctgtgatcggcacttcggaaggccgaggcgggcagatcactgaagctcaggagttcaagaccagcctgggcaacatggcgaaactccatttctataaaaaatacaaaaaaaaaaaaatctagccaggcgtggtggtgcgtgcctgtagtcccagctacttggggggctgaggtggcaggatcgcttgagcctgggaggttgagactgcagtgagccaagattgcaccactgtgctcccacctgggcaacagtgagaccctgtctcaaaaaaaaaaaaaaaggcagtggaaatagagaagtaacttaaaggtcacactgacagaatttctggttctgagcgtcaactctccagctgtgatggcggaactgactgcttgctgcctttaattgtcttgctctctatgggaaaaaaacaaaagggcttcagtctcatggatgttatttggtgtttgtaaagatacgttttcttttaaacgattttcaaaatatgtctaaattttggtgttgtgtaatgcataatgctttctcaccaacagaaaaaaggaaaaaaattgttttcagttaaacactacatgtcctacttgaactccactgggacgctggtttggcatttactaaaccactgagcacatggggtctttcaggatcctctcccttggaagggcaatgtgtgagctaaggactgttttttttcttactctccaatgtaaatatatgagtatttgagtttttaaatcacttcaacattatttgagcatttactttgtatttttacaaacacataaacacacagccgtagcacttagaagaaaagaggctttctaagcattccttcctctgcaggatatttgggatcctcttttctatgtatgtatatatataaaaaactatgaatcactcacactcactcgaaaactatgcagggctagggagcgtttatgagctaccgggtaaatgaattacatgcactttgaagtaaataggttttctattgggtgtcaacaacgctgatttctcccaaaactatagtttctcttacggtcttttcctcctttaccctgtggatatacactcaggaataatctgacattttagaaaagccgaacagtagatagtctccaagatgggaaacatgtcgtgtgtctgcacgccccggcaaactgccgccactcgttctgctgcctgactggttagctgctgtgcgggtgcgctcggtgacactggtggtggtgcacgctcccgagctcccagagttaacactaatctgcaggtcggctgtgcatcgcattcgaggctccttttttaaagagaaaagcataggcctctgttctcatttgtaagaagtttgactcataatagaagacggtgtcttttgaagcccagtctctgtctgtcttcagaaacaaaagtgaatgccgtcatgttccttgatgtgtgtttctgccacatatgtatgttgacatgttcatgtactgcgccggtactgcaagtaagactcaacagacctaatttggatggggagaaaaactctcatccctgacccttccccccccgcaaatgttagaccagagctgttgatcccacacattcatttttctgaaaattcatgaactattctctcatatccctgaaatataaaagtaagtggccactattcctaagattatttagtttataaagtttgcttttaatcatacaatagcttacctggctaaaactttgcgtataaagggaaaacttgctttaatctgtgggattgcggaccgatgcgacttgcagaaggtaaacaggcgtgggttttgtgtgcgttaggttaggtgttagtggacttttaatgtatcttgtgaagtatggttactagggtaggttcaagagctacatgcctctggcttttgaacccatctattaaatcttttttaatgctgtactaagataaatgtgaagtctgagtaaggttgctctcagaaaaaaaaaaaaagcatatatatatataaaataaaatttaggccatgggaactggcattttacttggtataggaatttaatgagaaccaaatcacaaaaataccagatctccttttgagatcgtggacaatcaggcctttggacaatcaccgcttccagtgcccgctgtgcgttgaggttagagacctaccgtttacacgctagagccgagaggacgttcaagtttcttaaagatgctgttggtcttttttcttatgttattgttttagttttgtgattttgatgaataattgaagttcagagtcacccgtggctcctaaggaaaaaacagcatcatgaaaggcaaaaagtatttgaaacgtaattgtttcaattttccacgcccgttctcacatgccccctttagctttatttctgggaacatgtcactagacctcagctagcctgacaccgcaataacccgttaggctttgaggcttttcagtgaattcttgacatttaaatcttcttatagaattctttatgaagccttaactaattcttgtttttgcttcctcagaaactttttattgcatctgccatccttcattggatttttgttttggtttgttgttgccattctagcaatgagcttagtccttgtacatctgcattaaggtgccgatgcagaaggcaaattggaaacacgcgccagcggcagtggggctcaaagccgacctccatgcatcattctctagagttgaaaggattgacatttctcagtaactacccggcaaaatatatattttcataatgttgaatttgccttttaggaaaacaatgtttcatgaaacacttgtaagatacttattttgaaattaattataaggcattcatatttttaggactgaattcaaagggaaatgcttctttgactttttttcattgttcggttgactttcagctttctggagtgacaaagcagcagtgatgggtgctattcctggttctgtggtggtttactttgtctactaagtgatttactttcaaacctcattacagataatcttactaaaagacttaacatgcacactgctaaaaggtgttttactgttttccattaacgctgttgtatgaacaatatttggtgacatgttgtctttttgtcctgtagattgtcatatctgttatgtagttatccttttggcaagtcctttgatttttttttcctctagaaaatcctcagactgtcaatcttccatattttgaatattataatgctgtggccatttctatagaaagattacttgcaagtgtgtgtcttgaaaataacctcttgtatttgtgtgtttatgtgagttctgtctaagagatcagataagctctggaagcttcatcatctgtacctacatgtaactgtatctgggttacatgggcaggcggtaccaagtcctgctcttcgatggggtggctgagagataaaggttcctgaactctccttgctgtgtatgcaccacatctgtacttcagagaggtggaaaatcatctacaacactgcgtttcttgtggttgtgctgttactggtataaagtcaagtgccttcaatgctaaaggctcagaaatttttcttaaactgatttcatgtcctatgcaagtgttttctacaacctgcataaccagtactttgtaaaacttgtttacgcttcaattgtacatagtgatttttaaagaaatatatagtatttttatttaggtacctccaaacttgaattcgtctgtgtgaagcattgtaaaacgatacatttctcttttgagtaccattacagttgtacagaggttttcactgcttctatttttctactgttactgataagcatgtaacactgactttatcctacatatagttggcatttcaaataaatggcttgtatagaa

SEQ ID NO: 3817 - DNA, 2479 bp, Homo sapiens
  source 1..2479: mol_type = unassigned DNA
ttattacaaaggaggatacgaactggtgaagaaatcacagaccgaactttgaggactcccacaagaattatattagatgagtccattataccaaaaaaatatgcaacagtgatattacactgtatgtataccgacgtggtggacctctctgttttgcactgtagcccctctgtggggagtctcagtgaagttcaggctctcgtcgcagggaagccaaacatgaccagggcagaagaagccatggaactttaccacatagcactgttcttggaatttaacatgcttgcacaagagccaaacttactgagtggcactgcccatagtgtgaacaaaagaggtgtaaaaagacgggacctggacatggaagagctcagagagatcctttcttctctcttaccttttgtgcgaattgaacacatcttacctataaacagtgaagtcttaagtgatgcaatgaaaagaggcttgattagtactcctccatcagatatgcttcctacaacagaaggtgggaagtcaaatgcctggttacggcaaaaaaatgctggcatctatgttcgtcctcgactcttctctccctatgtggaagaagcaaagtcagtgctagatgagatgatggtggaacaaacggatcttgtgcgcttgcgaatggttagaatgtccaatgtgccagacacgctctacatggtcaataatgccgtgccacagtgttgtcacatgatcagccaccagcagatcagcagcaaccagtcaagccctccttcagttgtagccaacgaaattccagttcctcgtctcctcattatgaaagacatggtcagacgactgcaggaactgcggcacacggagcaggtgcagagggcctatgccctgaactgcggggaaggcgccactgtcagctatgaaattcagattcgagtgctaagagagtttggtcttgcagatgctgctgcagagctgttgcagaatcctcacaaattctttcctgatgaacgttttggggatgaaagtccactcttgacaatgagacagcctgggagatgtcgcgtaaacagtacacctcctgcagaaaccatgtttacagatctggactcttttgtggccttccatccacccttgccccctccaccacctccctaccaccccccagctaccccaatccataaccaactcaaagcaggctggaagcaaagacctcccagtcagcacccttcacgttcattttcttatccctgtaatcattcgctgttccactccagaacagctcctaaagctggccctcccccagtctacttgccgagtgtgaaagctgcaccgcctgattgtaccagcactgcaggactgggcagacagacggtggctgctgctgccgccaccaccacctcaacagcaacagcagcagcagcagcagcatctgagaagcaagtgcgaacacaacctgtgctgaatgatctgatgccagacatcgcggtgggtgtgtccacactgtcactcaaggacaggaggcttccagagcttgctgtagacacagaattaagccagtcagtttctgaagcaggaccagggcctccccagcatctgtcgtgtattccacagagacatacacacacttctcggaaaaaacacacactagagcaaaaaacagacaccagagaaaatccacaggaatatccggatttctatgacttctcaaatgctgcttgcagaccttctactcctgctctcagcagacgcaccccttccccttcgcaaggtggatattttggtcccgatctgtacagccacaataaggcatcaccaagtggcttaaagtcagcctacctacctggtcagacgtctcctaaaaaacaggaagaagctaggagagaatatccactttcccctgacgggcatctacacagacaaaagaatgagccgatacacctggatgtcgttgagcaacctccccagcggtcagactttcctttggcagccccagaaaatgctagtaccggtccagcccatgtcaggggacgaactgcagtagaaactgacttgacttttgggctgactcctaacagaccttcactttctgcatgtagctctgaagctcccgaagagagatccggtagaagactggcagacagtgagtccctgggccatggagctcagagaaatacagatttggaaagggaagattcaataagcagaggaaggaggtcaccaagcaagccggacttcctctacaaaaagtctgccctctgagagcaacctccaagtcgtctgtgcctgagatgtgaaacatcccattttatgatgtaacccaacaacttacagaccagttcatcaatgccagctgataactcggtttcacatgattttgttctagtttttgtgtatatatgtgtttattagacatggcatgctaagaaggttttgttttttttttttaatgttgcatctgtctaatttgtctttgaacaattatgtcgggaggcat

SEQ ID NO: 3818 - DNA, 2697 bp, Homo sapiens
  source 1..2697: mol_type = unassigned DNA
ctcctgctccgtctaggagtcaaaatggcggcgaggggaacctggagcagtcccggagcctgagccactgacaggagaggagagggcggcggcggcggcggtgggaggaggatggccgggggtgctggcgccggtgcggacggcggtgctggtggcggcggcggcggaggcgacggcagcggtcccagcggcagcagcagcggcgggaggagcctccggggctgtgaggatatcattgctgagagcatctcattagataccttaattgccatcctcaagtggagttctcatccatatggctctaaatgggtgcaccgacaagctttacatttcctctgtgaggaattttcccaggtcatgacttcggatgttttttatgaactcagcaaagaccatctgcttactgctatccagtctgactacctacaggcaagtgaacaagatatccttaaatatctgattaaatggggagagcatcagttgatgaaaagaatagcagatagagagccaaacttactgagtggcactgcccatagtgtgaacaaaagaggtgtaaaaagacgggacctggacatggaagagctcagagagatcctttcttctctcttaccttttgtgcgaattgaacacatcttacctataaacagtgaagtcttaagtgatgcaatgaaaagaggcttgattagtactcctccatcagatatgcttcctacaacagaaggtgggaagtcaaatgcctggttacggcaaaaaaatgctggcatctatgttcgtcctcgactcttctctccctatgtggaagaagcaaagtcagtgctagatgagatgatggtggaacaaacggatcttgtgcgcttgcgaatggttagaatgtccaatgtgccagacacgctctacatggtcaataatgccgtgccacagtgttgtcacatgatcagccaccagcagatcagcagcaaccagtcaagccctccttcagttgtagccaacgaaattccagttcctcgtctcctcattatgaaagacatggtcagacgactgcaggaactgcggcacacggagcaggtgcagagggcctatgccctgaactgcggggaaggcgccactgtcagctatgaaattcagattcgagtgctaagagagtttggtcttgcagatgctgctgcagagctgttgcagaatcctcacaaattctttcctgatgaacgttttggggatgaaagtccactcttgacaatgagacagcctgggagatgtcgcgtaaacagtacacctcctgcagaaaccatgtttacagatctggactcttttgtggccttccatccacccttgccccctccaccacctccctaccaccccccagctaccccaatccataaccaactcaaagcaggctggaagcaaagacctcccagtcagcacccttcacgttcattttcttatccctgtaatcattcgctgttccactccagaacagctcctaaagctggccctcccccagtctacttgccgagtgtgaaagctgcaccgcctgattgtaccagcactgcaggactgggcagacagacggtggctgctgctgccgccaccaccacctcaacagcaacagcagcagcagcagcagcatctgagaagcaagtgcgaacacaacctgtgctgaatgatctgatgccagacatcgcggtgggtgtgtccacactgtcactcaaggacaggaggcttccagagcttgctgtagacacagaattaagccagtcagtttctgaagcaggaccagggcctccccagcatctgtcgtgtattccacagagacatacacacacttctcggaaaaaacacacactagagcaaaaaacagacaccagagaaaatccacaggaatatccggatttctatgacttctcaaatgctgcttgcagaccttctactcctgctctcagcagacgcaccccttccccttcgcaaggtggatattttggtcccgatctgtacagccacaataaggcatcaccaagtggcttaaagtcagcctacctacctggtcagacgtctcctaaaaaacaggaagaagctaggagagaatatccactttcccctgacgggcatctacacagacaaaagaatgagccgatacacctggatgtcgttgagcaacctccccagcggtcagactttcctttggcagccccagaaaatgctagtaccggtccagcccatgtcaggggacgaactgcagtagaaactgacttgacttttgggctgactcctaacagaccttcactttctgcatgtagctctgaagctcccgaagagagatccggtagaagactggcagacagtgagtccctgggccatggagctcagagaaatacagatttggaaagggaagattcaataagcagaggaaggaggtcaccaagcaagccggacttcctctacaaaaagtctgccctctgagagcaacctccaagtcgtctgtgcctgagatgtgaaacatcccattttatgatgtaacccaacaacttacagaccagttcatcaatgccagctgataactcggtttcacatgattttgttctagtttttgtgtatatatgtgtttattagacatggcatgctaagaaggttttgttttttttttttaatgttgcatctgtctaatttgtctttgaacaattatgtcgggaggcattttta

SEQ ID NO: 3819 - DNA, 316 bp, Homo sapiens
  source 1..316: mol_type = unassigned DNA
aggcctgaggactgctactcccaggggaagttagattgtccggaaatggatgaaaagaggctgctggatccagggttgaaggttcataaaggcctctgggattatactctgaagaacccgcagacggaatgcctgagtgactgaagaaaatgggtgctaatgcatctaattatcctcattcatgttccccgagggtagggggaaattcacaggcccaacagacttttatagggacctcatcctattctcagcaaggctatggttgcgaatcaaagttgtatagccttgaccatggccatgagaaaccacaagacaa

SEQ ID NO: 3820 - DNA, 8486 bp, Homo sapiens
  source 1..8486: mol_type = unassigned DNA
agataaggaattgtataggaggaaacttcatagtaaacattgaacctctgtgcttgtctccttgttgaagttgggggttcatgtttattgttccaagggagcctcatcaaaaccacttttaaagcattgagaatccaaataaataccatggatcatacaggattggggataagtcttgaggtctccccgagaaggagaagttctttaatttggtaattttagggtaatggttggatgctctctggattaatggaaaccttcaggggtacttttaggcagagtataacccagtgaagagagcattattatatggtggaatgcgagagtctcagcctgaagcagaaattcctctccaagacaccactgcagaagcattcacaatgctactcaaatatatctacactgggcgggcaacgctgacagatgagaaggaggaggtgctgctggactttttgagcctggctcataaatatggatttccagagctagaggattctacctctgagtatctctgcaccatacttaacattcagaatgtctgcatgacttttgatgttgccagtctctactcacttcccaagttaacttgtatgtgctgcatgtttatggataggaatgctcaggaagtcctctcaagtgaaggtttcctctccctttctaagacagcacttttaaacatcgtgttaagagactcatttgcagctcccgaaaaagatattttcctagccttattaaactggtgtaagcacaattcaaaggagaatcatgctgaaatcatgcaggctgtgcgtttacctctcatgagcctcacagagcttctgaatgttgtgaggccttcaggactgctgtctcctgatgccatcctggatgccattaaagtgcgatctgagagccgggatatggacctcaattatagaggcatgctcataccagaagaaaacattgcaactatgaagtatggagcccaagttgtaaagggggagctgaaatcagccttattagatggtgatactcaaaattatgatttggatcatggattttcaaggcacccaattgatgatgactgccgttccggcatcgagattaagctaggtcagccatccattatcaatcacatacggatactcttgtgggaccgagatagccggtcttactcatacttcattgaagtgtcaatggatgaacttgattgggtcagagtgatagatcattcacaatatctgtgtcgttcttggcagaaattatattttccagcccgtgtctgcaggtatattcgaattgttgggactcacaacacagtgaacaagatttttcacattgtggcttttgaatgtatgtttacaaacaaaaccttcactcttgagaaggggctgatagttcccatggagaatgttgcaacaattgctgattgtgccagtgtgattgaaggagtcagtcggagccgaaatgccttgctgaatggggacactaagaattatgactgggattctggctacacatgtcaccagctaggaagtggtgcgattgtggttcagttggcacaaccgtacatgattgggtcaatacggttactactttgggattgtgatgatcgaagctatagctactacgttgaggtttctaccaaccagcaacagtggaccatggttgctgacagaactaaagtctcctgcaagtcctggcagtcagtaacttttgaaaggcagcctgcctccttcatccgtatcgttgggacacacaacacagcaaatgaggtgttccactgtgtccactttgagtgtccagagcagcagagcagccagaaggaggaaaatagtgaggaatcggggacaggggacaccagcctggccggtcagcagctcgactcccatgcgctgcgggcgcctagtggcagctcactaccctccagcccaggctccaactcacgctcccccaaccggcagcaccaataaaggaggcagcgggcctggtgtgacttggtgggctcgggcaacggcaggaaacggtctcctccctgagcaggggtctctgttgactgcccccacctctgcccctttccagggaggagccgacctagctgcaaaagcagacaccgaacaggttttctcccaaggacagaaaggggctgctttgttcttctcaatttatccaaatcaggcaggtctcaagggggagaaaatgggtcttcaatcttcatcaagtccaccattaacaccctacctctctaatctagcccaggcgcagggaacaggaggaagtcatagacaggcctgtgttggaatacaaaaatggcacgcaaacactcaggcggaggagaaagccattgggcctttgctacctggaggcaccctttaggaatgggcctccatagagtgttcattctgctggaatacattgccctggcaactaaatgattttttatttgttttagttattctccactcagtgaatcataggtgttccggatctatttgaaatgctcaaacagcaaatcactagttttaatcccttttgatgctataattttccttccttggttttgaacggttcagcttgcggggacagagacccatcgtgcatgtctcctaaatgagacacggatgcagctcatcctggcacttgggccacagaggaagtgccacaaatgcacacaagcaaatcaacctgtggacactggagttaatagtcactcgtgtggctgagttactcacctgtcattcctgacatggatccagcctttaagcttgggaggctgacaaggaaatagttactatgcccgctgctaattcactgttccgaagtccatgtagataaacatataccgagttctggcgtggccaaacctgccggggactgccgtggcttagctgcccctccagttgtgtttatcgaagcattggagaggcagccacctgcccatcagcgtcaggaacgcagaactgggactccgtgcttcccccacaccacagtactcaactggggactgaaaaatagcagttccaagaagcttttctcctaatcctcatcaaaaggacctcatttgacgatggtggcttgatgtggctccgtctcctacttagtgatttccattccagtgctgcctgccctgggtaactgcgcacaacattgcctgcccctccgctgtccccagagctccggcctctgtcgccatcagcatcagcctgggagtctccccaggacggcatggcacgtgagcagcactgcagtccttgggtcttcggcgccaacctgcaaccctgatcaaaggagggtgagggcgtgggagtttcctttcaggtgtgtcaaagacatatcagctgcgctctagaaagagccaacgggtcagccgcttcctcctagtttaacttgattttgagtgatttgtccatatggaaatagtagggtagcatcaaactgcgtgattaaattggaagactgtctttccgtgtgaacacaggatggcagacatcagagggctaccggggcagggtggacacgttcctgaggagaagccagggtctgcagctctccatcctccccggtagctccagctgcagggctgagctgcttcctatcccctcagctctgatctctgccacttccctgttgtgtgggagagtggaacactcctgggatgccaggcatttcataatgggaggaggctcctgtaaggaacggtgggcgcccgctcacagtggggggccctccagcatggttgctgactctgtcagcccccagccccgggttgccaattagccagagagctcctgcacacacagcacttccttccccagtgtgttttctacccagatggggacaaaggagccagacagtcatatcaagggcagagttcaaacattttgaaatgagccattcacatgcttctttttaaacatgggcatcacctgcccagaggcccttggcctgaagcagcatgctgctgaccttgggaagagagggtgggctggtgggggtgctggaggagctgcccggccctgcatctgcaaccctccagtcccctgcccacagagcacgcagagccctcctgtgctccgggaacgagatagcagcttggcagctcggcctcgcatctgaaaaggaatacgctgcaaagcctcggccctagacccacatctgcagctccctggcctgtggcggttctttccttcggggcatgcccttccagatctctgtccctcctgtcttctagcactttaaagatgccccttatcatcagataaagagaagtatggggacgatggggtggcactaacagtagatgtcattggtgaggactgatggcaaagtctcattccctcacagccgcgctgccagctcgcctccccctcgctttgctgggagcctgccctggactccaaaaggacacgggttcacctcctttcccaggctggaggggtactgcccttccctgaggggccttctgactggggcaggaactcttttcgtgtgtccagctgggcctggaggccaagtcaaggtgtgtcacaccacacaccagggcaaggacctcatctccagggaacagggacaagtgagtggctaccagaaagtccccgggcagcctggagttccccagagcctggctggtcctacagagcacttctcccctgggccaccaggaccaaagcgacctaaacacttgaagctaaaagcaagtgctgatgatgggatgggctggcacgtggctgggagggctcctgggcaccacagagccctcagcccagcagagagtggaggctcagtccgtggggagcgggggttgtgaaggagacatggccaagcccctggtcggggagataagctcccccatgcccaggccagccccaggggcaacaagccaacatggagagaggtggcaggtgaggctgacaggtgggtgcctgtggcctgggcccatgagggcaatggtcctcagtaaccaatggaaaggacacaagggcgccatggtcaccaccacccaggcaaagaaatgggaggtggccagcacccccacccttcacttttcattattattattattattattattattattttttttttttttttttttttttttttttttttttgagagtagaaaggcaacttcattggagcttttggggaaaaaagccttcaaagtcaccttctggcagctctggggagggtcatttggggtggactgagagtgtagggcaggtagggtgtgtgctgggcagcagctgtgtccatgcagccagcacccagcagggcagtctcacaggagccgttgtgagcactttggacttgaagcagctatgaaccaccccccgcccccaccgtctctccctctcacacacacacacacacacacacacacacacacacacacacacacacacccgttttaccattttctcagtgctttttctgctttcattcctttgattttagttagaagcacaagccatgatggatgtgggactcttctcaattgctctttaaattgtcactttttaaatcctattaaatgaagtgtcgattcctgacaaatacattaaaagtgttttattcctagaagagttgggaaaagaaattattttcagcaagagtaggatgtttgttaaactgattccttggcaaaaaagagaaaaaaagcttttgaattgtgcaaaaaattgcccagtattatgctgtcgccccagttgtcaaactgctgtgcagatggctccagcccagtcaacttcaccttctttttaatttagaagataacaaaattgtaatcacttatcctttccagagccaagggggaaaaggaaggtataatctacaataaaaagcgagcgttctgtgtactgaggccacttggtgataaagagatggagcgctcccctcacagacttcaattaagaacctccctttggacagggaagaaaggtgtcaaagaggaaaagaaaattaaatttgcttccttccaggagtttttcctcattagtgcttgcttgtcggtgttattattttaatcttaccttctatgtggtgaccagctcctccgagcgatgcccaggtcgggcacggcccgggcagggcaggtctgcagcgatgccgtggcagaggtgggcatactccatttgttttggcagctgcagccattgattctgcatatttttcctgacaacagccccggcaggagttcagttaggaatttaaagtgcagttcatggttctgtgccaccgtggcttttattattataatattaaattagaagttgtcctagtgcctggtgtttgctcagagtttccagaagagagggaagggcaaggtttaaatggcatgcaggacaactggaatgcccccatctctctcgctgacacggatccagtcatacctggggctggacgggatttggaggccctggtcatttgcagagtgaatggtgaagggcgcggaaaaggtttgcttggaggaaagaccggttgcagaggcgaggcggagggaggaggggcggaggcagcaggtctttgtttgtggtaggtctctggcttccatcagggaggaggaaagaggctgtgcccttcctggctcttggctgcaccactgaggacgctccgagggacagcgtgctcacccatcctttgcacagtgctggccccaagccccacggccttccagctaggattttctgctgggctcatgcagaggcaggggacaggtgcatggaagagccgccccacccgacacaccattgtttgaaaatcactgttctctttactcacttaaaaaagtgtacagggaacacctgttcctggcataatgctccaacctcgcggaaggggccaggtgcccttcatctggctctggctgcttccgacctgggcccacgtcatcgttcacgtcctctgtgaccaccactggtcacggtgctccctggcccagcctccaacccacccagcaccctggcatctcccaggccagtctgctgcacccagcgagcttccagtcagaagccaggctgaacggccctcctgccccatcagcttcgtgtcttcttttttttaaagaactgaaatagtccccaagaggcctcatggcctgaagactcacaatcatccacctgtaatttatgataaatgtctgggagcatttaccatttgcgtccgtgagtatttatagccctgaatgggcgggggggagggggggtggaggaggccctgcagccaggagctacacacctgtccccactagtgtcccctggttgacagagccccctcagcctccccaaggctgtcactgcggctgtgacagctgaggagtgccgcctttgaaagccagtggacagtcgctccactagggggagaggccctggccctggcgcagaggaggcgttgcgaggcgggacgggggctggaggggctgagcagccttcagggcagggactgggccctgggtcactggagacgttgatattagtccgtctgctgccaaattgctccccaccacatgagccccaggggtttatgtcccaggaaggcgagggtgcccatctgagcggaattgggaggggacggcaccagctcatctccctcagggcctttgcctcctggtgctgccctggtggctgctcctgcaccacagcccctgatggctgctgctagtcctgagttgctgggtttacccccagcccacacttcccacctgggcctgagggtgcggccagtgccctagtcctagccactacaggagtcattctgagacctgctggaggccatggggtcttcccaggcccctcaatcagctgcttccagggtcagcagggcagggtgctgccagtaaggtcctcagggagcacagcccggccgcccaggctgggggatactggggcagagcttccaggtctgtggggcctgatctctccccaaggctctccaggccttggtgcgccctccacagtgaccttcagagaggctgcaccccctcagaagaacagtgagaaatctctccatcacacgctccctggtccttatgtccctgaggccacccttccccaccccccagtgcctggagaagcgtgagactctggaggggcgccaggaggccaggggtcctcagggctaggcctggagctcggcccaagagctgcttttgcgaagcctgtcttgaatccggattcaccagagaacaagagcctcccagcctttggcgtttctgggcctgtaaagatgtgtgtacctcccaggccactctgatgcaagggcagggaccatgccaggcctgggttgggaatggctctgtgactccagaagctccgtctaaaactccaaagatgcccaaaaggctgtgctgctatgtggaatgtgtattatttgtgagcacgatgcggcttcttcctcattttgcagagcaacctaagcgggcagatgtacaaaccgtgtgttcgaaacccctgagtccatgtgtgtgaaaatgcaggttttctcttagaaataaagtggtgacttgtgctgta

SEQ ID NO: 3821 - DNA, 1839 bp, Homo sapiens
  source 1..1839: mol_type = unassigned DNA
atgagtaacagccaccctcttcgcccctttactgcagtgggggaaattgatcatgtgcacattttgtctgaacatattggtgccttgttgattggggaagaatatggcgacgtcacattcgtggtggaaaagaaacgttttcctgcccacagggtaattttagcagccaggtgccaatattttcgagcattattatatggtggaatgcgagagtctcagcctgaagcagaaattcctctccaagacaccactgcagaagcattcacaatgctactcaaatatatctacactgggcgggcaacgctgacagatgagaaggaggaggtgctgctggactttttgagcctggctcataaatatggatttccagagctagaggattctacctctgagtatctctgcaccatacttaacattcagaatgtctgcatgacttttgatgttgccagtctctactcacttcccaagttaacttgtatgtgctgcatgtttatggataggaatgctcaggaagtcctctcaagtgaaggtttcctctccctttctaagacagcacttttaaacatcgtgttaagagactcatttgcagctcccgaaaaagatattttcctagccttattaaactggtgtaagcacaattcaaaggagaatcatgctgaaatcatgcaggctgtgcgtttacctctcatgagcctcacagagcttctgaatgttgtgaggccttcaggactgctgtctcctgatgccatcctggatgccattaaagtgcgatctgagagccgggatatggacctcaattatagaggcatgctcataccagaagaaaacattgcaactatgaagtatggagcccaagttgtaaagggggagctgaaatcagccttattagatggtgatactcaaaattatgatttggatcatggattttcaaggcacccaattgatgatgactgccgttccggcatcgagattaagctaggtcagccatccattatcaatcacatacggatactcttgtgggaccgagatagccggtcttactcatacttcattgaagtgtcaatggatgaacttgattgggtcagagtgatagatcattcacaatatctgtgtcgttcttggcagaaattatattttccagcccgtgtctgcaggtatattcgaattgttgggactcacaacacagtgaacaagatttttcacattgtggcttttgaatgtatgtttacaaacaaaaccttcactcttgagaaggggctgatagttcccatggagaatgttgcaacaattgctgattgtgccagtgtgattgaaggagtcagtcggagccgaaatgccttgctgaatggggacactaagaattatgactgggattctggctacacatgtcaccagctaggaagtggtgcgattgtggttcagttggcacaaccgtacatgattgggtcaatacggttactactttgggattgtgatgatcgaagctatagctactacgttgaggtttctaccaaccagcaacagtggaccatggttgctgacagaactaaagtctcctgcaagtcctggcagtcagtaacttttgaaaggcagcctgcctccttcatccgtatcgttgggacacacaacacagcaaatgaggtgttccactgtgtccactttgagtgtccagagcagcagagcagccagaaggaggaaaatagtgaggaatcggggacaggggacaccagcctggccggtcagcagctcgactcccatgcgctgcgggcgcctagtggcagctcactaccctccagcccaggctccaactcacgctcccccaaccggcagcaccaataa

SEQ ID NO: 3822 - DNA, 1635 bp, Homo sapiens
  source 1..1635: mol_type = unassigned DNA
atgcgagagtctcagcctgaagcagaaattcctctccaagacaccactgcagaagcattcacaatgctactcaaatatatctacactgggcgggcaacgctgacagatgagaaggaggaggtgctgctggactttttgagcctggctcataaatatggatttccagagctagaggattctacctctgagtatctctgcaccatacttaacattcagaatgtctgcatgacttttgatgttgccagtctctactcacttcccaagttaacttgtatgtgctgcatgtttatggataggaatgctcaggaagtcctctcaagtgaaggtttcctctccctttctaagacagcacttttaaacatcgtgttaagagactcatttgcagctcccgaaaaagatattttcctagccttattaaactggtgtaagcacaattcaaaggagaatcatgctgaaatcatgcaggctgtgcgtttacctctcatgagcctcacagagcttctgaatgttgtgaggccttcaggactgctgtctcctgatgccatcctggatgccattaaagtgcgatctgagagccgggatatggacctcaattatagaggcatgctcataccagaagaaaacattgcaactatgaagtatggagcccaagttgtaaagggggagctgaaatcagccttattagatggtgatactcaaaattatgatttggatcatggattttcaaggcacccaattgatgatgactgccgttccggcatcgagattaagctaggtcagccatccattatcaatcacatacggatactcttgtgggaccgagatagccggtcttactcatacttcattgaagtgtcaatggatgaacttgattgggtcagagtgatagatcattcacaatatctgtgtcgttcttggcagaaattatattttccagcccgtgtctgcaggtatattcgaattgttgggactcacaacacagtgaacaagatttttcacattgtggcttttgaatgtatgtttacaaacaaaaccttcactcttgagaaggggctgatagttcccatggagaatgttgcaacaattgctgattgtgccagtgtgattgaaggagtcagtcggagccgaaatgccttgctgaatggggacactaagaattatgactgggattctggctacacatgtcaccagctaggaagtggtgcgattgtggttcagttggcacaaccgtacatgattgggtcaatacggttactactttgggattgtgatgatcgaagctatagctactacgttgaggtttctaccaaccagcaacagtggaccatggttgctgacagaactaaagtctcctgcaagtcctggcagtcagtaacttttgaaaggcagcctgcctccttcatccgtatcgttgggacacacaacacagcaaatgaggtgttccactgtgtccactttgagtgtccagagcagcagagcagccagaaggaggaaaatagtgaggaatcggggacaggggacaccagcctggccggtcagcagctcgactcccatgcgctgcgggcgcctagtggcagctcactaccctccagcccaggctccaactcacgctcccccaaccggcagcaccaataa

SEQ ID NO: 3823 - DNA, 8525 bp, Homo sapiens
  source 1..8525: mol_type = unassigned DNA
agccggggcggcggcgaggacggcggccacggaagcggccaagggggcggtggcgcagagaggggtgcggagcgggcggaagaggcgtctgtgtcgcagcttggtctcagaggagcatcgctgggaacaacgactatcgtctattccacaagatgagtaacagccaccctcttcgcccctttactgcagtgggggaaattgatcatgtgcacattttgtctgaacatattggtgccttgttgattggggaagaatatggcgacgtcacattcgtggtggaaaagaaacgttttcctgcccacagggtaattttagcagccaggtgccaatattttcgagcattattatatggtggaatgcgagagtctcagcctgaagcagaaattcctctccaagacaccactgcagaagcattcacaatgctactcaaatatatctacactgggcgggcaacgctgacagatgagaaggaggaggtgctgctggactttttgagcctggctcataaatatggatttccagagctagaggattctacctctgagtatctctgcaccatacttaacattcagaatgtctgcatgacttttgatgttgccagtctctactcacttcccaagttaacttgtatgtgctgcatgtttatggataggaatgctcaggaagtcctctcaagtgaaggtttcctctccctttctaagacagcacttttaaacatcgtgttaagagactcatttgcagctcccgaaaaagatattttcctagccttattaaactggtgtaagcacaattcaaaggagaatcatgctgaaatcatgcaggctgtgcgtttacctctcatgagcctcacagagcttctgaatgttgtgaggccttcaggactgctgtctcctgatgccatcctggatgccattaaagtgcgatctgagagccgggatatggacctcaattatagaggcatgctcataccagaagaaaacattgcaactatgaagtatggagcccaagttgtaaagggggagctgaaatcagccttattagatggtgatactcaaaattatgatttggatcatggattttcaaggcacccaattgatgatgactgccgttccggcatcgagattaagctaggtcagccatccattatcaatcacatacggatactcttgtgggaccgagatagccggtcttactcatacttcattgaagtgtcaatggatgaacttgattgggtcagagtgatagatcattcacaatatctgtgtcgttcttggcagaaattatattttccagcccgtgtctgcaggtatattcgaattgttgggactcacaacacagtgaacaagatttttcacattgtggcttttgaatgtatgtttacaaacaaaaccttcactcttgagaaggggctgatagttcccatggagaatgttgcaacaattgctgattgtgccagtgtgattgaaggagtcagtcggagccgaaatgccttgctgaatggggacactaagaattatgactgggattctggctacacatgtcaccagctaggaagtggtgcgattgtggttcagttggcacaaccgtacatgattgggtcaatacggttactactttgggattgtgatgatcgaagctatagctactacgttgaggtttctaccaaccagcaacagtggaccatggttgctgacagaactaaagtctcctgcaagtcctggcagtcagtaacttttgaaaggcagcctgcctccttcatccgtatcgttgggacacacaacacagcaaatgaggtgttccactgtgtccactttgagtgtccagagcagcagagcagccagaaggaggaaaatagtgaggaatcggggacaggggacaccagcctggccggtcagcagctcgactcccatgcgctgcgggcgcctagtggcagctcactaccctccagcccaggctccaactcacgctcccccaaccggcagcaccaataaaggaggcagcgggcctggtgtgacttggtgggctcgggcaacggcaggaaacggtctcctccctgagcaggggtctctgttgactgcccccacctctgcccctttccagggaggagccgacctagctgcaaaagcagacaccgaacaggttttctcccaaggacagaaaggggctgctttgttcttctcaatttatccaaatcaggcaggtctcaagggggagaaaatgggtcttcaatcttcatcaagtccaccattaacaccctacctctctaatctagcccaggcgcagggaacaggaggaagtcatagacaggcctgtgttggaatacaaaaatggcacgcaaacactcaggcggaggagaaagccattgggcctttgctacctggaggcaccctttaggaatgggcctccatagagtgttcattctgctggaatacattgccctggcaactaaatgattttttatttgttttagttattctccactcagtgaatcataggtgttccggatctatttgaaatgctcaaacagcaaatcactagttttaatcccttttgatgctataattttccttccttggttttgaacggttcagcttgcggggacagagacccatcgtgcatgtctcctaaatgagacacggatgcagctcatcctggcacttgggccacagaggaagtgccacaaatgcacacaagcaaatcaacctgtggacactggagttaatagtcactcgtgtggctgagttactcacctgtcattcctgacatggatccagcctttaagcttgggaggctgacaaggaaatagttactatgcccgctgctaattcactgttccgaagtccatgtagataaacatataccgagttctggcgtggccaaacctgccggggactgccgtggcttagctgcccctccagttgtgtttatcgaagcattggagaggcagccacctgcccatcagcgtcaggaacgcagaactgggactccgtgcttcccccacaccacagtactcaactggggactgaaaaatagcagttccaagaagcttttctcctaatcctcatcaaaaggacctcatttgacgatggtggcttgatgtggctccgtctcctacttagtgatttccattccagtgctgcctgccctgggtaactgcgcacaacattgcctgcccctccgctgtccccagagctccggcctctgtcgccatcagcatcagcctgggagtctccccaggacggcatggcacgtgagcagcactgcagtccttgggtcttcggcgccaacctgcaaccctgatcaaaggagggtgagggcgtgggagtttcctttcaggtgtgtcaaagacatatcagctgcgctctagaaagagccaacgggtcagccgcttcctcctagtttaacttgattttgagtgatttgtccatatggaaatagtagggtagcatcaaactgcgtgattaaattggaagactgtctttccgtgtgaacacaggatggcagacatcagagggctaccggggcagggtggacacgttcctgaggagaagccagggtctgcagctctccatcctccccggtagctccagctgcagggctgagctgcttcctatcccctcagctctgatctctgccacttccctgttgtgtgggagagtggaacactcctgggatgccaggcatttcataatgggaggaggctcctgtaaggaacggtgggcgcccgctcacagtggggggccctccagcatggttgctgactctgtcagcccccagccccgggttgccaattagccagagagctcctgcacacacagcacttccttccccagtgtgttttctacccagatggggacaaaggagccagacagtcatatcaagggcagagttcaaacattttgaaatgagccattcacatgcttctttttaaacatgggcatcacctgcccagaggcccttggcctgaagcagcatgctgctgaccttgggaagagagggtgggctggtgggggtgctggaggagctgcccggccctgcatctgcaaccctccagtcccctgcccacagagcacgcagagccctcctgtgctccgggaacgagatagcagcttggcagctcggcctcgcatctgaaaaggaatacgctgcaaagcctcggccctagacccacatctgcagctccctggcctgtggcggttctttccttcggggcatgcccttccagatctctgtccctcctgtcttctagcactttaaagatgccccttatcatcagataaagagaagtatggggacgatggggtggcactaacagtagatgtcattggtgaggactgatggcaaagtctcattccctcacagccgcgctgccagctcgcctccccctcgctttgctgggagcctgccctggactccaaaaggacacgggttcacctcctttcccaggctggaggggtactgcccttccctgaggggccttctgactggggcaggaactcttttcgtgtgtccagctgggcctggaggccaagtcaaggtgtgtcacaccacacaccagggcaaggacctcatctccagggaacagggacaagtgagtggctaccagaaagtccccgggcagcctggagttccccagagcctggctggtcctacagagcacttctcccctgggccaccaggaccaaagcgacctaaacacttgaagctaaaagcaagtgctgatgatgggatgggctggcacgtggctgggagggctcctgggcaccacagagccctcagcccagcagagagtggaggctcagtccgtggggagcgggggttgtgaaggagacatggccaagcccctggtcggggagataagctcccccatgcccaggccagccccaggggcaacaagccaacatggagagaggtggcaggtgaggctgacaggtgggtgcctgtggcctgggcccatgagggcaatggtcctcagtaaccaatggaaaggacacaagggcgccatggtcaccaccacccaggcaaagaaatgggaggtggccagcacccccacccttcacttttcattattattattattattattattattattttttttttttttttttttttttttttttttttttgagagtagaaaggcaacttcattggagcttttggggaaaaaagccttcaaagtcaccttctggcagctctggggagggtcatttggggtggactgagagtgtagggcaggtagggtgtgtgctgggcagcagctgtgtccatgcagccagcacccagcagggcagtctcacaggagccgttgtgagcactttggacttgaagcagctatgaaccaccccccgcccccaccgtctctccctctcacacacacacacacacacacacacacacacacacacacacacacacacccgttttaccattttctcagtgctttttctgctttcattcctttgattttagttagaagcacaagccatgatggatgtgggactcttctcaattgctctttaaattgtcactttttaaatcctattaaatgaagtgtcgattcctgacaaatacattaaaagtgttttattcctagaagagttgggaaaagaaattattttcagcaagagtaggatgtttgttaaactgattccttggcaaaaaagagaaaaaaagcttttgaattgtgcaaaaaattgcccagtattatgctgtcgccccagttgtcaaactgctgtgcagatggctccagcccagtcaacttcaccttctttttaatttagaagataacaaaattgtaatcacttatcctttccagagccaagggggaaaaggaaggtataatctacaataaaaagcgagcgttctgtgtactgaggccacttggtgataaagagatggagcgctcccctcacagacttcaattaagaacctccctttggacagggaagaaaggtgtcaaagaggaaaagaaaattaaatttgcttccttccaggagtttttcctcattagtgcttgcttgtcggtgttattattttaatcttaccttctatgtggtgaccagctcctccgagcgatgcccaggtcgggcacggcccgggcagggcaggtctgcagcgatgccgtggcagaggtgggcatactccatttgttttggcagctgcagccattgattctgcatatttttcctgacaacagccccggcaggagttcagttaggaatttaaagtgcagttcatggttctgtgccaccgtggcttttattattataatattaaattagaagttgtcctagtgcctggtgtttgctcagagtttccagaagagagggaagggcaaggtttaaatggcatgcaggacaactggaatgcccccatctctctcgctgacacggatccagtcatacctggggctggacgggatttggaggccctggtcatttgcagagtgaatggtgaagggcgcggaaaaggtttgcttggaggaaagaccggttgcagaggcgaggcggagggaggaggggcggaggcagcaggtctttgtttgtggtaggtctctggcttccatcagggaggaggaaagaggctgtgcccttcctggctcttggctgcaccactgaggacgctccgagggacagcgtgctcacccatcctttgcacagtgctggccccaagccccacggccttccagctaggattttctgctgggctcatgcagaggcaggggacaggtgcatggaagagccgccccacccgacacaccattgtttgaaaatcactgttctctttactcacttaaaaaagtgtacagggaacacctgttcctggcataatgctccaacctcgcggaaggggccaggtgcccttcatctggctctggctgcttccgacctgggcccacgtcatcgttcacgtcctctgtgaccaccactggtcacggtgctccctggcccagcctccaacccacccagcaccctggcatctcccaggccagtctgctgcacccagcgagcttccagtcagaagccaggctgaacggccctcctgccccatcagcttcgtgtcttcttttttttaaagaactgaaatagtccccaagaggcctcatggcctgaagactcacaatcatccacctgtaatttatgataaatgtctgggagcatttaccatttgcgtccgtgagtatttatagccctgaatgggcgggggggagggggggtggaggaggccctgcagccaggagctacacacctgtccccactagtgtcccctggttgacagagccccctcagcctccccaaggctgtcactgcggctgtgacagctgaggagtgccgcctttgaaagccagtggacagtcgctccactagggggagaggccctggccctggcgcagaggaggcgttgcgaggcgggacgggggctggaggggctgagcagccttcagggcagggactgggccctgggtcactggagacgttgatattagtccgtctgctgccaaattgctccccaccacatgagccccaggggtttatgtcccaggaaggcgagggtgcccatctgagcggaattgggaggggacggcaccagctcatctccctcagggcctttgcctcctggtgctgccctggtggctgctcctgcaccacagcccctgatggctgctgctagtcctgagttgctgggtttacccccagcccacacttcccacctgggcctgagggtgcggccagtgccctagtcctagccactacaggagtcattctgagacctgctggaggccatggggtcttcccaggcccctcaatcagctgcttccagggtcagcagggcagggtgctgccagtaaggtcctcagggagcacagcccggccgcccaggctgggggatactggggcagagcttccaggtctgtggggcctgatctctccccaaggctctccaggccttggtgcgccctccacagtgaccttcagagaggctgcaccccctcagaagaacagtgagaaatctctccatcacacgctccctggtccttatgtccctgaggccacccttccccaccccccagtgcctggagaagcgtgagactctggaggggcgccaggaggccaggggtcctcagggctaggcctggagctcggcccaagagctgcttttgcgaagcctgtcttgaatccggattcaccagagaacaagagcctcccagcctttggcgtttctgggcctgtaaagatgtgtgtacctcccaggccactctgatgcaagggcagggaccatgccaggcctgggttgggaatggctctgtgactccagaagctccgtctaaaactccaaagatgcccaaaaggctgtgctgctatgtggaatgtgtattatttgtgagcacgatgcggcttcttcctcattttgcagagcaacctaagcgggcagatgtacaaaccgtgtgttcgaaacccctgagtccatgtgtgtgaaaatgcaggttttctcttagaaataaagtggtgacttgtgctgta

SEQ ID NO: 3824 - DNA, 573 bp, Homo sapiens
  source 1..573: mol_type = unassigned DNA
agagaggggtgcggagcgggcggaagaggcgtctgtgtcgcagcttggtctcagaggagcatcgctgggctcgtctcaatttggccctgctgtatttcaagtgctcggtagccacatgtggcaagtggccatcactgtggccattgcagctccaaagggacaggagagttgatggaaattagacactgcattctacagcctcatgagcccaagagagcaaaccttggtttgctgaaaatcagcagataaggcaattgaaagggaagaagaacaacgactatcgtctattccacaagatgagtaacagccaccctcttcgcccctttactgcagtgggggaaattgatcatgtgcacattttgtctgaacatattggtgccttgttgattggggaagaatatggcgacgtcacattcgtggtggaaaagaaacgttttcctgcccacagggtaattttagcagccaggtgccaatattttcgagcattattatatggtggaatgcgagagtctcagcctgaagcagaaattcctctccaagacaccactgcagaagcattcacaatgctactca

SEQ ID NO: 3825 - DNA, 2034 bp, Homo sapiens
  source 1..2034: mol_type = unassigned DNA
catgtttattgttccaagggagcctcatcaaaaccacttttaaagcattgagaatccaaataaataccatggatcatacaggattggggataagtcttgaggtctccccgagaaggagaagttctttaatttggtaattttagggtaatggttggatgctctctggattaatggaaaccttcaggggtacttttaggcagagtataacccagtgaagagcaaatcctatttgagggtttcttcatgtgtttcttccctgatgtgcagagcattattatatggtggaatgcgagagtctcagcctgaagcagaaattcctctccaagacaccactgcagaagcattcacaatgctactcaaatatatctacactgggcgggcaacgctgacagatgagaaggaggaggtgctgctggactttttgagcctggctcataaatatggatttccagagctagaggattctacctctgagtatctctgcaccatacttaacattcagaatgtctgcatgacttttgatgttgccagtctctactcacttcccaagttaacttgtatgtgctgcatgtttatggataggaatgctcaggaagtcctctcaagtgaaggtttcctctccctttctaagacagcacttttaaacatcgtgttaagagactcatttgcagctcccgaaaaagatattttcctagccttattaaactggtgtaagcacaattcaaaggagaatcatgctgaaatcatgcaggctgtgcgtttacctctcatgagcctcacagagcttctgaatgttgtgaggccttcaggactgctgtctcctgatgccatcctggatgccattaaagtgcgatctgagagccgggatatggacctcaattatagaggcatgctcataccagaagaaaacattgcaactatgaagtatggagcccaagttgtaaagggggagctgaaatcagccttattagatggtgatactcaaaattatgatttggatcatggattttcaaggcacccaattgatgatgactgccgttccggcatcgagattaagctaggtcagccatccattatcaatcacatacggatactcttgtgggaccgagatagccggtcttactcatacttcattgaagtgtcaatggatgaacttgattgggtcagagtgatagatcattcacaatatctgtgtcgttcttggcagaaattatattttccagcccgtgtctgcagtggagatggagtctcactatggtgcccactctggtctcgaactcctgagctcaagcaatcctccctccttggccttccaaagtgcaggtatattcgaattgttgggactcacaacacagtgaacaagatttttcacattgtggcttttgaatgtatgtttacaaacaaaaccttcactcttgagaaggggctgatagttcccatggagaatgttgcaacaattgctgattgtgccagtgtgattgaaggagtcagtcggagccgaaatgccttgctgaatggggacactaagaattatgactgggattctggctacacatgtcaccagctaggaagtggtgcgattgtggttcagttggcacaaccgtacatgattgggtcaatacggttactactttgggattgtgatgatcgaagctatagctactacgttgaggtttctaccaaccagcaacagtggaccatggttgctgacagaactaaagtctcctgcaagtcctggcagtcagtaacttttgaaaggcagcctgcctccttcatccgtatcgttgggacacacaacacagcaaatgaggtgttccactgtgtccactttgagtgtccagagcagcagagcagccagaaggaggaaaatagtgaggaatcggggacaggggacaccagcctggccggtcagcagctcgactcccatgcgctgcgggcgcctagtggcagctcactaccctccagcccaggctccaactcacgctcccccaaccggcagcaccaataaaggaggcagcgggcctggtgtgactt

SEQ ID NO: 3826 - DNA, 5669 bp, Homo sapiens
  source 1..5669: mol_type = unassigned DNA
gagtgagtcacctgaccgctgccctcgccgcccgccgggcgctctcgcttcagtcagtcgggccgcgccgcgcctcagctctggttgatgataattagaagcatgctttccactgaacttcccgacaacatttgttatgcagaatgtctctgagtgagaactcggtttttgcctatgaatcttctgtgcatagcaccaatgttttactcagccttaatgaccagcggaagaaagatgtgctgtgcgatgtcaccatctttgtggagggacagcggttccgcgctcaccggtccgtgctggcggcatgcagcagttacttccactcaagaatcgtaggccaggctgatggagagctgaacattactcttccagaagaggtgacagttaaaggatttgaacctttaattcagtttgcctacactgctaaactgattttaagtaaagagaatgtggatgaagtgtgcaaatgtgtggagtttttaagtgtacataatattgaggaatcctgctttcagtttctgaaatttaagtttttggactccactgcagaccagcaagaatgcccaagaaaaaaatgcttttcatcacactgtcagaaaacagaccttaaactttcacttttggaccagagggatctagaaactgatgaagtggaggaatttctggaaaataaaaatgttcagactcctcagtgtaaactccgcaggtatcaaggaaatgcaaaagcctcacctcctctacaagacagtgccagtcagacatatgagtccatgtgcttagagaaggatgctgctctggccttgccttctttatgccccaaatacagaaaattccaaaaagcatttggaactgacagagtccgtactggggaatctagtgtcaaagacattcatgcttctgttcagccaaatgaaaggtctgaaaatgaatgcctgggaggagtcccggagtgtagagatttgcaggtgatgttaaaatgtgacgaaagtaaattagcaatggaacctgaagaaacgaagaaagatcctgcttctcagtgcccaactgaaaaatcagaagtgactcctttcccccacaattcttccatagaccctcatggactttattctttgtctcttttacacacatatgaccaatatggtgacttgaattttgctggtatgcaaaacacaacagtgttaacagaaaagcctttgtcaggtacagacgtccaagaaaaaacatttggtgaaagtcaggatttacctttgaaatccgacttgggcaccagggaagatagtagtgttgcatctagtgataggagtagtgtggagcgagaagtggcagaacacctagcaaaaggcttctggagtgacatttgcagcacggacactccttgccaaatgcagttatcacctgctgtggccaaagatggctcagaacagatctcacagaaacggtctgagtgtccgtggttaggtatcaggattagtgagagcccagaaccaggtcaaaggactttcacaacattaagttctgtcaactgcccttttataagtactctgagtactgaaggctgttcaagcaatttggaaattggaaacgatgattatgtttcagaaccccagcaagaaccttgcccatatgcttgtgtcattagcttgggagacgactctgagacggacaccgaaggagacagtgaatcctgttcagccagagaacaagaatgtgaggtaaaactgccattcaatgcacaacggataatttcactgtctcgaaatgattttcagtccttgttgaaaatgcacaagcttactccagaacagctggattgtatccatgatattcgaagaagaagtaaaaacagaattgctgcacagcgctgtcgcaagagaaaacttgactgtatacagaatcttgaatcagaaattgagaagctgcaaagtgaaaaggagagcttgttgaaggaaagagatcacattttgtcaactctgggtgagacaaagcagaacctaactggactttgccagaaagtttgtaaagaagcagctctgagtcaagaacaaatacagatactcgccaagtactcagctgcagattgcccactttcatttttaatttctgaaaaagataaaagtactcctgatggtgaactggcgttaccatcaattttcagtttatctgaccggcctccagcagtgctgcctccctgtgccagaggaaacagtgagcctggctacgcgcgagggcaggagtcccagcagatgtccacagccacctctgagcaagctgggcctgcggaacagtgtcgtcagagtggtgggatctcagatttctgtcagcagatgactgataaatgtactactgatgagtaaacttgcattcacttccttcaaaccatctaattttctcctgaagttttggcagcgtcttgaaagcctaatatgaccatctgttgctcaacaatactgtttttttcctttagtagtttaccataagggaatttcctttaagtcaaccatgatttctccttgatttctacaagagacaaagaaatgattttgcctcctggatatcagaaaaatccatgtgaaaatgtagtaaacctttaaaactcatgttttaaagaataataactctagtaataactcttcctgctattcagaataagtaggagaatgaaaactgcagcatatcagacagcaatttaacagcttgaaacatctacagatagttcctactaaaagaagtggcctgcagaagtttaataatttgacttttttctaatattttagtttgaaagaaaatttcttcccaagcaatgctaatagagttctattcttagaagcagggtgtcagctactgggaatatttttgtagagctgcattgtgaaaaaaagatggtcttacctgaatcttagggctttgttcttcggctcctaaaatcaggctttaagctacattgggaagatttagtaaataggcaagtggttggcctaagacgggggctgcttctcctcttcagtatggactctagaaagtctggctacatgaatagatttaagtgtcactttccctccctgccccccgcttcagtctctaccatatctggtcccatcatggacttcctatttcctggcatttttgtccctttggaagaagaaataggactcagaatacagtggcatgagtgattacactggcagcattatctcaggctccctagaatctggagagcttaccaacatgtaaagctgttcatttttccaccgtgggtcaccaatgccagaaaaccagacatcacggggaaagaatgttgcttactttttaccaggagtgcagttcatttttttcaccctgtttttgaagtcgtattattcacttgtaaaaatgattgtaacagataaaaaatgtatctgcagcaactctgcaggtttgtgaaataggatgaaactcaatctttttctattgtgggtttgcatttgaaaagcaggttgaatccttgctctcttctccaaatttggtgtggtataaagacacacaaatcattttaacttggacatttaaagatcagtcttagtgtttgttcagtcctgttacaaaatagataactgagcacctatcgcataacattttgcggtggcttttagccatgctggggttagatgtgtttgagagtcaaatgaaagctatggatcttctcagcaattaaaaaaaatgcatatattcacattcacagaaacattggcagaacccagttttaatggtacagaggagtagtttatagtgttgatttcaccaaaatcagagggctgaaagagacacttctatagactgcatcctgagcctagtgcagggcttgtctagctaatgtgggcagccaccacccactgtgtatgaacaagtctgaagcaagttggccttgcccttgagagtatatggggaccagtcttcatgtcttggagtaatttgtcaaatgttaccctttttgatcagggtgtagggggaggatattgctagtatattttcagtggtttgtatgttctctctgtcactgacttatttgtaagagaaaattagttggacttgtttattttctagtagcttttataagtacactcaagaatttgtcagggagaataattctgatagtgcatcccatactgcaaaagaatttgtgtgtgtgtgtgtgtgtgtgtgtgtgtgtgtgtatgtgtatgtatacatatatatctctccatataggtatttctttgatacttgtaattttaaatttcagcttcacgatataaaataatataagaacttctggtttacaaaatgtaaaatcttaagccaatggaacccttgatttcctacctcagtgtacacccaactattggttgtatcagtttgtgtatgtgcaaatgtcaaataatcttttgctttaattgctactgtacttgctttgaaagattacctactattttatgataaaatgtagttgtctccagagcttaaatataatttgtaaagcacttggtttaaatttctctctacctataaacagtttagcattaagggtttctattaatgacacagaattattggccaagtgtaatttcttaaaatttagcattactttaaatagccagcatgtaatacaagtaactacactacctcatatctacatgattttcaagttgtaatgcagatggacagataaaaaagattttacgtttgtcttttggccataagtgggaaagttttctgtatattgcatagcattacacatttatgcctattttaacattaacttctaaagaagttttttctaagaaaatgtttcaaggcaatattttttttgaggctgccgaagacaaatgacaggattatgagtatacagtgtatgccttttccttcatgcagaattttgaaatgttttcagtttgtatattgcatattcacatgatcattgttcactattttatgaactggccttctcaatgtttgatgattttttaaaagctgttatgttgaattcagtaaaataacattaccttattttttttcttattcaaattctggaactatagcaaataattcgttaaattgtcatattcaaaacaaatgtggatacagtcttggttctccatctgtaattttttttaacagtttgctatagcttactgcttaactaattttaaataaggaaataagtatgttagatgcagtagacgatacaggttgcatgtggacactcagtcacattaacaacttgggaaaaaaatggcaatgttacggtgaattctcaggtgaacttttttcagttataaaacatctattttgaatctgtaaatattttaaatgttttattaaggcatgtaataaactattctttgaaacttgttgggtagaatgaaaattaaagccataatggtagaagatggcatactgattataaaagaagcagaaaaacattgatttttttatatctttcataatataattttctaacaatgcaataaaaccactaaacttttgtgtccatattttactgagaccatgtttcattaaaagcatagtttcatagtatttaatttacatttctccctaatgttcttacccaaatgtacctgaactaaaaaatgttagatgttggtgataagttgacagttaaataaaattctctaaaattgcttctaattgaa

SEQ ID NO: 3827 - DNA, 5769 bp, Homo sapiens
  source 1..5769: mol_type = unassigned DNA
gtctactcagcccggtggctgtcgcgcgtggaatcgcgtaagaaaagccgagtttgtggctggggagagaaggccaccgtgctgagctggatttagcgaagactggttttggggaccggagagcccaggactccctttgttggagttttgcccacgcgttgtaattaagcctcgcacaatatggttgatgataattagaagcatgctttccactgaacttcccgacaacatttgttatgcagaatgtctctgagtgagaactcggtttttgcctatgaatcttctgtgcatagcaccaatgttttactcagccttaatgaccagcggaagaaagatgtgctgtgcgatgtcaccatctttgtggagggacagcggttccgcgctcaccggtccgtgctggcggcatgcagcagttacttccactcaagaatcgtaggccaggctgatggagagctgaacattactcttccagaagaggtgacagttaaaggatttgaacctttaattcagtttgcctacactgctaaactgattttaagtaaagagaatgtggatgaagtgtgcaaatgtgtggagtttttaagtgtacataatattgaggaatcctgctttcagtttctgaaatttaagtttttggactccactgcagaccagcaagaatgcccaagaaaaaaatgcttttcatcacactgtcagaaaacagaccttaaactttcacttttggaccagagggatctagaaactgatgaagtggaggaatttctggaaaataaaaatgttcagactcctcagtgtaaactccgcaggtatcaaggaaatgcaaaagcctcacctcctctacaagacagtgccagtcagacatatgagtccatgtgcttagagaaggatgctgctctggccttgccttctttatgccccaaatacagaaaattccaaaaagcatttggaactgacagagtccgtactggggaatctagtgtcaaagacattcatgcttctgttcagccaaatgaaaggtctgaaaatgaatgcctgggaggagtcccggagtgtagagatttgcaggtgatgttaaaatgtgacgaaagtaaattagcaatggaacctgaagaaacgaagaaagatcctgcttctcagtgcccaactgaaaaatcagaagtgactcctttcccccacaattcttccatagaccctcatggactttattctttgtctcttttacacacatatgaccaatatggtgacttgaattttgctggtatgcaaaacacaacagtgttaacagaaaagcctttgtcaggtacagacgtccaagaaaaaacatttggtgaaagtcaggatttacctttgaaatccgacttgggcaccagggaagatagtagtgttgcatctagtgataggagtagtgtggagcgagaagtggcagaacacctagcaaaaggcttctggagtgacatttgcagcacggacactccttgccaaatgcagttatcacctgctgtggccaaagatggctcagaacagatctcacagaaacggtctgagtgtccgtggttaggtatcaggattagtgagagcccagaaccaggtcaaaggactttcacaacattaagttctgtcaactgcccttttataagtactctgagtactgaaggctgttcaagcaatttggaaattggaaacgatgattatgtttcagaaccccagcaagaaccttgcccatatgcttgtgtcattagcttgggagacgactctgagacggacaccgaaggagacagtgaatcctgttcagccagagaacaagaatgtgaggtaaaactgccattcaatgcacaacggataatttcactgtctcgaaatgattttcagtccttgttgaaaatgcacaagcttactccagaacagctggattgtatccatgatattcgaagaagaagtaaaaacagaattgctgcacagcgctgtcgcaagagaaaacttgactgtatacagaatcttgaatcagaaattgagaagctgcaaagtgaaaaggagagcttgttgaaggaaagagatcacattttgtcaactctgggtgagacaaagcagaacctaactggactttgccagaaagtttgtaaagaagcagctctgagtcaagaacaaatacagatactcgccaagtactcagctgcagattgcccactttcatttttaatttctgaaaaagataaaagtactcctgatggtgaactggcgttaccatcaattttcagtttatctgaccggcctccagcagtgctgcctccctgtgccagaggaaacagtgagcctggctacgcgcgagggcaggagtcccagcagatgtccacagccacctctgagcaagctgggcctgcggaacagtgtcgtcagagtggtgggatctcagatttctgtcagcagatgactgataaatgtactactgatgagtaaacttgcattcacttccttcaaaccatctaattttctcctgaagttttggcagcgtcttgaaagcctaatatgaccatctgttgctcaacaatactgtttttttcctttagtagtttaccataagggaatttcctttaagtcaaccatgatttctccttgatttctacaagagacaaagaaatgattttgcctcctggatatcagaaaaatccatgtgaaaatgtagtaaacctttaaaactcatgttttaaagaataataactctagtaataactcttcctgctattcagaataagtaggagaatgaaaactgcagcatatcagacagcaatttaacagcttgaaacatctacagatagttcctactaaaagaagtggcctgcagaagtttaataatttgacttttttctaatattttagtttgaaagaaaatttcttcccaagcaatgctaatagagttctattcttagaagcagggtgtcagctactgggaatatttttgtagagctgcattgtgaaaaaaagatggtcttacctgaatcttagggctttgttcttcggctcctaaaatcaggctttaagctacattgggaagatttagtaaataggcaagtggttggcctaagacgggggctgcttctcctcttcagtatggactctagaaagtctggctacatgaatagatttaagtgtcactttccctccctgccccccgcttcagtctctaccatatctggtcccatcatggacttcctatttcctggcatttttgtccctttggaagaagaaataggactcagaatacagtggcatgagtgattacactggcagcattatctcaggctccctagaatctggagagcttaccaacatgtaaagctgttcatttttccaccgtgggtcaccaatgccagaaaaccagacatcacggggaaagaatgttgcttactttttaccaggagtgcagttcatttttttcaccctgtttttgaagtcgtattattcacttgtaaaaatgattgtaacagataaaaaatgtatctgcagcaactctgcaggtttgtgaaataggatgaaactcaatctttttctattgtgggtttgcatttgaaaagcaggttgaatccttgctctcttctccaaatttggtgtggtataaagacacacaaatcattttaacttggacatttaaagatcagtcttagtgtttgttcagtcctgttacaaaatagataactgagcacctatcgcataacattttgcggtggcttttagccatgctggggttagatgtgtttgagagtcaaatgaaagctatggatcttctcagcaattaaaaaaaatgcatatattcacattcacagaaacattggcagaacccagttttaatggtacagaggagtagtttatagtgttgatttcaccaaaatcagagggctgaaagagacacttctatagactgcatcctgagcctagtgcagggcttgtctagctaatgtgggcagccaccacccactgtgtatgaacaagtctgaagcaagttggccttgcccttgagagtatatggggaccagtcttcatgtcttggagtaatttgtcaaatgttaccctttttgatcagggtgtagggggaggatattgctagtatattttcagtggtttgtatgttctctctgtcactgacttatttgtaagagaaaattagttggacttgtttattttctagtagcttttataagtacactcaagaatttgtcagggagaataattctgatagtgcatcccatactgcaaaagaatttgtgtgtgtgtgtgtgtgtgtgtgtgtgtgtgtgtatgtgtatgtatacatatatatctctccatataggtatttctttgatacttgtaattttaaatttcagcttcacgatataaaataatataagaacttctggtttacaaaatgtaaaatcttaagccaatggaacccttgatttcctacctcagtgtacacccaactattggttgtatcagtttgtgtatgtgcaaatgtcaaataatcttttgctttaattgctactgtacttgctttgaaagattacctactattttatgataaaatgtagttgtctccagagcttaaatataatttgtaaagcacttggtttaaatttctctctacctataaacagtttagcattaagggtttctattaatgacacagaattattggccaagtgtaatttcttaaaatttagcattactttaaatagccagcatgtaatacaagtaactacactacctcatatctacatgattttcaagttgtaatgcagatggacagataaaaaagattttacgtttgtcttttggccataagtgggaaagttttctgtatattgcatagcattacacatttatgcctattttaacattaacttctaaagaagttttttctaagaaaatgtttcaaggcaatattttttttgaggctgccgaagacaaatgacaggattatgagtatacagtgtatgccttttccttcatgcagaattttgaaatgttttcagtttgtatattgcatattcacatgatcattgttcactattttatgaactggccttctcaatgtttgatgattttttaaaagctgttatgttgaattcagtaaaataacattaccttattttttttcttattcaaattctggaactatagcaaataattcgttaaattgtcatattcaaaacaaatgtggatacagtcttggttctccatctgtaattttttttaacagtttgctatagcttactgcttaactaattttaaataaggaaataagtatgttagatgcagtagacgatacaggttgcatgtggacactcagtcacattaacaacttgggaaaaaaatggcaatgttacggtgaattctcaggtgaacttttttcagttataaaacatctattttgaatctgtaaatattttaaatgttttattaaggcatgtaataaactattctttgaaacttgttgggtagaatgaaaattaaagccataatggtagaagatggcatactgattataaaagaagcagaaaaacattgatttttttatatctttcataatataattttctaacaatgcaataaaaccactaaacttttgtgtccatattttactgagaccatgtttcattaaaagcatagtttcatagtatttaatttacatttctccctaatgttcttacccaaatgtacctgaactaaaaaatgttagatgttggtgataagttgacagttaaataaaattctctaaaattgcttctaattgaa

SEQ ID NO: 3828 - DNA, 692 bp, Homo sapiens
  source 1..692: mol_type = unassigned DNA
gcaaaagactgttgaagtagagagcattttgcccagctcactcggattctttgctggcatgccttcagtttcagttgtcatccagagaagtcaaaggaaatgctgcttggggatgagcatgttgatgataattagaagcatgctttccactgaacttcccgacaacatttgttatgcagaatgtctctgagtgagaactcggtttttgcctatgaatcttctgtgcatagcaccaatgttttactcagccttaatgaccagcggaagaaagatgtgctgtgcgatgtcaccatctttgtggagggacagcggttccgcgctcaccggtccgtgctggcggcatgcagcagttacttccactcaagaatcgtaggccaggctgatggagagctgaacattactcttccagaagaggtgacagttaaaggatttgaacctttaattcagtttgcctacactgctaaactgattttaagtaaagagaatgtggatgaagtgtgcaaatgtgtggagtttttaagtgtacataatattgaggaatcctgctttcagtttctgaaatttaagtttttggactccactgcagaccagcaagaatgcccaagaaaaaaatgcttttcatcacactgtcagaaaacagaccttaaactttcacttttggaccagagggatctagaaactgatgaagtgga

SEQ ID NO: 3829 - DNA, 751 bp, Homo sapiens
  source 1..751: mol_type = unassigned DNA
atacacaagaagtttcaggagtcagaggagggttgatgataattagaagcatgctttccactgaacttcccgacaacatttgttatgcagaatgtctctgagtgagaactcggtttttgcctatgaatcttctgtgcatagcaccaatgttttactcagccttaatgaccagcggaagaaagatgtgctgtgcgatgtcaccatctttgtggagggacagcggttccgcgctcaccggtccgtgctggcggcatgcagcagttacttccactcaagaatcgtaggccaggctgatggagagctgaacattactcttccagaagaggtgacagttaaaggatttgaacctttaattcagtttgcctacactgctaaactgattttaagtaaagagaatgtggatgaagtgtgcaaatgtgtggagtttttaagtgtacataatattgaggaatcctgctttcagtttctgaaatttaagtttttggactccactgcagaccagcaagaatgcccaagaaaaaaatgcttttcatcacactgtcagaaaacagaccttaaactttcacttttggaccagagggatctagaaactgatgaagtggaggaatttctggaaaataaaaatgttcagactcctcagtgtaaactccgcaggtatcaaggaaatgcaaaagcctcacctcctctacaagacagtgccagtcagacatatgagtccatgtgcttagagaaggatgctgctctggccttg

SEQ ID NO: 3830 - DNA, 777 bp, Homo sapiens
  source 1..777: mol_type = unassigned DNA
gcctttggacatcttgaagaagcttagggaagaaaggctcccggttgatgataattagaagcatgctttccactgaacttcccgacaacatttgttatgcagaatgtctctgagtgagaactcggtttttgcctatgaatcttctgtgcatagcaccaatgttttactcagccttaatgaccagcggaagaaagatgtgctgtgcgatgtcaccatctttgtggagggacagcggttccgcgctcaccggtccgtgctggcggcatgcagcagttacttccactcaagaatcgtaggccaggctgatggagagctgaacattactcttccagaagaggtgacagttaaaggatttgaacctttaattcagtttgcctacactgctaaactgattttaagtaaagagaatgtggatgaagtgtgcaaatgtgtggagtttttaagtgtacataatattgaggaatcctgctttcagtttctgaaatttaagtttttggactccactgcagaccagcaagaatgcccaagaaaaaaatgcttttcatcacactgtcagaaaacagaccttaaactttcacttttggaccagagggatctagaaactgatgaagtggaggaatttctggaaaataaaaatgttcagactcctcagtgtaaactccgcaggtatcaaggaaatgcaaaagcctcacctcctctacaagacagtgccagtcagacatatgagtccatgtgcttagagaaggatgctgctctggccttgccttctttatgccc

SEQ ID NO: 3831 - DNA, 485 bp, Homo sapiens
  source 1..485: mol_type = unassigned DNA
tctttgacaatgactatctggatgacacaggaaggatgcaattctggccttggagagaaaacttgcaaggaaaggaacatgtttgaatttcagatgtgttcctcaatgaatcacgatcttcagggaatgtttcaggtggaggaaggggctcttggtcaatgagcctgaagactgcatggcaacctttgccagcttttggcctgaaaactcaacttcttcatttgagattagcaaaagactgttgaagtagagagcattttgcccagctcactcggattctttgctggcatgccttcagtttcagttgtcatccagagaagtcaaaggaaatgctgcttggggatgagcatgttgatgataattagaagcatgctttccactgaacttcccgacaacatttgttatgcagaatgtctctgagtgagaactcggtttttgcctatgaatcttctgtgcatagcaccaatgttttactcagccttaat

SEQ ID NO: 3832 - DNA, 315 bp, Homo sapiens
  source 1..315: mol_type = unassigned DNA
tctttgacaatgactatctggatgacacaggaaggatgcaattctggccttggagagaaaacttgcaaggaaaggaacatgtttgaatttcagatgtgttcctcaatgaatcacacttgttacatttactgactctcatggtggtggagatggattttttcctagtgtgcctgtgtgtgggttgatgataattagaagcatgctttccactgaacttcccgacaacatttgttatgcagaatgtctctgagtgagaactcggtttttgcctatgaatcttctgtgcatagcaccaatgttttactcagccttaat

SEQ ID NO: 3833 - DNA, 325 bp, Homo sapiens
  source 1..325: mol_type = unassigned DNA
gaagaagctattcaaaaatgtccaggactctgttatttattcagcaagcttacaaagccatctttgattgactgattctttgacaatgactatctggatgacacaggaaggatgcaattctggccttggagagaaaacttgcaaggaaaggaacatgtttgaatttcagatgtgttcctcaatgaatcacgttgatgataattagaagcatgctttccactgaacttcccgacaacatttgttatgcagaatgtctctgagtgagaactcggtttttgcctatgaatcttctgtgcatagcaccaatgttttactcagccttaat

SEQ ID NO: 3834 - DNA, 217 bp, Homo sapiens
  source 1..217: mol_type = unassigned DNA
ggcagtttcatgtcattgagtagaattgtgcggaatgcttttatggagtgaggcttctgcgttaaacttgtgctgattccaggttgatgataattagaagcatgctttccactgaacttcccgacaacatttgttatgcagaatgtctctgagtgagaactcggtttttgcctatgaatcttctgtgcatagcaccaatgttttactcagccttaat

SEQ ID NO: 3835 - DNA, 349 bp, Homo sapiens
  source 1..349: mol_type = unassigned DNA
tctttgacaatgactatctggatgacacaggaaggatgcaattctggccttggagagaaaacttgcaaggaaaggaacatgtttgaatttcagatgtgttcctcaatgaatcaccacgtctccttcctgccatcttgtgaagaagtgccttgcttccctttcaccttctgccatgattgtaagtttcctgaggcctctccagccatcctgaactgttgatgataattagaagcatgctttccactgaacttcccgacaacatttgttatgcagaatgtctctgagtgagaactcggtttttgcctatgaatcttctgtgcatagcaccaatgttttactcagccttaat

SEQ ID NO: 3836 - DNA, 9113 bp, Homo sapiens
  source 1..9113: mol_type = unassigned DNA
gcggccgccgccctcgccaccccgcctgcccactcccgccgccgccccgctctcgctttccccccggcctcccctcgccccttcccctcccccttcccggcgcactcggggggctgggaacgagctgccatgtgatgcgcgtcccctccgcgagctttcggtgacccacgaactgcccacctcgccggctgccgggagggggctgcgagccgggaagacgcggggaagaggaggcggaaaaggacgcaaagttctccggcgagcgcgttcgttcacatagctcccagttttaacatttcgccacctactgaagacatcatttgggaccaagctgatgagcccttgaagcacagcagataagagtgttgctgttgatcatctttgcctgggaagttgaatgataaagccagaagaaagcatgctttctgatcatttgcagctgtctgcttcagaaagtgagggctccaggaatgaggagaatcttcaagaacttcctcgcactgtgacatgtctgatcccttgctcccatccctgcagcatgaacaaggtggacactcactgacctgtcacaaggttgccccacaaaactttggggtccatgtctgaatggattgccagagccttctcatctctcccttcgcccagttccctgcatcctaagactcgaaggcagcacaggacctggaaaaattacatggtgtgaacggcatgtctgtggatgagaagcctgactcccccatgtatgtgtatgagtccacagtccactgcaccaacatcctcctgggcctcaatgaccagcggaaaaaggatattctctgtgacgtgactttgatcgtggagaggaaggagttccgggcccaccgggctgtgctggccgcatgcagtgaatatttttggcaggcgctggttggacagacaaaaaatgatttggtggtcagcttgcctgaggaggtcacagccaggggctttgggccgctgttacagtttgcctacactgccaagctgttactcagcagagaaaacatccgcgaggtcatccgctgtgctgagttcctgcgcatgcacaacctggaggactcctgcttcagcttcctgcagacccagctcctgaacagtgaggatggcctgtttgtgtgccggaaggatgctgcgtgccagcgcccacacgaggactgcgagaactctgcaggagaggaggaggatgaagaggaggagacgatggattcagagacggccaagatggcttgccccagggaccagatgcttccagagcccatcagctttgaggccgccgccatccccgtagcagagaaggaagaagccctgctgcccgagcctgacgtgcccacagacaccaaggagagctcagaaaaggacgcgttaacgcagtaccccagatacaagaaataccagcttgcatgtaccaagaatgtctataatgcatcatcacacagtacctcaggttttgcaagcacattccgggaagataactctagcaacagcctcaagccggggcttgccagggggcagattaaaagtgagccgcccagtgaagagaatgaggaagagagcatcacgctctgcctgtctggagatgagcctgacgccaaggacagagcgggggatgtcgagatggaccggaaacagcccagccctgcccctacccccacggccccagctggggccgcctgcctggagagatccaggagcgtggcctcgccctcctgcttaaggtctctgttcagcataacgaaaagtgtggagctgtctggcctgcccagtacatctcagcagcactttgccaggagtccagcctgcccttttgacaaggggatcactcagggtgaccttaaaactgactacacccctttcacagggaattatggacagccccacgtgggccagaaggaggtgtccaacttcaccatggggtcgcccctcagggggcctgggttggaggctctctgtaaacaggagggagagctggaccggaggagcgtgatcttctcctccagcgcttgtgaccaagtgagcacctcggtgcattcttattctggggtgagcagtttggacaaagacctctctgagccggtgccaaagggtctgtgggtgggagccggccagtccctccccagctcgcaggcctactcccacggtgggctgatggccgaccacttgccaggaaggatgcggcccaacaccagctgcccggtaccaatcaaagtctgccctcgctcaccccccttggagaccaggaccaggacttccagctcctgctcttcctattcctacgcggaggacgggagcgggggctcaccctgcagcctccctctctgtgagttctcctcctcgccctgttcccagggagccagattccttgccacagaacatcaggaaccaggcctgatgggagatggaatgtacaaccaagtgcggccccaaattaaatgtgagcagtcttatggaaccaactccagtgacgaatccggatcgttctcggaagcagacagtgagtcgtgtcctgtgcaggacaggggccaggaggtaaaacttccttttcctgtagatcaaatcacagatcttccaaggaacgatttccagatgatgattaaaatgcacaagctaacctcagaacagttagagtttattcatgatgtccgacggcgcagcaagaaccgcatcgcggcccagcgctgccgcaaaaggaaactggactgtattcagaatttagaatgtgaaatccgcaaattggtgtgtgagaaagagaaactgttgtcagagaggaatcaactgaaagcatgcatgggggaactgttggacaacttctcctgcctttcccaggaagtttgccgagacatccagagccccgagcagatccaggccctgcatcggtattgccctgtcctcagacccatggacttgcccacggcctccagtattaaccctgcgcccttgggtgctgagcagaacattgcggcctcccaatgcgcagtgggggaaaacgtgccctgctgcttggagccaggcgcggctccccccggacccccctgggcacccagcaacacctccgagaattgtacctctgggaggagactagaaggcactgacccgggaaccttctcagagagaggacctcctcttgaacccaggagccaaacagtgaccgtggacttctgccaggaaatgactgataagtgtacaactgacgaacagcccaggaaagattatacctagtgactcggctctgcctcccagtccgcacacctctcccatccaggcgttcttcagtcagcctgtggcactgttcatctgctgtcccgaagaaaccgagaacacatttggtgcacactacagcggtcttagcagcaatactgttccgaagtatcctctcctcttctcgagcaggagtgatagttaccttcacaatggtgctaccccttgcccaggcaaggaaagacagcagtgatgacactgtctgtctgtggctcaatttcagtcttcacagggatagactacaacacctctaggccccaaccacggattttttttctcagtggcccatgtcacaaaccctatctcaggaatttcttctgaatgttcaatttttttcattgaagacagcttctatacacatcaaagttttatagctagactgtacatattatatataatatatatataaaatatatatatatatatatatatatccatatgcaaaagtcctgcatgcctcaactttctcatcctaaaactggaaacttatttctcatttagaaacaggttccaacattcctcttcttttgtctctgatgctagaactagtttggtaactgttaacatggtcatttttcttgcttcacagttcaattttcaattcgtacttatttatggacaaaattcagtgttggaagctttttcccaaggttttatttcagatttctttttcgtttggtttggttttggcacctccaagtggtgtcatttgagcattgtaggtttgttttttgtttgtttggggggttttgtttgtttttgtttttgtttttgttttccttgcagatactgtacagtaatggtcaactttgccacttgcactgagttttgggtcaaacctattttcttaaatgaagttgtaacttcggtataactcaagtatactgtatattctttgcttttagttaaaaaagtaaaacattttagctaattaaaaagcactcaggtgataattatgtaggaaaaacaatcttgccaaataatgaattcatcctaggatgtgtagacaataatctgcttgaatatttttatatttcacctcctccccacctttccctaagcaaagtttaaacgcagatagagagttcagagttgatgctggatgttcagattcctaagtggggagagagtttggacatctcactcaaaagtacatcagaaaaacaggaatccgtgattttataccagaactcagcaggcattggctcctagaaatcaagttagaaagttttcacccagggagtaagtcccattcatttcaacacgtcctgaggcctcggcttgctcttggaagtgttgtgcagtaggacctgctcccctgaaggacggggccaaccagccactggctttcctgcccaggcttggcctcccaggacatctggcctgaggggatttgaatcacagccccgaaggtcctgccttcaccccattgggagagagcagggcatcctggcatctgcgatccatccctgacacaggctgacacattctttctcctttccttctccaaaggcttggagttttcttctgaggtttttctgccagtgtcttgtctgaaggcagacttcattctgaggctttggacaagctatcaccgggaaccctccctgtccccttcccgaatcacacacataccctaccctcacctgatgataattttctcttcttgctgcaaaactggttggcttgcaacccagagagagcagcttcccttggctctggggccgtgttggccccagccacgtttacaggaaggtgtgccccagaggaggaggaatcagctccctcgctccagtggccttgggtccgggtctcactgagcagcccgagggccactccagcccggctggggaagagagtcctgaacggtttgatgtggggatggggtggtgggcagtggggaatagatggttgactttgtttctttatttgtgccattgtttggacaatattaaagctgcatgtaaaaggggaaattagtatatgatgtaggctaaaagtgaaatcatagtaacatatgttttagtattattaacttttttctgtacaaatattagcactaaatgtttaaatatgtatgaatgccagaaatttgtcagttcatgcagtaggataaaaaaaaaaaaaaaaaaaaaaaaaaggcttttctttttaaacagttccacttttaaaacctgcctctgggtttttgttttttcttgtttgtgtgtgtgtgtgtgtgtgtgtgtgtgtgtgtgtgtgtgtgtgtgtgtgtctgaaacagatcttgataaagctctgtgttggagctgctggtttttgttatggttgttggaatttcttggcctactaggacagttctgtgcttcaccatgaggtttgcctttgtggaaaactggtgacagtgagaatataaactcaatgtgaatcacgtgatacttcgcaggcgtgtgttacagtggagtcagctgacagtattttgctttttaactctattgttgcctttccaagtgacctctcctcttcttttaaaaaaagaacactttctgctcatatcataaccaggtccaacccagcttcttggcatgaggtttaccctggtaacaactcatgtgcaactggtagtcttgaccacattccatccatttcctcaggtttctgtggttcagtagcccagacctgtttggcagccatttctagcaggggcggggcctctttatttctctccaccctaactcagacctcaccttcctcccacccacccctgccttgcttttcttcctcttcccccaacctaacttctgccatgggaactggttaaaaacactgctctaaaaaccatcttccaatttcatagagatttctcacaagttatttcattcataatccaccatgaacagtgactagcttcgtgcagttgttcatgtgatgtgtgtgtgtcttttcctattcagaactatgtgcttgtcaaaattatttctgggttgattcaaagggaggacttgctggggaccagaatccaaacggcctcaagtggaattttaaaacctagcctgtctcttttccctgggatccctctgtcaaccccacgccttttaggaaaaagaaaagtgagtgaacagcaaggaagagtgtttgcacagtacagtaacatttggttgttcttaaggctcttttcttacaaaaataagagaccctccaaccacgggctgtttaggaggatgcctgcttgggtctccaaatggctggggtaggaatggttgttggggcagagccagtggaggtgagtgaccctgagactaatgaacatcccacctaaatccagtcctccccttggatctgcctttgtcctgcttgtgtatccaggcaacctcttttcaagttggtcaggctttggacaggtgagtgatttgctgtatgtgtttgtttctctgcgttacctgggggtgccttgattaaaatcgaactttattacatactgattctggaacaaaacagttagaaaaactttaaaaaaaaaaaaaccgacaaagttacgaggccatcctgctatttatcttctgagttcccagcaatgactcaggcatcagagatgatgctgcagtggaaaacctgactctgtgtgtctgcaactgaatgttgtgcgagtaatttattaactgtctttctaaaggtttgctgcttttaagatgcactataattcgggatgtaatccttacattgcttttccaaggaagggaacaaaagtctagtgattagtatgccaactgccactactccttcaaaaggagccaggaccagcgacaagactcatgagaggactggctaaagtgaagtgtgcacagtgtgaagtttaatgctgttgtcaagaggcctaaacccacattttctcttttaatattttatgattgccatcaaagaagaagaaaaagaaggaacagacaaaggtttgaaaatgataagcctgttaagacaccaaaaactcctgtcccgtgaagctgcttgacatcctgtggagtagcataatcctctcaaaatgaggaagagctgcctgcaaagctttctcaagtccctatttggctacctacttctctacattatgccccatttaaactaggagctgtcttagaaatgacttcaaactgcttcactattgcttacagtttaggaggagtctcagatccagaaggagcaagaatcaagtttggtcctcaaatgactgtaaatagactaaagaacaaggtgttttttgtttttgtttttgttttctaagaataaagctgttcgttgtatcatgagttagtgtttcttccccaaactgaagactgtgttggaagtgcaatttctggtgagtcagtccacaatacaatgccctgtgtggagttggtattcatacaggaaatctgtgtgcacgaggcattgtgtgttgaaagtgtatgtttatagtactgcctgagccatctcatgaccccagcgtccaaaaccgatgctgtagaacagaacatatctgtacacaaatagtgtgtgcaaatagcatttgtacatagaaaagtctcattgtggcagattgagcataaattattcaactgacggtgcaaaaacattacttgcaaagaaaagtttatagtattttcctacactccaccctgggagatgatatttctatcaaatgaatatcagtgcattttaaatgtaatatgaaaacgatgctgccattttgtgaagaatacccacttggttgcagaggccaactttcatagctttgatttaatgttgtgacacggtgtatgcattttgctgtcaagcaatggataaacagctctgactttcattctcattccagtttattgacctcagataaaacactggcccttcttagaagcagaagtgtgcaccaagaccattcatttcaggtagactcacattcagtgccaagtgctcccatgggaataatcagacgcatatgttgcgaaagagtgaagggacttggacaaagaggggttttcctacagatggatgctcagtcttctaccaaaacatgtttggaggcagaactatgacctccccttaagtcctaacaatgtattttgtgtgtgcaaatcctgggatgcccgtttcacgctctgacataaagacatggcacctctagtgagtgatcaggaagattccatatgcatttgggagcttcaggtgcttgttagacacagtgagccattcaaggcaagcaccacctttgctagtgaggccaagagagcctgtgacaatttgacaatttgttccagaaccagtctgatgcaagtgcacctctaatatatgccttacaaactccagaggccatattcaaaacagggtcttctcagtgtatgcaaggggctgcagcccctcttctcttcctccccaggttgaacaatacggacagttttcacacatatctacctgtataaccctctgtacctctcataactggtcaacgactgtaacaggttacatcaggtgtttttctacatactttttacacagattctatgcgattaatgtaatttaattcaatgcatcattttattgtactagttcttaggcttgtccttatttttttctaagtgattgtggtttttctcgtggtttttattgtaaaaaatgaaaggctgttgatgcttattctctgtaactaagaatttttaccttttgggggaaaaaagcattgctatgaactaatgaattgaaacttcatttactcattgtaaatacactattgtgcaaaaaaagttttcactcaattgaattgctagtgttaactgaattttgtctagacaccatttctgttgatgaaataaagacatatcattatgcattgtaaactg

SEQ ID NO: 3837 - DNA, 3981 bp, Homo sapiens
  source 1..3981: mol_type = unassigned DNA
gcggccgccgccctcgccaccccgcctgcccactcccgccgccgccccgctctcgctttccccccggcctcccctcgccccttcccctcccccttcccggcgcactcggggggctgggaacgagctgccatgtgatgcgcgtcccctccgcgagctttcggtgacccacgaactgcccacctcgccggctgccgggagggggctgcgagccgggaagacgcggggaagaggaggcggaaaaggacgcaaagttctccggcgagctgtctgcttcagaaagtgagggctccaggaatgaggagaatcttcaagaacttcctcgcactgtgacatgtctgatcccttgctcccatccctgcagcatgaacaaggtggacactcactgacctgtcacaaggttgccccacaaaactttggggtccatgtctgaatggattgccagagccttctcatctctcccttcgcccagttccctgcatcctaagactcgaaggcagcacaggacctggaaaaattacatggtgtgaacggcatgtctgtggatgagaagcctgactcccccatgtatgtgtatgagtccacagtccactgcaccaacatcctcctgggcctcaatgaccagcggaaaaaggatattctctgtgacgtgactttgatcgtggagaggaaggagttccgggcccaccgggctgtgctggccgcatgcagtgaatatttttggcaggcgctggttggacagacaaaaaatgatttggtggtcagcttgcctgaggaggtcacagccaggggctttgggccgctgttacagtttgcctacactgccaagctgttactcagcagagaaaacatccgcgaggtcatccgctgtgctgagttcctgcgcatgcacaacctggaggactcctgcttcagcttcctgcagacccagctcctgaacagtgaggatggcctgtttgtgtgccggaaggatgctgcgtgccagcgcccacacgaggactgcgagaactctgcaggagaggaggaggatgaagaggaggagacgatggattcagagacggccaagatggcttgccccagggaccagatgcttccagagcccatcagctttgaggccgccgccatccccgtagcagagaaggaagaagccctgctgcccgagcctgacgtgcccacagacaccaaggagagctcagaaaaggacgcgttaacgcagtaccccagatacaagaaataccagcttgcatgtaccaagaatgtctataatgcatcatcacacagtacctcaggttttgcaagcacattccgggaagataactctagcaacagcctcaagccggggcttgccagggggcagattaaaagtgagccgcccagtgaagagaatgaggaagagagcatcacgctctgcctgtctggagatgagcctgacgccaaggacagagcgggggatgtcgagatggaccggaaacagcccagccctgcccctacccccacggccccagctggggccgcctgcctggagagatccaggagcgtggcctcgccctcctgcttaaggtctctgttcagcataacgaaaagtgtggagctgtctggcctgcccagtacatctcagcagcactttgccaggagtccagcctgcccttttgacaaggggatcactcagggtgaccttaaaactgactacacccctttcacagggaattatggacagccccacgtgggccagaaggaggtgtccaacttcaccatggggtcgcccctcagggggcctgggttggaggctctctgtaaacaggagggagagctggaccggaggagcgtgatcttctcctccagcgcttgtgaccaagtgagcacctcggtgcattcttattctggggtgagcagtttggacaaagacctctctgagccggtgccaaagggtctgtgggtgggagccggccagtccctccccagctcgcaggcctactcccacggtgggctgatggccgaccacttgccaggaaggatgcggcccaacaccagctgcccggtaccaatcaaagtctgccctcgctcaccccccttggagaccaggaccaggacttccagctcctgctcttcctattcctacgcggaggacgggagcgggggctcaccctgcagcctccctctctgtgagttctcctcctcgccctgttcccagggagccagattccttgccacagaacatcaggaaccaggcctgatgggagatggaatgtacaaccaagtgcggccccaaattaaatgtgagcagtcttatggaaccaactccagtgacgaatccggatcgttctcggaagcagacagtgagtcgtgtcctgtgcaggacaggggccaggaggtaaaacttccttttcctgtagatcaaatcacagatcttccaaggaacgatttccagatgatgattaaaatgcacaagctaacctcagaacagttagagtttattcatgatgtccgacggcgcagcaagaaccgcatcgcggcccagcgctgccgcaaaaggaaactggactgtattcagaatttagaatgtgaaatccgcaaattggtgtgtgagaaagagaaactgttgtcagagaggaatcaactgaaagcatgcatgggggaactgttggacaacttctcctgcctttcccaggaagtttgccgagacatccagagccccgagcagatccaggccctgcatcggtattgccctgtcctcagacccatggacttgcccacggcctccagtattaaccctgcgcccttgggtgctgagcagaacattgcggcctcccaatgcgcagtgggggaaaacgtgccctgctgcttggagccaggcgcggctccccccggacccccctgggcacccagcaacacctccgagaattgtacctctgggaggagactagaaggcactgacccgggaaccttctcagagagaggacctcctcttgaacccaggagccaaacagtgaccgtggacttctgccaggaaatgactgataagtgtacaactgacgaacagcccaggaaagattatacctagtgactcggctctgcctcccagtccgcacacctctcccatccaggcgttcttcagtcagcctgtggcactgttcatctgctgtcccgaagaaaccgagaacacatttggtgcacactacagcggtcttagcagcaatactgttccgaagtatcctctcctcttctcgagcaggagtgatagttaccttcacaatggtgctaccccttgcccaggcaaggaaagacagcagtgatgacactgtctgtctgtggctcaatttcagtcttcacagggatagactacaacacctctaggccccaaccacggattttttttctcagtggcccatgtcacaaaccctatctcaggaatttcttctgaatgttcaatttttttcattgaagacagcttctatacacatcaaagttttatagctagactgtacatattatatataatatatatataaaatatatatatatatatatatatatccatatgcaaaagtcctgcatgcctcaactttctcatcctaaaactggaaacttatttctcatttagaaacaggttccaacattcctcttcttttgtctctgatgctagaactagtttggtaactgttaacatggtcatttttcttgcttcacagttcaattttcaattcgtacttatttatggacaaaattcagtgttggaagctttttcccaaggttttatttcagatttctttttcgtttggtttggttttggcacctccaagtggtgtcatttgagcattgtaggtttgttttttgtttgtttggggggttttgtttgtttttgtttttgtttttgttttccttgcagatactgtacagtaatggtcaactttgccacttgcactgagttttgggtcaaacctattttcttaaatgaagttgtaacttcggtataactcaagtata

SEQ ID NO: 3838 - DNA, 780 bp, Homo sapiens
  source 1..780: mol_type = unassigned DNA
gcggccgccgccctcgccaccccgcctgcccactcccgccgccgccccgctctcgctttccccccggcctcccctcgccccttcccctcccccttcccggcgcactcggggggctgggaacgagctgccatgtgatgcgcgtcccctccgcgagctttcggtgacccacgaactgcccacctcgccggctgccgggagggggctgcgagccgggaagacgcggggaagaggaggcggaaaaggacgcaaagttctccggcgagtgcagctgtctgcttcagaaagtgagggctccaggaatgaggagaatcttcaagaacttcctcgcactgtgacatgtctgatcccttgctcccatccctgcagcatgaacaaggtggacactcactgacctgtcacaaggttgccccacaaaactttggggtccatgtctgaatggattgccagagccttctcatctctcccttcgcccagttccctgcatcctaagactcgaaggcagcacaggacctggaaaaattacatggtgtgaacggcatgtctgtggatgagaagcctgactcccccatgtatgtgtatgagtccacagtccactgcaccaacatcctcctgggcctcaatgaccagcggaaaaaggatattctctgtgacgtgactttgatcgtggagaggaaggagttccgggcccaccgggctgtgctggccgcatgcagtgaatatttttggcaggcgctggttggacagacaaaaaatgatttggtggtcagcttgcctgaggag

SEQ ID NO: 3839 - DNA, 868 bp, Homo sapiens
  source 1..868: mol_type = unassigned DNA
gcggccgccgccctcgccaccccgcctgcccactcccgccgccgccccgctctcgctttccccccggcctcccctcgccccttcccctcccccttcccggcgcactcggggggctgggaacgagctgccatgtgatgcgcgtcccctccgcgagctttcggtgacccacgaactgcccacctcgccggctgccgggagggggctgcgagccgggaagacgcggggaagaggaggcggaaaaggacgcaaagttctccggcgagcgcgttcgttcacatagctcccagttttaacatttcgccacctactgaagacatcatttgggaccaagctgatgagcccttgaagcacagcagctgtctgcttcagaaagtgagggctccaggaatgaggagaatcttcaagaacttcctcgcactgtgacatgtctgatcccttgctcccatccctgcagcatgaacaaggtggacactcactgacctgtcacaaggttgccccacaaaactttggggtccatgtctgaatggattgccagagccttctcatctctcccttcgcccagttccctgcatcctaagactcgaaggcagcacaggacctggaaaaattacatggtgtgaacggcatgtctgtggatgagaagcctgactcccccatgtatgtgtatgagtccacagtccactgcaccaacatcctcctgggcctcaatgaccagcggaaaaaggatattctctgtgacgtgactttgatcgtggagaggaaggagttccgggcccaccgggctgtgctggccgcatgcagtgaatatttttggcaggcgctggttggacagacaaaaaatgatttggtggtcagcttgcctgaggag

SEQ ID NO: 3840 - DNA, 9108 bp, Homo sapiens
  source 1..9108: mol_type = unassigned DNA
gtcaacaatgtagcgattgagagtgtgggcgttccggggagagcgcaagccgcgcggcgcggagcaaacagcgccgagccgccgccgcctcagcagcagcagcagcagcagcagcggcagcagcggccgtgcacgcccgggctgcggtcgcacagcgctaacgtgagcggccgccgccctcgccaccccgcctgcccactcccgccgccgccccgctctcgctttccccccggcctcccctcgccccttcccctcccccttcccggcgcactcggggggctgggaacgagctgccatgtgatgcgcgtcccctccgcgagctttcggtgacccacgaactgcccacctcgccggctgccgggagggggctgcgagccgggaagacgcggggaagaggaggcggaaaaggacgcaaagttctccggcgagtgcagctgtctgcttcagaaagtgagggctccaggaatgaggagaatcttcaagaacttcctcgcactgtgacatgtctgatcccttgctcccatccctgcagcatgaacaaggtggacactcactgacctgtcacaaggttgccccacaaaactttggggtccatgtctgaatggattgccagagccttctcatctctcccttcgcccagttccctgcatcctaagactcgaaggcagcacaggacctggaaaaattacatggtgtgaacggcatgtctgtggatgagaagcctgactcccccatgtatgtgtatgagtccacagtccactgcaccaacatcctcctgggcctcaatgaccagcggaaaaaggatattctctgtgacgtgactttgatcgtggagaggaaggagttccgggcccaccgggctgtgctggccgcatgcagtgaatatttttggcaggcgctggttggacagacaaaaaatgatttggtggtcagcttgcctgaggaggtcacagccaggggctttgggccgctgttacagtttgcctacactgccaagctgttactcagcagagaaaacatccgcgaggtcatccgctgtgctgagttcctgcgcatgcacaacctggaggactcctgcttcagcttcctgcagacccagctcctgaacagtgaggatggcctgtttgtgtgccggaaggatgctgcgtgccagcgcccacacgaggactgcgagaactctgcaggagaggaggaggatgaagaggaggagacgatggattcagagacggccaagatggcttgccccagggaccagatgcttccagagcccatcagctttgaggccgccgccatccccgtagcagagaaggaagaagccctgctgcccgagcctgacgtgcccacagacaccaaggagagctcagaaaaggacgcgttaacgcagtaccccagatacaagaaataccagcttgcatgtaccaagaatgtctataatgcatcatcacacagtacctcaggttttgcaagcacattccgggaagataactctagcaacagcctcaagccggggcttgccagggggcagattaaaagtgagccgcccagtgaagagaatgaggaagagagcatcacgctctgcctgtctggagatgagcctgacgccaaggacagagcgggggatgtcgagatggaccggaaacagcccagccctgcccctacccccacggccccagctggggccgcctgcctggagagatccaggagcgtggcctcgccctcctgcttaaggtctctgttcagcataacgaaaagtgtggagctgtctggcctgcccagtacatctcagcagcactttgccaggagtccagcctgcccttttgacaaggggatcactcagggtgaccttaaaactgactacacccctttcacagggaattatggacagccccacgtgggccagaaggaggtgtccaacttcaccatggggtcgcccctcagggggcctgggttggaggctctctgtaaacaggagggagagctggaccggaggagcgtgatcttctcctccagcgcttgtgaccaagtgagcacctcggtgcattcttattctggggtgagcagtttggacaaagacctctctgagccggtgccaaagggtctgtgggtgggagccggccagtccctccccagctcgcaggcctactcccacggtgggctgatggccgaccacttgccaggaaggatgcggcccaacaccagctgcccggtaccaatcaaagtctgccctcgctcaccccccttggagaccaggaccaggacttccagctcctgctcttcctattcctacgcggaggacgggagcgggggctcaccctgcagcctccctctctgtgagttctcctcctcgccctgttcccagggagccagattccttgccacagaacatcaggaaccaggcctgatgggagatggaatgtacaaccaagtgcggccccaaattaaatgtgagcagtcttatggaaccaactccagtgacgaatccggatcgttctcggaagcagacagtgagtcgtgtcctgtgcaggacaggggccaggaggtaaaacttccttttcctgtagatcaaatcacagatcttccaaggaacgatttccagatgatgattaaaatgcacaagctaacctcagaacagttagagtttattcatgatgtccgacggcgcagcaagaaccgcatcgcggcccagcgctgccgcaaaaggaaactggactgtattcagaatttagaatgtgaaatccgcaaattggtgtgtgagaaagagaaactgttgtcagagaggaatcaactgaaagcatgcatgggggaactgttggacaacttctcctgcctttcccaggaagtttgccgagacatccagagccccgagcagatccaggccctgcatcggtattgccctgtcctcagacccatggacttgcccacggcctccagtattaaccctgcgcccttgggtgctgagcagaacattgcggcctcccaatgcgcagtgggggaaaacgtgccctgctgcttggagccaggcgcggctccccccggacccccctgggcacccagcaacacctccgagaattgtacctctgggaggagactagaaggcactgacccgggaaccttctcagagagaggacctcctcttgaacccaggagccaaacagtgaccgtggacttctgccaggaaatgactgataagtgtacaactgacgaacagcccaggaaagattatacctagtgactcggctctgcctcccagtccgcacacctctcccatccaggcgttcttcagtcagcctgtggcactgttcatctgctgtcccgaagaaaccgagaacacatttggtgcacactacagcggtcttagcagcaatactgttccgaagtatcctctcctcttctcgagcaggagtgatagttaccttcacaatggtgctaccccttgcccaggcaaggaaagacagcagtgatgacactgtctgtctgtggctcaatttcagtcttcacagggatagactacaacacctctaggccccaaccacggattttttttctcagtggcccatgtcacaaaccctatctcaggaatttcttctgaatgttcaatttttttcattgaagacagcttctatacacatcaaagttttatagctagactgtacatattatatataatatatatataaaatatatatatatatatatatatatccatatgcaaaagtcctgcatgcctcaactttctcatcctaaaactggaaacttatttctcatttagaaacaggttccaacattcctcttcttttgtctctgatgctagaactagtttggtaactgttaacatggtcatttttcttgcttcacagttcaattttcaattcgtacttatttatggacaaaattcagtgttggaagctttttcccaaggttttatttcagatttctttttcgtttggtttggttttggcacctccaagtggtgtcatttgagcattgtaggtttgttttttgtttgtttggggggttttgtttgtttttgtttttgtttttgttttccttgcagatactgtacagtaatggtcaactttgccacttgcactgagttttgggtcaaacctattttcttaaatgaagttgtaacttcggtataactcaagtatactgtatattctttgcttttagttaaaaaagtaaaacattttagctaattaaaaagcactcaggtgataattatgtaggaaaaacaatcttgccaaataatgaattcatcctaggatgtgtagacaataatctgcttgaatatttttatatttcacctcctccccacctttccctaagcaaagtttaaacgcagatagagagttcagagttgatgctggatgttcagattcctaagtggggagagagtttggacatctcactcaaaagtacatcagaaaaacaggaatccgtgattttataccagaactcagcaggcattggctcctagaaatcaagttagaaagttttcacccagggagtaagtcccattcatttcaacacgtcctgaggcctcggcttgctcttggaagtgttgtgcagtaggacctgctcccctgaaggacggggccaaccagccactggctttcctgcccaggcttggcctcccaggacatctggcctgaggggatttgaatcacagccccgaaggtcctgccttcaccccattgggagagagcagggcatcctggcatctgcgatccatccctgacacaggctgacacattctttctcctttccttctccaaaggcttggagttttcttctgaggtttttctgccagtgtcttgtctgaaggcagacttcattctgaggctttggacaagctatcaccgggaaccctccctgtccccttcccgaatcacacacataccctaccctcacctgatgataattttctcttcttgctgcaaaactggttggcttgcaacccagagagagcagcttcccttggctctggggccgtgttggccccagccacgtttacaggaaggtgtgccccagaggaggaggaatcagctccctcgctccagtggccttgggtccgggtctcactgagcagcccgagggccactccagcccggctggggaagagagtcctgaacggtttgatgtggggatggggtggtgggcagtggggaatagatggttgactttgtttctttatttgtgccattgtttggacaatattaaagctgcatgtaaaaggggaaattagtatatgatgtaggctaaaagtgaaatcatagtaacatatgttttagtattattaacttttttctgtacaaatattagcactaaatgtttaaatatgtatgaatgccagaaatttgtcagttcatgcagtaggataaaaaaaaaaaaaaaaaaaaaaaaaaggcttttctttttaaacagttccacttttaaaacctgcctctgggtttttgttttttcttgtttgtgtgtgtgtgtgtgtgtgtgtgtgtgtgtgtgtgtgtgtgtgtgtgtgtctgaaacagatcttgataaagctctgtgttggagctgctggtttttgttatggttgttggaatttcttggcctactaggacagttctgtgcttcaccatgaggtttgcctttgtggaaaactggtgacagtgagaatataaactcaatgtgaatcacgtgatacttcgcaggcgtgtgttacagtggagtcagctgacagtattttgctttttaactctattgttgcctttccaagtgacctctcctcttcttttaaaaaaagaacactttctgctcatatcataaccaggtccaacccagcttcttggcatgaggtttaccctggtaacaactcatgtgcaactggtagtcttgaccacattccatccatttcctcaggtttctgtggttcagtagcccagacctgtttggcagccatttctagcaggggcggggcctctttatttctctccaccctaactcagacctcaccttcctcccacccacccctgccttgcttttcttcctcttcccccaacctaacttctgccatgggaactggttaaaaacactgctctaaaaaccatcttccaatttcatagagatttctcacaagttatttcattcataatccaccatgaacagtgactagcttcgtgcagttgttcatgtgatgtgtgtgtgtcttttcctattcagaactatgtgcttgtcaaaattatttctgggttgattcaaagggaggacttgctggggaccagaatccaaacggcctcaagtggaattttaaaacctagcctgtctcttttccctgggatccctctgtcaaccccacgccttttaggaaaaagaaaagtgagtgaacagcaaggaagagtgtttgcacagtacagtaacatttggttgttcttaaggctcttttcttacaaaaataagagaccctccaaccacgggctgtttaggaggatgcctgcttgggtctccaaatggctggggtaggaatggttgttggggcagagccagtggaggtgagtgaccctgagactaatgaacatcccacctaaatccagtcctccccttggatctgcctttgtcctgcttgtgtatccaggcaacctcttttcaagttggtcaggctttggacaggtgagtgatttgctgtatgtgtttgtttctctgcgttacctgggggtgccttgattaaaatcgaactttattacatactgattctggaacaaaacagttagaaaaactttaaaaaaaaaaaaaccgacaaagttacgaggccatcctgctatttatcttctgagttcccagcaatgactcaggcatcagagatgatgctgcagtggaaaacctgactctgtgtgtctgcaactgaatgttgtgcgagtaatttattaactgtctttctaaaggtttgctgcttttaagatgcactataattcgggatgtaatccttacattgcttttccaaggaagggaacaaaagtctagtgattagtatgccaactgccactactccttcaaaaggagccaggaccagcgacaagactcatgagaggactggctaaagtgaagtgtgcacagtgtgaagtttaatgctgttgtcaagaggcctaaacccacattttctcttttaatattttatgattgccatcaaagaagaagaaaaagaaggaacagacaaaggtttgaaaatgataagcctgttaagacaccaaaaactcctgtcccgtgaagctgcttgacatcctgtggagtagcataatcctctcaaaatgaggaagagctgcctgcaaagctttctcaagtccctatttggctacctacttctctacattatgccccatttaaactaggagctgtcttagaaatgacttcaaactgcttcactattgcttacagtttaggaggagtctcagatccagaaggagcaagaatcaagtttggtcctcaaatgactgtaaatagactaaagaacaaggtgttttttgtttttgtttttgttttctaagaataaagctgttcgttgtatcatgagttagtgtttcttccccaaactgaagactgtgttggaagtgcaatttctggtgagtcagtccacaatacaatgccctgtgtggagttggtattcatacaggaaatctgtgtgcacgaggcattgtgtgttgaaagtgtatgtttatagtactgcctgagccatctcatgaccccagcgtccaaaaccgatgctgtagaacagaacatatctgtacacaaatagtgtgtgcaaatagcatttgtacatagaaaagtctcattgtggcagattgagcataaattattcaactgacggtgcaaaaacattacttgcaaagaaaagtttatagtattttcctacactccaccctgggagatgatatttctatcaaatgaatatcagtgcattttaaatgtaatatgaaaacgatgctgccattttgtgaagaatacccacttggttgcagaggccaactttcatagctttgatttaatgttgtgacacggtgtatgcattttgctgtcaagcaatggataaacagctctgactttcattctcattccagtttattgacctcagataaaacactggcccttcttagaagcagaagtgtgcaccaagaccattcatttcaggtagactcacattcagtgccaagtgctcccatgggaataatcagacgcatatgttgcgaaagagtgaagggacttggacaaagaggggttttcctacagatggatgctcagtcttctaccaaaacatgtttggaggcagaactatgacctccccttaagtcctaacaatgtattttgtgtgtgcaaatcctgggatgcccgtttcacgctctgacataaagacatggcacctctagtgagtgatcaggaagattccatatgcatttgggagcttcaggtgcttgttagacacagtgagccattcaaggcaagcaccacctttgctagtgaggccaagagagcctgtgacaatttgacaatttgttccagaaccagtctgatgcaagtgcacctctaatatatgccttacaaactccagaggccatattcaaaacagggtcttctcagtgtatgcaaggggctgcagcccctcttctcttcctccccaggttgaacaatacggacagttttcacacatatctacctgtataaccctctgtacctctcataactggtcaacgactgtaacaggttacatcaggtgtttttctacatactttttacacagattctatgcgattaatgtaatttaattcaatgcatcattttattgtactagttcttaggcttgtccttatttttttctaagtgattgtggtttttctcgtggtttttattgtaaaaaatgaaaggctgttgatgcttattctctgtaactaagaatttttaccttttgggggaaaaaagcattgctatgaactaatgaattgaaacttcatttactcattgtaaatacactattgtgcaaaaaaagttttcactcaattgaattgctagtgttaactgaattttgtctagacaccatttctgttgatgaaataaagacatatcattatgcattgtaaactg

SEQ ID NO: 3841 - DNA, 2712 bp, Homo sapiens
  source 1..2712: mol_type = unassigned DNA
cagggtaacgctgtcttgtggacccgcacttcccacccgagacctctcactgagcccgagccgcgcgcgacatgagccacgggaagggaaccgacatgctcccggagatcgccgccgccgtgggcttcctctccagcctcctgaggacccggggctgcgtgagcgagcagaggcttaaggtcttcagcggggcgctccaggaggcactcacagagcactacaaacaccactggtttcccgaaaagccgtccaagggctccggctaccgctgcattcgcatcaaccacaagatggaccccatcatcagcagggtggccagccagatcggactcagccagccccagctgcaccagctgctgcccagcgagctgaccctgtgggtggacccctatgaggtgtcctaccgcattggggaggacggctccatctgcgtcttgtacgaggaggccccactggccgcctcctgtgggctcctcacctgcaagaaccaagtgctgctgggccggagcagcccctccaagaactacgtgatggcagtctccagctaggcccttccgcccccgccctgggcgccgccgtgctcatgctgccgtgacaacaggccaccacatacctcaacctggggaactgtatttttaaatgaagagctatttatatatattatttttttttaagaaaggaggaaaagaaaccaaaagttttttttaagaaaaaaaatccttcaagggagctgcttggaagtggcctccccaggtgcctttggagagaactgttgcgtgcttgagtctgtgagccagtgtctgcctataggagggggagctgttagggggtagacctagccaaggagaagtgggagacgtttggctagcaccccaggaagatgtgagagggagcaagcaaggttagcaactgtgaacagagaggtcgggatttgccctgggggaggaagagaggccaagttcagagctctctgtctcccccagccagacacctgcatccctggctcctctattactcaggggcattcatgcctggacttaaacaatactatgttatcttttcttttatttttctaatgaggtcctgggcagagagtgaaaaggcctctcctgattcctactgtcctaagctgcttttcttgaaatcatgacttgtttctaattctaccctcaggggcctgtagatgttgctttccagccaggaatctaaagctttgggttttctgaggggggggaggagggaactggaggttattggggttaggatggaagggaactctgcacaaaacctttgctttgctagtgctgctttgtgtgtatgtgtggcaaataatttgggggtgatttgcaatgaaattttgggacccaaagagtatccactggggatgttttttggccaaaactcttccttttggaaccacatgaaagtcttgatgctgctgccatgatccctttgagaggtggctcaaaagctacagggaactccaggtcctttattactgccttcttttcaaaagcacaactctcctctaaccctcccctcccccttcccttctggtcgggtcatagagctaccgtattttctaggacaagagttctcagtcactgtgcaatatgccccctgggtcccaggagggtctggaggaaaactggctatcagaacctcctgatgccctggtgggcttagggaaccatctctcctgctctccttgggatgatggctggctagtcagccttgcatgtattccttggctgaatgggagagtgccccatgttctgcaagactacttggtattcttgtagggccgacactaaataaaagccaaaccttgggcactgttttttctccctggtgctcagagcacctgtgggaaaggttgctgtctgtctcagtacaatccaaatttgtcgtagacttgtgcaatatatactgttgtgggttggagaaaagtggaaagctacactgggaagaaactcccttccttcaatttctcagtgacattgatgaggggtcctcaaaagacctcgagtttcccaaaccgaatcaccttaagaaggacagggctagggcatttggccaggatggccaccctcctgctgttgccccttagtgaggaatcttcaccccacttcctctacccccaggttctcctccccacagccagtcccctttcctggatttctaaactgctcaattttgactcaaaggtgctatttaccaaacactctccctacccattcctgccagctctgcctccttttcaactctccacattttgtattgccttcccagacctgcttccagtctttattgctttaaagttcactttgggcccacagacccaagagctaattttctggtttgtgggttgaaacaaagctgtgaatcactgcaggctgtgttcttgcatcttgtctgcaaacaggtccctgcctttttagaagcagcctcatggtctcatgcttaatcttgtctctcttctcttctttatgatgttcactttaaaaacaacaaaacccctgagctggactgttgagcaggcctgtctctcctattaagtaaaaataaatagtagtagtatgtttgtaagctattctgacagaaaagacaaaggttactaattgtatgatagtgtttttatatggaagaatgtacagcttatggacaaatgtacacctttttgttactttaataaaaatgtagtaggataaa

SEQ ID NO: 3842 - DNA, 3507 bp, Homo sapiens
  source 1..3507: mol_type = unassigned DNA
atgggcaggcgccctgaaacgttcggcgagccgactgcggctgcgcggggtattcgaatcggcggcggcttctagtttgcggttcaggtttggccgctgccggccagcgtcctctggccatggacaccccggaaaatgtccttcagatgcttgaagcccacatgcagagctacaagggcaatgaccctcttggtgaatgggaaagatacatacagtgggtagaagagaattttcctgagaataaagaatacttgataactttactagaacatttaatgaaggaatttttagataagaagaaataccacaatgacccaagattcatcagttattgtttaaaatttgctgagtacaacagtgacctccatcaattttttgagtttctgtacaaccatgggattggaaccctgtcatcccctctgtacattgcctgggcggggcatctggaagcccaaggagagctgcagcatgccagtgctgtccttcagagaggaattcaaaaccaggctgaacccagagagttcctgcaacaacaatacaggttatttcagacacgcctcactgaaacccatttgccagctcaagctagaacctcagaacctctgcataatgttcaggttttaaatcaaatgataacatcaaaatcaaatccaggaaataacatggcctgcatttctaagaatcagggttcagagctttctggagtgatatcttcagcttgtgataaagagtcaaatatggaacgaagagtgatcacgatttctaaatcagaatattctgtgcactcatctttggcatccaaagttgatgttgagcaggttgttatgtattgcaaggagaagcttattcgtggggaatcagaattttcctttgaagaattgagagcccagaaatacaatcaacggagaaagcatgagcaatgggtaaatgaagacagacattatatgaaaaggaaagaagcaaatgcttttgaagaacagctattaaaacagaaaatggatgaacttcataagaagttgcatcaggtggtggagacatcccatgaggatctgcccgcttcccaggaaaggtccgaggttaatccagcacgtatggggccaagtgtaggctcccagcaggaactgagagcgccatgtcttccagtaacctatcagcagacaccagtgaacatggaaaagaacccaagagaggcacctcctgttgttcctcctttggcaaatgctatttctgcagctttggtgtccccagccaccagccagagcattgctcctcctgttcctttgaaagcccagacagtaacagactccatgtttgcagtggccagcaaagatgctggatgtgtgaataagagtactcatgaattcaagccacagagtggagcagagatcaaagaagggtgtgaaacacataaggttgccaacacaagttcttttcacacaactccaaacacatcactgggaatggttcaggcaacgccatccaaagtgcagccatcacccaccgtgcacacaaaagaagcattaggtttcatcatgaatatgtttcaggctcctacacttcctgatatttctgatgacaaagatgaatggcaatctctagatcaaaatgaagatgcatttgaagcccagtttcaaaaaaatgtaaggtcatctggggcttggggagtcaataagatcatctcttctttgtcatctgcttttcatgtgtttgaagatggaaacaaagaaaattatggattaccacagcctaaaaataaacccacaggagccaggacctttggagaacgctctgtcagcagacttccttcaaaaccaaaggaggaagtgcctcatgctgaagagtttttggatgactcaactgtatggggtattcgctgcaacaaaaccctggcacccagtcctaagagcccaggagacttcacatctgctgcacaacttgcgtctacaccattccacaagcttccagtggagtcagtgcacattttagaagataaagaaaatgtggtagcaaaacagtgtacccaggcgactttggattcttgtgaggaaaacatggtggtgccttcaagggatggaaaattcagtccaattcaagagaaaagcccaaaacaggccttgtcgtctcacatgtattcagcatccttacttcgtctgagccagcctgctgcaggtggggtacttacctgtgaggcagagttgggcgttgaggcttgcagactcacagacactgacgctgccattgcagaagatccaccagatgctattgctgggctccaagcagaatggatgcagatgagttcacttgggactgttgatgctccaaacttcattgttgggaacccatgggatgataagctgattttcaaacttttatctgggctttctaaaccagtgagttcctatccaaatacttttgaatggcaatgtaaacttccagccatcaagcccaagactgaatttcaattgggttctaagctggtctatgtccatcaccttcttggagaaggagcctttgcccaggtgtacgaagctacccagggagatctgaatgatgctaaaaataaacagaaatttgttttaaaggtccaaaagcctgccaacccctgggaattctacattgggacccagttgatggaaagactaaagccatctatgcagcacatgtttatgaagttctattctgcccacttattccagaatggcagtgtattagtaggagagctctacagctatggaacattattaaatgccattaacctctataaaaatacccctgaaaaagtgatgcctcaaggtcttgtcatctcttttgctatgagaatgctttacatgattgagcaagtgcatgactgtgaaatcattcatggagacattaaaccagacaatttcatacttggaaacggatttttggaacaggatgatgaagatgatttatctgctggcttggcactgattgacctgggtcagagtatagatatgaaactttttccaaaaggaactatattcacagcaaagtgtgaaacatctggttttcagtgtgttgagatgctcagcaacaaaccatggaactaccagatcgattactttggggttgctgcaacagtatattgcatgctctttggcacttacatgaaagtgaaaaatgaaggaggagagtgtaagcctgaaggtctttttagaaggcttcctcatttggatatgtggaatgaattttttcatgttatgttgaatattccagattgtcatcatcttccatctttggatttgttaaggcaaaagctgaagaaagtatttcaacaacactatactaacaagattagggccctacgtaataggctaattgtactgctcttagaatgtaagcgttcacgaaaataaaatttggatatagacagtccttaaaaatcacactgtaaatatgaatctgctcactttaaacctgtttttttttcatttattgtttatgtaaatgtttgttaaaaataaatcccatggaatatttccatgt

SEQ ID NO: 3843 - DNA, 3287 bp, Homo sapiens
  source 1..3287: mol_type = unassigned DNA
attcgaatcggcggcggcttctagtttgcggttcaggtttggccgctgccggccagcgtcctctggccatggacaccccggaaaatgtccttcagatgcttgaagcccacatgcagagctacaagggcaatgaccctcttggtgaatgggaaagatacatacagtgggtagaagagaattttcctgagaataaagaatacttgataactttactagaacatttaatgaaggaatttttagataagaagaaataccacaatgacccaagattcatcagttattgtttaaaatttgctgagtacaacagtgacctccatcaattttttgagtttctgtacaaccatgggattggaaccctgtcatcccctctgtacattgcctgggcggggcatctggaagcccaaggagagctgcagcatgccagtgctgtccttcagagaggaattcaaaaccaggctgaacccagagagttcctgcaacaacaatacaggttatttcagacacgcctcactgaaacccatttgccagctcaagctagaacctcagaacctctgcataatgttcaggttttaaatcaaatgataacatcaaaatcaaatccaggaaataacatggcctgcatttctaagaatcagggttcagagctttctggagtgatatcttcagcttgtgataaagagtcaaatatggaacgaagagtgatcacgatttctaaatcagaatattctgtgcactcatctttggcatccaaagttgatgttgagcaggttgttatgtattgcaaggagaagcttattcgtggggaatcagaattttcctttgaagaattgagagcccagaaatacaatcaacggagaaagcatgagcaatgggtaaatgaagacagacattatatgaaaaggaaagaagcaaatgcttttgaagaacagctattaaaacagaaaatggatgaacttcataagaagttgcatcaggtggtggagacatcccatgaggatctgcccgcttcccaggaaaggtccgaggttaatccagcacgtatggggccaagtgtaggctcccagcaggaactgagagcgccatgtcttccagtaacctatcagcagacaccagtgaacatggaaaagaacccaagagaggcacctcctgttgttcctcctttggcaaatgctatttctgcagctttggtgtccccagccaccagccagagcattgctcctcctgttcctttgaaagcccagacagtaacagactccatgtttgcagtggccagcaaagatgctggatgtgtgaataagagtactcatgaattcaagccacagagtggagcagagatcaaagaagggtgtgaaacacataaggttgccaacacaagttcttttcacacaactccaaacacatcactgggaatggttcaggcaacgccatccaaagtgcagccatcacccaccgtgcacacaaaagaagcattaggtttcatcatgaatatgtttcaggctcctacacttcctgatatttctgatgacaaagatgaatggcaatctctagatcaaaatgaagatgcatttgaagcccagtttcaaaaaaatgtaaggtcatctggggcttggggagtcaataagatcatctcttctttgtcatctgcttttcatgtgtttgaagatggaaacaaagaaaattatggattaccacagcctaaaaataaacccacaggagccaggacctttggagaacgctctgtcagcagacttccttcaaaaccaaaggaggaagtgcctcatgctgaagagtttttggatgactcaactgtatggggtattcgctgcaacaaaaccctggcacccagtcctaagagcccaggagacttcacatctgctgcacaacttgcgtctacaccattccacaagcttccagtggagtcagtgcacattttagaagataaagaaaatgtggtagcaaaacagtgtacccaggcgactttggattcttgtgaggaaaacatggtggtgccttcaagggatggaaaattcagtccaattcaagagaaaagcccaaaacaggccttgtcgtctcacatgtattcagcatccttacttcgtctgagccagcctgctgcaggtggggtacttacctgtgaggcagagttgggcgttgaggcttgcagactcacagacactgacgctgccattgcagaagatccaccagatgctattgctgggctccaagcagaatggatgcagatgagttcacttgggactgttgatgctccaaacttcattgttgggaacccatgggatgataagctgattttcaaacttttatctgggctttctaaaccagtgagttcctatccaaatacttttgaatggcaatgtaaacttccagccatcaagcccaagactgaatttcaattgggttctaagctggtctatgtccatcaccttcttggagaaggagcctttgcccaggtgtacgaagctacccagggagatctgaatgatgctaaaaataaacagaaatttgttttaaaggtccaaaagcctgccaacccctgggaattctacattgggacccagttgatggaaagactaaagccatctatgcagcacatgtttatgaagttctattctgcccacttattccagaatggcagtgtattagtaggagagctctacagctatggaacattattagatgatgaagatgatttatctgctggcttggcactgattgacctgggtcagagtatagatatgaaactttttccaaaaggaactatattcacagcaaagtgtgaaacatctggttttcagtgtgttgagatgctcagcaacaaaccatggaactaccagatcgattactttggggttgctgcaacagtatattgcatgctctttggcacttacatgaaagtgaaaaatgaaggaggagagtgtaagcctgaaggtctttttagaaggcttcctcatttggatatgtggaatgaattttttcatgttatgttgaatattccagattgtcatcatcttccatctttggatttgttaaggcaaaagctgaagaaagtatttcaacaacactatactaacaagattagggccctacgtaataggctaattgtactgctcttagaatgtaagcgttcacgaaaataaaatttggatatagacagtccttaaaaatcacactgtaaatatgaatctgctcactttaaacctgtttttttttcatttattgtttatgtaaatgtttgttaaaaataaatcccatggaatatttccatgtaa

SEQ ID NO: 3844 - DNA, 3532 bp, Homo sapiens
  source 1..3532: mol_type = unassigned DNA
attcgaatcggcggcggcttctagtttgcggttcaggtttggccgctgccggccagcgtcctctggccatggacaccccggaaaatgtccttcaatacatacagtgggtagaagagaattttcctgagaataaagaatacttgataactttactagaacatttaatgaaggaatttttagataagaagaaataccacaatgacccaagattcatcagttattgtttaaaatttgctgagtacaacagtgacctccatcaattttttgagtttctgtacaaccatgggattggaaccctgtcatcccctctgtacattgcctgggcggggcatctggaagcccaaggagagctgcagcatgccagtgctgtccttcagagaggaattcaaaaccaggctgaacccagagagttcctgcaacaacaatacaggttatttcagacacgcctcactgaaacccatttgccagctcaagctagaacctcagaacctctgcataatgttcaggttttaaatcaaatgataacatcaaaatcaaatccaggaaataacatggcctgcatttctaagaatcagggttcagagctttctggagtgatatcttcagcttgtgataaagagtcaaatatggaacgaagagtgatcacgatttctaaatcagaatattctgtgcactcatctttggcatccaaagttgatgttgagcaggttgttatgtattgcaaggagaagcttattcgtggggaatcagaattttcctttgaagaattgagagcccagaaatacaatcaacggagaaagcatgagcaatgggtaaatgaagacagacattatatgaaaaggaaagaagcaaatgcttttgaagaacagctattaaaacagaaaatggatgaacttcataagaagttgcatcaggtggtggagacatcccatgaggatctgcccgcttcccaggaaaggtccgaggttaatccagcacgtatggggccaagtgtaggctcccagcaggaactgagagcgccatgtcttccagtaacctatcagcagacaccagtgaacatggaaaagaacccaagagaggcacctcctgttgttcctcctttggcaaatgctatttctgcagctttggtgtccccagccaccagccagagcattgctcctcctgttcctttgaaagcccagacagtaacagactccatgtttgcagtggccagcaaagatgctggatgtgtgaataagagtactcatgaattcaagccacagagtggagcagagatcaaagaagggtgtgaaacacataaggttgccaacacaagttcttttcacacaactccaaacacatcactgggaatggttcaggcaacgccatccaaagtgcagccatcacccaccgtgcacacaaaagaagcattaggtttcatcatgaatatgtttcaggctcctacacttcctgatatttctgatgacaaagatgaatggcaatctctagatcaaaatgaagatgcatttgaagcccagtttcaaaaaaatgtaaggtcatctggggcttggggagtcaataagatcatctcttctttgtcatctgcttttcatgtgtttgaagatggaaacaaagaaaattatggattaccacagcctaaaaataaacccacaggagccaggacctttggagaacgctctgtcagcagacttccttcaaaaccaaaggaggaagtgcctcatgctgaagagtttttggatgactcaactgtatggggtattcgctgcaacaaaaccctggcacccagtcctaagagcccaggagacttcacatctgctgcacaacttgcgtctacaccattccacaagcttccagtggagtcagtgcacattttagaagataaagaaaatgtggtagcaaaacagtgtacccaggcgactttggattcttgtgaggaaaacatggtggtgccttcaagggatggaaaattcagtccaattcaagagaaaagcccaaaacaggccttgtcgtctcacatgtattcagcatccttacttcgtctgagccagcctgctgcaggtggggtacttacctgtgaggcagagttgggcgttgaggcttgcagactcacagacactgacgctgccattgcagaagatccaccagatgctattgctgggctccaagcagaatggatgcagatgagttcacttgggactgttgatgctccaaacttcattgttgggaacccatgggatgataagctgattttcaaacttttatctgggctttctaaaccagtgagttcctatccaaatacttttgaatggcaatgtaaacttccagccatcaagcccaagactgaatttcaattgggttctaagctggtctatgtccatcaccttcttggagaaggagcctttgcccaggtgtacgaagctacccagggagatctgaatgatgctaaaaataaacagaaatttgttttaaaggtccaaaagcctgccaacccctgggaattctacattgggacccagttgatggaaagactaaagccatctatgcagcacatgtttatgaagttctattctgcccacttattccagaatggcagtgtattagtaggagagctctacagctatggaacattattaaatgccattaacctctataaaaatacccctgaaaaagtgatgcctcaaggtcttgtcatctcttttgctatgagaatgctttacatgattgagcaagtgcatgactgtgaaatcattcatggagacattaaaccagacaatttcatacttggaaacggatttttggaacaggatgatgaagatgatttatctgctggcttggcactgattgacctgggtcagagtatagatatgaaactttttccaaaaggaactatattcacagcaaagtgtgaaacatctggttttcagtgtgttgagatgctcagcaacaaaccatggaactaccagatcgattactttggggttgctgcaacagtatattgcatgctctttggcacttacatgaaagtgaaaaatgaaggaggagagtgtaagcctgaaggtctttttagaaggcttcctcatttggatatgtggaatgaattttttcatgttatgttgaatattccagattgtcatcatcttccatctttggatttgttaaggcaaaagctgaagaaagtatttcaacaacactatactaacaagattagggccctacgtaataggctaattgtactgctcttagaatgtaagcgttcacgaaaataaaatttggatatagacagtccttaaaaatcacactgtaaatatgaatctgctcactttaaacctgtttttttttcatttattgtttatgtaaatgtttgttaaaaataaatcccatggaatatttccatgtaacttagttgttataaatatttcaacaaaatatacaaccccataaggtccctatatagcaggctgattgggctgcttctgggatgcaagcatttgtgagaataattcagacatgagcattctctagaaatcacttt

SEQ ID NO: 3845 - DNA, 2506 bp, Homo sapiens
  source 1..2506: mol_type = unassigned DNA
ggtttggccgctgccggccagcgtcctctggccatggacaccccggaaaatgtccttcagatgcttgaagcccacatgcagagctacaagggcaatgaccctcttggtgaatgggaaagatacatacagtgggtagaagagaattttcctgagaataaagaatacttgataactttactagaacatttaatgaaggaatttttagataagaagaaataccacaatgacccaagattcatcagttattgtttaaaatttgctgagtacaacagtgacctccatcaattttttgagtttctgtacaaccatgggattggaaccctgtcatcccctctgtacattgcctgggcggggcatctggaagcccaaggagagctgcagcatgccagtgctgtccttcagagaggaattcaaaaccaggctgaacccagagagttcctgcaacaacaatacaggttatttcagacacgcctcactgaaacccatttgccagctcaagctagaacctcagaacctctgcataatgttcaggttttaaatcaaatgataacatcaaaatcaaatccaggaaataacatggcctgcatttctaagaatcagggttcagagctttctggagtgatatcttcagcttgtgataaagagtcaaatatggaacgaagagtgatcacgatttctaaatcagaatattctgtgcactcatctttggcatccaaagttgatgttgagcaggttgttatgtattgcaaggagaagcttattcgtggggaatcagaattttcctttgaagaattgagagcccagaaatacaatcaacggagaaagcatgagcaatgggtaaatgaagacagacattatatgaaaaggaaagaagcaaatgcttttgaagaacagctattaaaacagaaaatggatgaacttcataagaagttgcatcaggtggtggagacatcccatgaggatctgcccgcttcccaggaaaggtccgaggttaatccagcacgtatggggccaagtgtaggctcccagcaggaactgagagcgccatgtcttccagtaacctatcagcagacaccagtgaacatggaaaagaacccaagagaggcacctcctgttgttcctcctttggcaaatgctatttctgcagctttggtgtccccagccaccagccagagcattgctcctcctgttcctttgaaagcccagacagtaacagactccatgtttgcagtggccagcaaagatgctggatgtgtgaataagagtactcatgaattcaagccacagagtggagcagagatcaaagaagggtgtgaaacacataaggttgccaacacaagttcttttcacacaactccaaacacatcactgggaatggttcaggcaacgccatccaaagtgcagccatcacccaccgtgcacacaaaagaagcattaggtttcatcatgaatatgtttcaggctcctacacttcctgatatttctgatgacaaagatgaatggcaatctctagatcaaaatgaagatgcatttgaagcccagtttcaaaaaaatgtaaggtcatctggggcttggggagtcaataagatcatctcttctttgtcatctgcttttcatgtgtttgaagatggaaacaaagaaaattatggattaccacagcctaaaaataaacccacaggagccaggacctttggagaacgctctgtcagcagacttccttcaaaaccaaaggaggaagtgcctcatgctgaagagtttttggatgactcaactgtatggggtattcgctgcaacaaaaccctggcacccagtcctaagagcccaggagacttcacatctgctgcacaacttgcgtctacaccattccacaagcttccagtggagtcagtgcacattttagaagataaagaaaatgtggtagcaaaacagtgtacccaggcgactttggattcttgtgaggaaaacatggtggtgccttcaagggatggaaaattcagtccaattcaagagaaaagcccaaaacaggccttgtcgtctcacatgtattcagcatccttacttcgtctgagccagcctgctgcaggtggggtacttacctgtgaggcagagttgggcgttgaggcttgcagactcacagacactgacgctgccattgcagaagatccaccagatgctattgctgggctccaagcagaatggatgcagatgagttcacttgggactgttgatgctccaaacttcattgttgggaacccatgggatgataagctgattttcaaacttttatctgggctttctaaaccagtgagttcctatccaaatacttttgaatggcaatgtaaacttccagccatcaagcccaagactgaatttcaattgggttctaagctggtctatgtccatcaccttcttggagaaggagcctttgcccaggtgtacgaagctacccagggagatctgaatgatgctaaaaataaacagaaatttgttttaaaggtaaaatcct

SEQ ID NO: 3846 - DNA, 1361 bp, Homo sapiens
  source 1..1361: mol_type = unassigned DNA
gaagcaaggaggcggcggcggccgcagcgagtggcgagtagtggaaacgttgcttctgaggggagcccaagatgaccggttctaacgagttcaagctgaaccagccacccgaggatggcatctcctccgtgaagttcagccccaacacctcccagttcctgcttgtctcctcctgggacacgtccgtgcgtctctacgatgtgccggccaactccatgcggctcaagtaccagcacaccggcgccgtcctggactgcgccttctacgatccaacgcatgcctggagtggaggactagatcatcaattgaaaatgcatgatttgaacactgatcaagaaaatcttgttgggacccatgatgcccctatcagatgtgttgaatactgtccagaagtgaatgtgatggtcactggaagttgggatcagacagttaaactgtgggatcccagaactccttgtaatgctgggaccttctctcagcctgaaaaggtatataccctctcagtgtctggagaccggctgattgtgggaacagcaggccgcagagtgttggtgtgggacttacggaacatgggttacgtgcagcagcgcagggagtccagcctgaaataccagactcgctgcatacgagcgtttccaaacaagcagggttatgtattaagctctattgaaggccgagtggcagttgagtatttggacccaagccctgaggtacagaagaagaagtatgccttcaaatgtcacagactaaaagaaaataatattgagcagatttacccagtcaatgccatttcttttcacaatatccacaatacatttgccacaggtggttctgatggctttgtaaatatttgggatccatttaacaaaaagcgactgtgccaattccatcggtaccccacgagcatcgcatcacttgccttcagtaatgatgggactacgcttgcaatagcgtcatcatatatgtatgaaatggatgacacagaacatcctgaagatggtatcttcattcgccaagtgacagatgcagaaacaaaacccaagtccacctaatcatcctgtgaaagtggtttctctatggaaagctttgtttgcttcctacaaatacatgcttattccttaagggatgtgttagagttactgtggatttctctgttttctgtcttacaagaaacttgtctatgtaccttaatactttgtttaggatgaggagtctttgtgtccctgtacagtagtctgacgtatttccccttctgtcccctagtaagcccagttgctgtatctgaacagtttgagctctttttgtaatatactctaaacctgttatttctgtgctaataaacgagatgcagaacccttgaa

SEQ ID NO: 3847 - DNA, 2731 bp, Homo sapiens
  source 1..2731: mol_type = unassigned DNA
gggttgaccgatgctgggcagctgagcggaccaatcggccccctagactgagacgttggcgtttgaaatcagccaatggcaggtctacactggagcttcctctccgcctccttcgcctagcctgcgagtgttctgagggaagcaaggaggcggcggcggccgcagcgagtggcgagtagtggaaacgttgcttctgaggggagcccaagatgaccggttctaacgagttcaagctgaaccagccacccgaggatggcatctcctccgtgaagttcagccccaacacctcccagttcctgcttgtctcctcctgggacacgtccgtgcgtctctacgatgtgccggccaactccatgcggctcaagtaccagcacaccggcgccgtcctggactgcgccttctacgatccaacgcatgcctggagtggaggactagatcatcaattgaaaatgcatgatttgaacactgatcaagaaaatcttgttgggacccatgatgcccctatcagatgtgttgaatactgtccagaagtgaatgtgatggtcactggaagttgggatcagacagttaaactgtgggatcccagaactccttgtaatgctgggaccttctctcagcctgaaaaggtatataccctctcagtgtctggagaccggctgattgtgggaacagcaggccgcagagtgttggtgtgggacttacggaacatgggttacgtgcagcagcgcagggagtccagcctgaaataccagactcgctgcatacgagcgtttccaaacaagcagggttatgtattaagctctattgaaggccgagtggcagttgagtatttggacccaagccctgaggtacagaagaagaagtatgccttcaaatgtcacagactaaaagaaaataatattgagcagatttacccagtcaatgccatttcttttcacaatatccacaatacatttgccacaggtggttctgatggctttgtaaatatttgggatccatttaacaaaaagcgactgtgccaattccatcggtaccccacgagcatcgcatcacttgccttcagtaatgatgggactacgcttgcaatagcgtcatcatatatgtatgaaatggatgacacagaacatcctgaagatggtatcttcattcgccaagtgacagatgcagaaacaaaacccaagtcaccatgtacttgacaagatttcatttacttaagtgccatgttgatgataataaaacaattcgtactccccaatggtggatttattactattaaagaaaccagggaaaatattaattttaatattataacaacctgaaaataatggaaaagaggtttttgaatttttttttttaaataaacaccttcttaagtgcatgagatggtttgatggtttgctgcattaaaggtatttgggcaaacaaaattggagggcaagtgactgcagttttgagaatcagttttgaccttgatgattttttgtttccactgtggaaataaatgtttgtaaataagtgtaataaaaatccctttgcattctttctggaccttaaatggtagaggaaaaggctcgtgagccatttgtttcttttgctggttatagttgctaattctaaagctgcttcagactgcttcatgaggaggttaatctacaattaaacaatatttcctcttggccgtccattattttctgaagcagatggttcatcatttcctgggctgttaaacaaagcgaggttaaggttagactcttgggaatcagctagttttcaatcttattagggtgcagaaggaaaactaataagaaaacctcctaatatcattttgtgactgtaaacaattatttattagcaaacaattgatcccagaagggcaaattgtttgagtcagtaatgagctgagaaaagacagagcatatctgtgtatttggaaaaataattgtaacgtaattgcagtgcatttagacaggcatctatttggacctgtttctatctctaaatgaatttttggaaacattaatgaggtttacatatttctctgacatttatatagttcttatgtccatttcagttgaccagccgctggtgattaaagttaaaaagaaaaaaattatagtgagaatgagattcatttcaatgtaatgcactaaagcagaacacgaacttagcttggcctattctaggtagttccaaatagtatttttgttgtcaaactttaaaatttatattaatttgcaaatgtatgtctctgagtaggacttggacctttcctgagatttattttatccgtgatgtattttttttaattcttttgatacagagaagggtctttttttttttaagtatttcagtgaaaacttggtgtaagtctgaacccatcttttgaaatgtattttcttcattgcaggtccacctaatcatcctgtgaaagtggtttctctatggaaagctttgtttgcttcctacaaatacatgcttattccttaagggatgtgttagagttactgtggatttctctgttttctgtcttacaagaaacttgtctatgtaccttaatactttgtttaggatgaggagtctttgtgtccctgtacagtagtctgacgtatttccccttctgtcccctagtaagcccagttgctgtatctgaacagtttgagctctttttgtaatatactctaaacctgttatttctgtgctaataaacgagatgcagaacccttgaatgttg

SEQ ID NO: 3848 - DNA, 1175 bp, Homo sapiens
  source 1..1175: mol_type = unassigned DNA
ctagcctgcgagtgttctgagggaagcaaggaggcggcggcggccgcagcgagtggcgagtagtggaaacgttgcttctgaggggagcccaaggatccaacgcatgcctggagtggaggactagatcatcaattgaaaatgcatgatttgaacactgatcaagaaaatcttgttgggacccatgatgcccctatcagatgtgttgaatactgtccagaagtgaatgtgatggtcactggaagttgggatcagacagttaaactgtgggatcccagaactccttgtaatgctgggaccttctctcagcctgaaaaggtatataccctctcagtgtctggagaccggctgattgtgggaacagcaggccgcagagtgttggtgtgggacttacggaacatgggttacgtgcagcagcgcagggagtccagcctgaaataccagactcgctgcatacgagcgtttccaaacaagcagggttatgtattaagctctattgaaggccgagtggcagttgagtatttggacccaagccctgaggtacagaagaagaagtatgccttcaaatgtcacagactaaaagaaaataatattgagcagatttacccagtcaatgccatttcttttcacaatatccacaatacatttgccacaggtggttctgatggctttgtaaatatttgggatccatttaacaaaaagcgactgtgccaattccatcggtaccccacgagcatcgcatcacttgccttcagtaatgatgggactacgcttgcaatagcgtcatcatatatgtatgaaatggatgacacagaacatcctgaagatggtatcttcattcgccaagtgacagatgcagaaacaaaacccaagtcaccatgtacttgacaagatttcatttacttaagtgccatgttgatgataataaaacaattcgtactccccaatggtggatttattactattaaagaaaccagggaaaatattaattttaatattataacaacctgaaaataatggaaaagaggtttttgaatttttttttttaaataaacaccttcttaagtgcatgagatggtttgatggtttgctgcattaaaggtatttgggcaaacaaaattggagggcaagtgactgcagttttgagaatcagttttgaccttgatgattttttgttt

SEQ ID NO: 3849 - DNA, 1886 bp, Homo sapiens
  source 1..1886: mol_type = unassigned DNA
aagaagtgaactgcttgttcacttgctgctgttgccactgctggtacagaaatagaaggtaagacagcacaaaaaaacaaagacaaaaaacctccaagctcccttcagtagttgctacaccttcagattgagacatccttcctcatttacaaacctcagctgtgtctgggggcagggccacagtgaaactgccaggagcaaaaaggcttccaagaaaaagtaccacatcagattggaaactggggacagatcattcctgggatgtgacgggcaccagaatgctccctctccaaaggatctaaggaccaaagctgacagtttctttacttgcaggtagctgacagcatctactcctgaagaccggaaacatggcttgtaccatccaaaaggcagaagcacttgacggggctcatttgatgcagatcctctggtatgatgaggaagagtctctctacccagctgtatggttgagagacaactgtccgtgctctgattgctacctggattccgcaaaagcacggaaacttctagtggaagctcttgatgtgaacattggaattaaaggcttgatatttgacagaaaaaaggtgtacatcacatggcccgatgagcattacagtgaattccaggctgattggctgaagaaaagatgcttttccaagcaggccagagcaaagctccaaagagaattgttttttccagaatgccaatactggggctcagagctccagctacccactttggattttgaagatgttttaagatatgatgaacacgcatacaagtggctctccaccctcaagaaagtaggcatagtaagactcaccggagcatctgacaaaccaggagaagtttcaaaacttgggaaaaggatgggtttcctctatctcacattttatggacatacttggcaagtgcaagacaaaatcgatgcaaacaatgtggcttacacaactgggaagctaagctttcacactgattatccagccctccatcatccacctggggttcagcttcttcactgcataaagcaaacagtcacagggggtgattcagaaattgtagatgggtttaatgtgtgccaaaaactaaagaaaaataatcctcaggcattccagattttgtcctctacctttgtggactttacagacattggagtggattactgtgatttttctgtacaatcaaaacataaaattatagagttagatgataaaggccaagtggttcgcatcaacttcaataacgcaactagggacacaatatttgatgtgcctgttgaaagagttcagcctttttatgctgctctgaaggagtttgttgacctcatgaacagcaaagaatccaagtttaccttcaagatgaatccaggtgatgtgattacttttgataactggcgcttacttcatggccgacgtagctatgaagcaggaactgagatatcccgccatctagaaggagcttatgctgactgggatgtggtcatgtcaaggcttcgtatcttaaggcagagggtggagaatggaaactgaagtcacctgtagataattttaataagattccaatgaccatattttgtgagatatggcacattattcacagaccatgatctttgtgatttacatataatttccttaacaatgaacatgtaacttctctcacaagagtactctttactttgtaatcatatacaatgtcaactttttagatgtttcaccactcttttgcaaataaagcatcctttctgctctgttgcatgcctgctctaatttcttttgcccatatatgagtatctccagaatgtctacaaatagtttttgtagcaaatgaaaatttcttcaaataagccttttgtttcaaataaaacttgtctcaaaacatgcttc

SEQ ID NO: 3850 - DNA, 1596 bp, Homo sapiens
  source 1..1596: mol_type = unassigned DNA
acagtatgtgaaatactctcaccagaacaaaggtcccagcgtcaataagtcaaaccgcagactctgacagctgagtgaatagcagaggccagagtccacttgaagtgttcacactctcagaggccaagtttagatcttatctgcctgagattccttttaacactgatttgtcatagcaggtagctgacagcatctactcctgaagaccggaaacatggcttgtaccatccaaaaggcagaagcacttgacggggctcatttgatgcagatcctctggtatgatgaggaagagtctctctacccagctgtatggttgagagacaactgtccgtgctctgattgctacctggattccgcaaaagcacggaaacttctagtggaagctcttgatgtgaacattggaattaaaggcttgatatttgacagaaaaaaggtgtacatcacatggcccgatgagcattacagtgaattccaggctgattggctgaagaaaagatgcttttccaagcaggccagagcaaagctccaaagagaattgttttttccagaatgccaatactggggctcagagctccagctacccactttggattttgaagatgttttaagatatgatgaacacgcatacaagtggctctccaccctcaagaaagtaggcatagtaagactcaccggagcatctgacaaaccaggagaagtttcaaaacttgggaaaaggatgggtttcctctatctcacattttatggacatacttggcaagtgcaagacaaaatcgatgcaaacaatgtggcttacacaactgggaagctaagctttcacactgattatccagccctccatcatccacctggggttcagcttcttcactgcataaagcaaacagtcacagggggtgattcagaaattgtagatgggtttaatgtgtgccaaaaactaaagaaaaataatcctcaggcattccagattttgtcctctacctttgtggactttacagacattggagtggattactgtgatttttctgtacaatcaaaacataaaattatagagttagatgataaaggccaagtggttcgcatcaacttcaataacgcaactagggacacaatatttgatgtgcctgttgaaagagttcagcctttttatgctgctctgaaggagtttgttgacctcatgaacagcaaagaatccaagtttaccttcaagatgaatccaggtgatgtgattacttttgataactggcgcttacttcatggccgacgtagctatgaagcaggaactgagatatcccgccatctagaaggagcttatgctgactgggatgtggtcatgtcaaggcttcgtatcttaaggcagagggtggagaatggaaactgaagtcacctgtagataattttaataagattccaatgaccatattttgtgagatatggcacattattcacagaccatgatctttgtgatttacatataatttccttaacaatgaacatgtaacttctctcacaagagtactctttactttgtaatcatatacaatgtcaactttttagatgtttcaccactcttttgcaaataaagcatcctttctgctc

SEQ ID NO: 3851 - DNA, 1724 bp, Homo sapiens
  source 1..1724: mol_type = unassigned DNA
tctgggggcagggccacagtgaaactgccaggagcaaaaaggcttccaagaaaaagtaccacatcagattggaaactggggacagatcattcctgggatgtgacgggcaccagaatgctccctctccaaaggatctaaggaccaaagctgacagtttctttacttgcaggtagctgacagcatctactcctgaagaccggaaacatggcttgtaccatccaaaaggcagaagcacttgacggggctcatttgatgcagatcctctggtatgatgaggaagagtctctctacccagctgtatggttgagagacaactgtccgtgctctgattgctacctggattccgcaaaagcacggaaacttctagtggaagctcttgatgtgaacattggaattaaaggcttgatatttgacagaaaaaaggtgtacatcacatggcccgatgagcattacagtgaattccaggctgattggctgaagaaaagatgcttttccaagcaggccagagcaaagctccaaagagaattgttttttccagaatgccaatactggggctcagagctccagctacccactttggattttgaagatgttttaagatatgatgaacacgcatacaagtggctctccaccctcaagaaagtaggcatagtaagactcaccggagcatctgacaaaccaggagaagtttcaaaacttgggaaaaggatgggtttcctctatctcacattttatggacatacttggcaagtgcaagacaaaatcgatgcaaacaatgtggcttacacaactgggaagctaagctttcacactgattatccagccctccatcatccacctggggttcagcttcttcactgcataaagcaaacagtcacagggggtgattcagaaattgtagatgggtttaatgtgtgccaaaaactaaagaaaaataatcctcaggcattccagattttgtcctctacctttgtggactttacagacattggagtggattactgtgatttttctgtacaatcaaaacataaaattatagagttagatgataaaggccaagtggttcgcatcaacttcaataacgcaactagggacacaatatttgatgtgcctgttgaaagagttcagcctttttatgctgctctgaaggagtttgttgacctcatgaacagcaaagaatccaagtttaccttcaagatgaatccaggtgatgtgattacttttgataactggcgcttacttcatggccgacgtagctatgaagcaggaactgagatatcccgccatctagaaggagcttatgctgactgggatgtggtcatgtcaaggcttcgtatcttaaggcagagggtggagaatggaaactgaagtcacctgtagataattttaataagattccaatgaccatattttgtgagatatggcacattattcacagaccatgatctttgtgatttacatataatttccttaacaatgaacatgtaacttctctcacaagagtactctttactttgtaatcatatacaatgtcaactttttagatgtttcaccactcttttgcaaataaagcatcctttctgctctgttgcatgcctgctctaatttcttttgcccatatatgagtatctccagaatgtctacaaatagtttttgtagcaaatgaaaatttcttcaaataagccttttgtttcaaataaaacttgtctcaaaacatgcttcta

SEQ ID NO: 3852 - DNA, 1725 bp, Homo sapiens
  source 1..1725: mol_type = unassigned DNA
gcagagaaaggagggcatcaagcttaggggaccaatccctgtctttctaccagtccctgataactactcaagctccctttaaagaggctcatattggaatactctgttgacaagtagataccacttcacctctgctagggtgagcgctggtagctcctccctgttaaatgcccatctcaatgcctctgccctaagtgagttgtgcaataaatgagctgtcactctgaacaggtgggaaagaagtgaactgcttgttcacttgctgctgttgccactgctggtacagaaatagaaggtaagacaggtagctgacagcatctactcctgaagaccggaaacatggcttgtaccatccaaaaggcagaagcacttgacggggctcatttgatgcagatcctctggtatgatgaggaagagtctctctacccagctgtatggttgagagacaactgtccgtgctctgattgctacctggattccgcaaaagcacggaaacttctagtggaagctcttgatgtgaacattggaattaaaggcttgatatttgacagaaaaaaggtgtacatcacatggcccgatgagcattacagtgaattccaggctgattggctgaagaaaagatgcttttccaagcaggccagagcaaagctccaaagagaattgttttttccagaatgccaatactggggctcagagctccagctacccactttggattttgaagatgttttaagatatgatgaacacgcatacaagtggctctccaccctcaagaaagtaggcatagtaagactcaccggagcatctgacaaaccaggagaagtttcaaaacttgggaaaaggatgggtttcctctatctcacattttatggacatacttggcaagtgcaagacaaaatcgatgcaaacaatgtggcttacacaactgggaagctaagctttcacactgattatccagccctccatcatccacctggggttcagcttcttcactgcataaagcaaacagtcacagggggtgattcagaaattgtagatgggtttaatgtgtgccaaaaactaaagaaaaataatcctcaggcattccagattttgtcctctacctttgtggactttacagacattggagtggattactgtgatttttctgtacaatcaaaacataaaattatagagttagatgataaaggccaagtggttcgcatcaacttcaataacgcaactagggacacaatatttgatgtgcctgttgaaagagttcagcctttttatgctgctctgaaggagtttgttgacctcatgaacagcaaagaatccaagtttaccttcaagatgaatccaggtgatgtgattacttttgataactggcgcttacttcatggccgacgtagctatgaagcaggaactgagatatcccgccatctagaaggagcttatgctgactgggatgtggtcatgtcaaggcttcgtatcttaaggcagagggtggagaatggaaactgaagtcacctgtagataattttaataagattccaatgaccatattttgtgagatatggcacattattcacagaccatgatctttgtgatttacatataatttccttaacaatgaacatgtaacttctctcacaagagtactctttactttgtaatcatatacaatgtcaactttttagatgtttcaccactcttttgcaaataaagcatcctttctgctctgtt

SEQ ID NO: 3853 - DNA, 703 bp, Homo sapiens
  source 1..703: mol_type = unassigned DNA
gacaagtagataccacttcacctctgctagggtgagcgctggtagctcctccctgttaaatgcccatctcaatgcctctgccctaagtgagttgtgcaataaatgagctgtcactctgaacaggtgggaaagaagtgaactgcttgttcacttgctgctgttgccactgctggtacagaaatagaaggtaagacagcacaaaaaaacaaagacaaaaaacctccaagctcccttcagtagttgctacaccttcagattgagacatccttcctcatttacaaacctcagctgtgtctgggggcagggccacagtgaaactgccaggagcaaaaaggcttccaagaaaaagtaccacatcagattggaaactggggacagatcattcctgggatgtgacgggcaccagaatgctccctctccaaaggatctaaggaccaaagctgacagtttctttacttgcaggtagctgacagcatctactcctgaagaccggaaacatggcttgtaccatccaaaaggcagaagcacttgacggggctcatttgatgcagatcctctggtatgatgaggaagagtctctctacccagctgtatggttgagagacaactgtccgtgctctgattgctacctggattccgcaaaagcacggaaacttctagtggaagctcttgatgtgaacattggaattaaaggcttgatatt

SEQ ID NO: 3854 - DNA, 1570 bp, Homo sapiens
  source 1..1570: mol_type = unassigned DNA
agagaacaggtcccagataccgagtccgcaactccaaacatcgcgattaataggaggcctctggtctctgcctgccctgggtgctcatggaaccagctgctgctctgcacttctccctgccagcctccctcctcctcctcctgctcctcctccttctcagcctgtgtgcactggtctcagcccagtttactgtcgtggggccagctaatcccatcctggccatggtgggagaaaacactacattacgctgccatctgtcacccgagaaaaatgctgaggacatggaggtgcggtggttccggtctcagttctcccccgcagtgtttgtgtataagggtgggagagagagaacagaggagcagatggaggagtaccggggaagaatcacctttgtgagcaaagacatcaacaggggcagcgtggccctggtcatacataacgtcacagcccaggagaatgggatctaccgctgttacttccaagaaggcaggtcctacgatgaggccatcctacgcctcgtggtggcagaatcctttatgcccagcgcatctccctggatggtggccctagctgtcatcctgaccgcatctccctggatggtgtccatgactgtcatcctggctgttttcatcatcttcatggctgtcagcatctgttgcatcaagaaacttcaaagggaaaaaaagattctgtcaggggaaaagaaagttgaacaagaggaaaaagaaattgcacagcaacttcaagaagaattgcgatggagaagaacattcttacatgctgggtatgagctgcctgggatcaggggaccttcatggaaacggccactacatggggaacccccttcagctttctgagacttctctggggaccaggaaccacacaatccccagggttcctgagaccccaggcataaacctgagacttcctctgcagctgatgtggtcctggatccagacaccgctcatcccgagctcttcctgtcagaggaccggagaagtgtgaggcggggcccctacaggcagagagtgcctgacaacccagagagattcgacagtcagccttgtgtcctgggatgggagagcttcgcctcagggaaacattactgggaggtggaggtggaaaacgtgatggtgtggactgtgggggtctgcagacacagtgttgagaggaaaggggaggtcctgctgattcctcagaatggcttctggaccctggagatgtttggaaaccaataccgggccctgtcctcccctgagaggattctccctttgaaggagtccctttgccgggtgggcgtcttcctggactatgaagctggagatgtctccttctacaacatgagggacagatcgcacatctacacatgtccccgttcagcctttactgtgcctgtgaggcccttcttcaggttagggtctgatgacagccccatcttcatctgccctgcactcacaggagccagtggggtcatggtgcctgaagagggcctgaaacttcacagagtggggacccaccagagcctatagaatcaattccttggactcacagccatgcagataagccctgg

SEQ ID NO: 3855 - DNA, 1068 bp, Homo sapiens
  source 1..1068: mol_type = unassigned DNA
agagaacaggtcccagataccgagtccgcaactccaaacatcgcgattaataggaggcctctggtctctgcctgccctgggtgctcatggaaccagctgctgctctgcacttctccctgccagcctccctcctcctcctcctgctcctcctccttctcagcctgtgtgcactggtctcagaatcctttatgcccagcgcatctccctggatggtggccctagctgtcatcctgaccgcatctccctggatggtgtccatgactgtcatcctggctgttttcatcatcttcatggctgtcagcatctgttgcatcaagaaacttcaaagggaaaaaaagattctgtcaggggaaaagaaagttgaacaagaggaaaaagaaattgcacagcaacttcaagaagaattgcgatggagaagaacattcttacatgctgctgatgtggtcctggatccagacaccgctcatcccgagctcttcctgtcagaggaccggagaagtgtgaggcggggcccctacaggcagagagtgcctgacaacccagagagattcgacagtcagccttgtgtcctgggatgggagagcttcgcctcagggaaacattactgggaggtggaggtggaaaacgtgatggtgtggactgtgggggtctgcagacacagtgttgagaggaaaggggaggtcctgctgattcctcagaatggcttctggaccctggagatgtttggaaaccaataccgggccctgtcctcccctgagaggattctccctttgaaggagtccctttgccgggtgggcgtcttcctggactatgaagctggagatgtctccttctacaacatgagggacagatcgcacatctacacatgtccccgttcagcctttactgtgcctgtgaggcccttcttcaggttagggtctgatgacagccccatcttcatctgccctgcactcacaggagccagtggggtcatggtgcctgaagagggcctgaaacttcacagagtggggacccaccagagcctatagaatcaattccttggactcacagccatgcagataagccctg

SEQ ID NO: 3856 - DNA, 2294 bp, Homo sapiens
  source 1..2294: mol_type = unassigned DNA
cttccaaaaagagattgttattattcctcacaataaccagatagcctctgctttctttttcctttcttcggaatgagagactcaaccataatagaaagaatggagaactattaaccaccattcttcagtgggctgtgattttcagaggggaatactaagaaatggttttccatactggaacccaaaggtaaagacactcaaggacagacatttttggcagagctgctcactccttgctcagctcagttttctgtgcttggaccctctgggcccatcctggccatggtgggtgaagacgctgatctgccctgtcacctgttcccgaccatgagtgcagagaccatggagctgaggtgggtgagttccagcctaaggcaggtggtgaacgtgtatgcagatggaaaggaagtggaagacaggcagagtgcaccgtatcgagggagaacttcgattctgcgggatggcatcactgcagggaaggctgctctccgaatacacaacgtcacagcctctgacagtggaaagtacttgtgttatttccaagatggtgacttctacgaaaaagccctggtggagctgaaggttgcagcattgggttctgatcttcacattgaagtgaagggttatgaggatggagggatccatctggagtgcaggtccactggctggtacccccaaccccaaataaagtggagcgacaccaagggagagaacatcccggctgtggaagcacctgtggttgcagatggagtgggcctgtatgcagtagcagcatctgtgatcatgagaggcagctctggtgggggtgtatcctgcatcatcagaaattccctcctcggcctggaaaagacagccagcatatccatcgcagaccccttcttcaggagcgcccagccctggatcgcggccctggcagggaccctgcctatctcgttgctgcttctcgcaggagccagttacttcttgtggagacaacagaaggaaaaaattgctctgtccagggagacagaaagagagcgagagatgaaagaaatgggatacgctgcaacagagcaagaaataagcctaagagagtggaggaaaatccagtacatggctcgtggagagaagtctttggcctatcatgaatggaaaatggccctcttcaaacctgcggatgtgattctggatccagacacggcaaacgccatcctccttgtttctgaggaccagaggagtgtgcagcgtgctgaagagccgcgggatctgccagacaaccctgagagatttgaatggcgttactgtgtccttggctgtgaaaacttcacatcagggagacattactgggaggtggaagtgggggacagaaaagagtggcatattggggtatgtagtaagaacgtggagaggaaaaaaggttgggtcaaaatgacaccggagaacggatactggactatgggcctgactgatgggaataagtatcgggctctcactgagcccagaaccaacctgaaacttcctgagcctcctaggaaagtggggatcttcctggactatgagactggagagatctcgttctataatgccacagatggatctcatatctacacctttccgcacgcctctttctctgagcctctatatcctgttttcagaattttgaccttggagcccactgccctgaccatttgcccaataccaaaagaagtagagagttcccccgatcctgacctagtgcctgatcattccctggagacaccactgaccccgggcttagctaatgaaagtggggagcctcaggctgaagtaacatctctgcttctccctgcccaccctggagctgaggtctccccttctgcaacaaccaatcagaaccataagctacaggcacgcactgaagcactttactgatattcattccattattccatatgacagttgttttgagtttcgtaccaccttattgtccccttatacagataaggaaactggggtgcagaaaggtgaattaactttacaaagtagacatgacaagtgaacagcagagctgggatctaaacagcaataactaacattaacagagaatttaaaatgttcttagtgctgtgttataagctttggtggatgtcactcctttaatcctcacaacaccctgtcgggtagtcatattttgcaagtatggaagctgaggcagggcaacatgaagtaacttacataactcatacagtaatttgtgcagttgggagatgttcagccttagtccctggctaattgcctgttcttttccagcctgattttttttcccacaggaagag

SEQ ID NO: 3857 - DNA, 2895 bp, Homo sapiens
  source 1..2895: mol_type = unassigned DNA
atctcctaggctgaagctcctgaggggactcacatcagttatcttgctgctccagaagggtgggagatggcagttttcccaagctccggtctccccagatgtctgctcaccctcattctcctccagctgcccaaactggattcagctccctttgacgtgattggacccccggagcccatcctggccgttgtgggtgaggacgccgagctgccctgtcgcctgtctccgaacgcgagcgccgagcacttggagctacgctggttccgaaagaaggtttcgccggccgtgctggtgcatagggacgggcgcgagcaggaagccgagcagatgcccgagtaccgcgggcgggcgacgctggtccaggacggcatcgccaaggggcgcgtggccttgaggatccgtggcgtcagagtctctgacgacggggagtacacgtgctttttcagggaggatggaagctacgaagaagccctggtgcatctgaaggtggctgctctgggctctgaccctcacatcagtatgcaagttcaagagaatggagaaatctgtctggagtgcacctcagtgggatggtacccagagccccaggtgcagtggagaacttccaagggagagaagtttccatctacatcagagtccaggaatcctgatgaagaaggtttgttcactgtggctgcttcagtgatcatcagagacacttctgcgaaaaatgtgtcctgctacatccagaatctccttcttggccaggagaagaaagtagaaatatccataccagcttcctccctcccaaggctgactccctggatagtggctgtggctgtcatcctgatggttctaggacttctcaccattgggtccatatttttcacttggagactatacaacgaaagacccagagagaggaggaatgaattcagctctaaagagagactcctggaagaactcaaatggaaaaaggctaccttgcatgcagttgatgtgactctggacccagacacagctcatccccacctctttctttatgaggattcaaaatctgttcgactggaagattcacgtcagaaactgcctgagaaaacagagagatttgactcctggccctgtgtgttgggccgtgagaccttcacctcaggaaggcattactgggaggtggaggtgggagacaggactgactgggcaatcggcgtgtgtagggagaatgtgatgaagaaaggatttgaccccatgactcctgagaatgggttctgggctgtagagttgtatggaaatgggtactgggccctcactcctctccggacccctctcccattggcagggcccccacgccgggttgggattttcctagactatgaatcaggagacatctccttctacaacatgaatgatggatctgatatctatactttctccaatgtcactttctctggccccctccggcccttcttttgcctatggtctagcggtaaaaagcccctgaccatctgcccaattgctgatgggcctgagagggtcacagtcattgctaatgcccaggacctttctaaggagatcccattgtcccccatgggggaggactctgcccctagggatgcagacactctccattctaagctaatccctacccaacccagccaaggggcaccttaaggaatatctcagctcatctgttttcctttcctctaacccctctcctccatagccttctgaggcttcacctgctagctttacccagtctgtttcttcctgttgggtggcaattaattaatcctgtgaaggttacattgctgctgctagagagggtggggattgcaccttccaaatctgtttctgtaccaatatttgggggatggaggggtgactcaaactgcttctagtgttctcctaatcccttaagactagaacctataggaaactacttggagcaaactcaaaggacagattagggatcgagattgggtcaggttagcatggggttgtggttgaaatatcttggtatccaggataagggtatgtggaaaaacaggctttaggcaagtggaaaattcaaaatgtgctgtgaaaggacaatctcaggctgaaatcccataaaggaacttggagggaatattatgatggagggaagtgaggtgaatccaggcacatgatgaacacctggctcatccatagagttttcacagcctatatcgcaaattttctaagccacgtcctataggacagaggagactggccccacttctatgggtctgagctgtggaaaagggagagcagagaggaactgagatgagcagggatgaagggtcaggcagaaagcgtgatagaggagagaatttttgacaaaactcaaaagttgtttgcacagctgttctttgtaccctgttcctttctctgcgccctcctgtttctcccttgcctggaagtcattccaccctcaatttgttgatccacaagtttccagttgtcctcttctttttgttatagcatctctctatttcaaagacattcctagaagtcatccttcagtgatatcaccacttgctcagtcaccatctcaaccttatgtcacctcagccctcatctcaatgcccaaaccccttacacacaccttcagttagcttcaactgcctccgtttccacactgtgcacctttcactttccctacccagctttcctacatgctgcctctcctcagggtcccctgaatgctgcatcattgtgttcagtgcagctggactgattgcacctgtgtatttgcccctgagcactttcctttacacatgtggcttgtcttgccaatagactccaggcttataccttccatttccatcgtattctccagtttccaggatagacgttgctcatcgtctttacctaataaataagtttgtctgattgctg

SEQ ID NO: 3858 - DNA, 2266 bp, Homo sapiens
  source 1..2266: mol_type = unassigned DNA
ctgctccagaagggtgggagatggcagttttcccaagctccggtctccccagatgtctgctcaccctcattctcctccagctgcccaaactggattcagctccctttgacgtgattggacccccggagcccatcctggccgttgtgggtgaggacgccgagctgccctgtcgcctgtctccgaacgcgagcgccgagcacttggagctacgctggttccgaaagaaggtttcgccggccgtgctggtgcatagggacgggcgcgagcaggaagccgagcagatgcccgagtaccgcgggcgggcgacgctggtccaggacggcatcgccaaggggcgcgtggccttgaggatccgtggcgtcagagtctctgacgacggggagtacacgtgctttttcagggaggatggaagctacgaagaagccctggtgcatctgaaggtggctgctctgggctctgaccctcacatcagtatgcaagttcaagagaatggagaaatctgtctggagtgcacctcagtgggatggtacccagagccccaggtgcagtggagaacttccaagggagagaagtttccatctacatcagagtccaggaatcctgatgaagaaggtttgttcactgtggctgcttcagtgatcatcagagacacttctgcgaaaaatgtgtcctgctacatccagaatctccttcttggccaggagaagaaagtagaaatatccataccagcttcctccctcccaaggctgactccctggatagtggctgtggctgtcatcctgatggttctaggacttctcaccattgggtccatatttttcacttggagactatacaacgaaagacccagagagaggaggaatgaattcagctctaaagagagactcctggaagaactcaaatggaaaaaggctaccttgcatgcagttgatgtgactctggacccagacacagctcatccccacctctttctttatgaggattcaaaatctgttcgactggaagattcacgtcagaaactgcctgagaaaacagagagatttgactcctggccctgtgtgttgggccgtgagaccttcacctcaggaaggcattactgggaggtggaggtgggagacaggactgactgggcaatcggcgtgtgtagggagaatgtgatgaagaaaggatttgaccccatgactcctgagaatgggttctgggctgtagagttgtatggaaatgggtactgggccctcactcctctccggacccctctcccattggcagggcccccacgccgggttgggattttcctagactatgaatcaggagacatctccttctacaacatgaatgatggatctgatatctatactttctccaatgtcacagtcattgctaatgcccaggacctttctaaggagatcccattgtcccccatgggggaggactctgcccctagggatgcagacactctccattctaagctaatccctacccaacccagccaaggggcaccttaaggaatatctcagctcatctgttttcctttcctctaacccctctcctccatagccttctgaggcttcacctgctagctttacccagtctgtttcttcctgttgggtggcaattaattaatcctgtgaaggttacattgctgctgctagagagggtggggattgcaccttccaaatctgtttctgtaccaatatttgggggatggaggggtgactcaaactgcttctagtgttctcctaatcccttaagactagaacctataggaaactacttggagcaaactcaaaggacagattagggatcgagattgggtcaggttagcatggggttgtggttgaaatatcttggtatccaggataagggtatgtggaaaaacaggctttaggcaagtggaaaattcaaaatgtgctgtgaaaggacaatctcaggctgaaatcccataaaggaacttggagggaatattatgatggagggaagtgaggtgaatccaggcacatgatgaacacctggctcatccatagagttttcacagcctatatcgcaaattttctaagccacgtcctataggacagaggagactggccccacttctatgggtctgagctgtggaaaagggagagcagagaggaactgagatgagcagggatgaagggtcaggcagaaagcgtgatagaggagagaatttttgacaaaactcaaaagttgtttgcacagctgttctttgtaccctgttcctttctctgcgccctcctgtttctccctt

SEQ ID NO: 3859 - DNA, 1802 bp, Homo sapiens
  source 1..1802: mol_type = unassigned DNA
cgtttcctgcatctccaaacatggcgacctaggagaaggggaagaacaattttttctcctcttttgggaaggtttgtgtctagtagtgcctgtgcccctgggcagattggagagaagagggacgactggagaatcgtcgagaaccagcggagaaaagaaaaagcaacgtttaattctagaaggcctcctgtccctgcctgctctgggtgctcatggaatcagctgctgccctgcacttctcccggccagcctccctcctcctcctcctcctcagcctgtgtgcactggtctcagcccagtttattgtcgtggggcccactgatcccatcttggccacggttggagaaaacactacgttacgctgccatctgtcacccgagaaaaatgctgaggacatggaggtgcggtggttccggtctcagttctcccccgcagtgtttgtgtataaaggtggcagagagagaacagaggagcagatggaggagtaccgaggaagaaccacctttgtgagcaaagacatcagcaggggcagcgtggccctggtcatacacaacatcacagcccaggaaaacggcacctaccgctgttacttccaagaaggcaggtcctacgatgaggccatcctgcacctcgtagtggcaggactaggctctaagcccctcatttcaatgaggggccatgaagacgggggcatccggctggagtgcatatctagagggtggtacccaaagcccctcacagtgtggagggacccctacggtggggttgcgcctgccctgaaagaggtctccatgcctgatgcagacggcctcttcatggtcaccacggctgtgatcatcagagacaagtctgtgaggaacatgtcctgctctatcaacaacaccctgctcggccagaagaaagaaagtgtcatttttattccagaatcctttatgcccagtgtgtctccccccattgccgtatgcatctattggatcaacaaactccaaaaggaaaaaaagattctgtcaggggaaaaggagtttgaacgggaaacaagagaaattgctctaaaggaactggagaaagaacgtgtgcaaaaagaggaagaacttcaagtaaaagagaaacttcaagaagaattgcgatggagaagaacattcttacatgctgttgatgtggtcctggatccagacaccgctcatcccgatctcttcctgtcagaggaccggagaagtgtgagaaggtgccccttcaggcacctaggggagagcgtgcctgacaacccagagagattcgacagtcagccttgtgtcctaggccgggagagcttcgcttcagggaaacattactgggaggtggaggtggaaaacgtgattgagtggactgtgggggtctgtagagacagtgttgagaggaaaggggaggtcctgctgattcctcagaatggcttctggaccttggagatgcataaagggcaataccgggccgtgtcctcccctgataggattctccctttgaaggagtccctttgccgggtgggcgtcttcctggactatgaagctggagatgtctccttctacaacatgagggacagatcgcacatctacacatgtccccgttcagccttttcagggcctgacacttcacagagtggggacccaccagagcctatagaatcaattccttggtctcacagccatgtagacaagccctggtcatctcagcagccaccgcacaacacccatcttccagctgcctctttcacacccactacagacctcagccccagttttctcctcctcactaggctgtgtttttag

SEQ ID NO: 3860 - DNA, 2920 bp, Homo sapiens
  source 1..2920: mol_type = unassigned DNA
actcttgggactgtggaagcccaggagaccagatttcgtttcctgcatctccaaacatggcgacctaggagaaggggaagaacaattttttctcctcttttgggaaggtttgtgtctagtagtgcctgtgcccctgggcagattggagagaagagggacgactggagaatcgtcgagaaccagcggagaaaagaaaaagcaacgtttaattctagaaggcctcctgtccctgcctgctctgggtgctcatggaatcagctgctgccctgcacttctcccggccagcctccctcctcctcctcctcctcagcctgtgtgcactggtctcagcccagtttattgtcgtggggcccactgatcccatcttggccacggttggagaaaacactacgttacgctgccatctgtcacccgagaaaaatgctgaggacatggaggtgcggtggttccggtctcagttctcccccgcagtgtttgtgtataaaggtggcagagagagaacagaggagcagatggaggagtaccgaggaagaaccacctttgtgagcaaagacatcagcaggggcagcgtggccctggtcatacacaacatcacagcccaggaaaacggcacctaccgctgttacttccaagaaggcaggtcctacgatgaggccatcctgcacctcgtagtggcaggactaggctctaagcccctcatttcaatgaggggccatgaagacgggggcatccggctggagtgcatatctagagggtggtacccaaagcccctcacagtgtggagggacccctacggtggggttgcgcctgccctgaaagaggtctccatgcctgatgcagacggcctcttcatggtcaccacggctgtgatcatcagagacaagtctgtgaggaacatgtcctgctctatcaacaacaccctgctcggccagaagaaagaaagtgtcatttttattccagaatcctttatgcccagtgtgtctccctgtgcagtggccctgcctatcattgtggttattctgatgatacccattgccgtatgcatctattggatcaacaaactccaaaaggaaaaaaagattctgtcaggggaaaaggagtttgaacgggaaacaagagaaattgctctaaaggaactggagaaagaacgtgtgcaaaaagaggaagaacttcaagtaaaagagaaacttcaagaagaattgcgatggagaagaacattcttacatgctgttgatgtggtcctggatccagacaccgctcatcccgatctcttcctgtcagaggaccggagaagtgtgagaaggtgccccttcaggcacctaggggagagcgtgcctgacaacccagagagattcgacagtcagccttgtgtcctaggccgggagagcttcgcttcagggaaacattactgggaggtggaggtggaaaacgtgattgagtggactgtgggggtctgtagagacagtgttgagaggaaaggggaggtcctgctgattcctcagaatggcttctggaccttggagatgcataaagggcaataccgggccgtgtcctcccctgataggattctccctttgaaggagtccctttgccgggtgggcgtcttcctggactatgaagctggagatgtctccttctacaacatgagggacagatcgcacatctacacatgtccccgttcagccttttccgtgcctgtgaggcccttcttcaggttggggtgtgaggacagccccatcttcatctgccctgcactcacaggagccaatggggtcacggtgcctgaagagggcctgacacttcacagagtggggacccaccagagcctatagaatcaattccttggtctcacagccatgtagacaagccctggtcatctcagcagccaccgcacaacacccctggtggaagacacgccctcctcccctctggtcacacaagagaacatcttccagctgcctctttcacacccactacagacctcagccccagttttctcctcctcactaggctgtgtttttagtagttcctttgcttgtaactatgggatgggatccaggcatagggaactagttgttacacagctcccagccaagaagaaagtgtgagaagttgatgggcagcaaacctgctgtttaacatcagggtgaccacattaagcccagtattccagttggcaccagaagatatggacttggaatgaggcctacagggttcaccaggatgtaagaggagagaggaatccacaggaccaccagagaggagagggaaccagatatgcagatcagagatagaggaagtggaaccagagagctgggagggaccaaggttgtaagggtggctaagtcccaccataacagctaaggggacctgggagatgatggctcatttccacccagccccaggatttccagagcgcacatccacaggcctggacctgggatgaagatgaatgaagaacatggatgcacgtggatgtagtttggctcaggtgtccctgcagttggcaaggagtcagtactcagtccctgagtgtggctgaaatttgaggtcctggctgagccaaggagtaatggaccagatctacctcagtattcaagttcagtggggacaccagtggcttcaaacttcctggtttcatgatatcttgagacgccttacaaatgatggaggattccaaagagtttttgtttatttgggttaatatttgttggtatttatggcatttgagattgaaactaagaaatgttttaatttattacctttacaacatttatttacattacatacatacatttacaacatttattaatttatattaaaatagcatgaataagccaattataggttaatataagtagaatgtttgtgaaaaataagtatggtatccaaagcaaaataaattttattgtgaagtgtg

SEQ ID NO: 3861 - DNA, 3113 bp, Homo sapiens
  source 1..3113: mol_type = unassigned DNA
cgtttcctgcatctccaaacatggcgacctaggagaaggggaagaacaattttttctcctcttttgggaaggtttgtgtctagtagtgcctgtgcccctgggcagattggagagaagagggacgactggagaatcgtcgagaaccagcggagaaaagaaaaagcaacgtttaattctagaaggcctcctgtccctgcctgctctgggtgctcatggaatcagctgctgccctgcacttctcccggccagcctccctcctcctcctcctcctcagcctgtgtgcactggtctcagcccagtttattgtcgtggggcccactgatcccatcttggccacggttggagaaaacactacgttacgctgccatctgtcacccgagaaaaatgctgaggacatggaggtgcggtggttccggtctcagttctcccccgcagtgtttgtgtataaaggtggcagagagagaacagaggagcagatggaggagtaccgaggaagaaccacctttgtgagcaaagacatcagcaggggcagcgtggccctggtcatacacaacatcacagcccaggaaaacggcacctaccgctgttacttccaagaaggcaggtcctacgatgaggccatcctgcacctcgtagtggcaggactaggctctaagcccctcatttcaatgaggggccatgaagacgggggcatccggctggagtgcatatctagagggtggtacccaaagcccctcacagtgtggagggacccctacggtggggttgcgcctgccctgaaagaggtctccatgcctgatgcagacggcctcttcatggtcaccacggctgtgatcatcagagacaagtctgtgaggaacatgtcctgctctatcaacaacaccctgctcggccagaagaaagaaagtgtcatttttattccagaatcctttatgcccagtgtgtctccctgtgcagtggccctgcctatcattgtggttattctgatgatacccattgccgtatgcatctattggatcaacaaactccaaaaggaaaaaaagattctgtcaggggaaaaggagtttgaacgggaaacaagagaaattgctctaaaggaactggagaaagaacgtgtgcaaaaagaggaagaacttcaagtaaaagagaaacttcaagaagaattgcgatggagaagaacattcttacatgctgagctccaattcttctcaaactgagagaactgcttctgtctctggagagacagaagtgcagcttcagtaattctcagtgtgtgagctgcctaggatcagagagccttcatggaagtggccactacgtggggatcccttcagagatatctgagacctctctggggatcaggaaccacacaatccccagggttcctgagaccccaggcctaaacctgagacttcctctgcagttgatgtggtcctggatccagacaccgctcatcccgatctcttcctgtcagaggaccggagaagtgtgagaaggtgccccttcaggcacctaggggagagcgtgcctgacaacccagagagattcgacagtcagccttgtgtcctaggccgggagagcttcgcttcagggaaacattactgggaggtggaggtggaaaacgtgattgagtggactgtgggggtctgtagagacagtgttgagaggaaaggggaggtcctgctgattcctcagaatggcttctggaccttggagatgcataaagggcaataccgggccgtgtcctcccctgataggattctccctttgaaggagtccctttgccgggtgggcgtcttcctggactatgaagctggagatgtctccttctacaacatgagggacagatcgcacatctacacatgtccccgttcagccttttccgtgcctgtgaggcccttcttcaggttggggtgtgaggacagccccatcttcatctgccctgcactcacaggagccaatggggtcacggtgcctgaagagggcctgacacttcacagagtggggacccaccagagcctatagaatcaattccttggtctcacagccatgtagacaagccctggtcatctcagcagccaccgcacaacacccctggtggaagacacgccctcctcccctctggtcacacaagagaacatcttccagctgcctctttcacacccactacagacctcagccccagttttctcctcctcactaggctgtgtttttagtagttcctttgcttgtaactatgggatgggatccaggcatagggaactagttgttacacagctcccagccaagaagaaagtgtgagaagttgatgggcagcaaacctgctgtttaacatcagggtgaccacattaagcccagtattccagttggcaccagaagatatggacttggaatgaggcctacagggttcaccaggatgtaagaggagagaggaatccacaggaccaccagagaggagagggaaccagatatgcagatcagagatagaggaagtggaaccagagagctgggagggaccaaggttgtaagggtggctaagtcccaccataacagctaaggggacctgggagatgatggctcatttccacccagccccaggatttccagagcgcacatccacaggcctggacctgggatgaagatgaatgaagaacatggatgcacgtggatgtagtttggctcaggtgtccctgcagttggcaaggagtcagtactcagtccctgagtgtggctgaaatttgaggtcctggctgagccaaggagtaatggaccagatctacctcagtattcaagttcagtggggacaccagtggcttcaaacttcctggtttcatgatatcttgagacgccttacaaatgatggaggattccaaagagtttttgtttatttgggttaatatttgttggtatttatggcatttgagattgaaactaagaaatgttttaatttattacctttacaacatttatttacattacatacatacatttacaacatttattaatttatattaaaatagcatgaataagccaattataggttaatataagtagaatgtttgtgaaaaataagtatggtatccaaagcaaaataaattttattgtgaagtgtg

SEQ ID NO: 3862 - DNA, 1687 bp, Homo sapiens
  source 1..1687: mol_type = unassigned DNA
tgcatctccaaacatggcgacctaggagaaggggaagaacaattttttctcctcttttgggaaggtttgtgtctagtagtgcctgtgcccctgggcagattggagagaagagggacgactggagaatcgtcgagaaccagcggagaaaagaaaaagcaacgtttaattctagaaggcctcctgtccctgcctgctctgggtgctcatggaatcagctgctgccctgcacttctcccggccagcctccctcctcctcctcctcctcagcctgtgtgcactggtctcagcccagtttattgtcgtggggcccactgatcccatcttggccacggttggagaaaacactacgttacgctgccatctgtcacccgagaaaaatgctgaggacatggaggtgcggtggttccggtctcagttctcccccgcagtgtttgtgtataaaggtggcagagagagaacagaggagcagatggaggagtaccgaggaagaaccacctttgtgagcaaagacatcagcaggggcagcgtggccctggtcatacacaacatcacagcccaggaaaacggcacctaccgctgttacttccaagaaggcaggtcctacgatgaggccatcctgcacctcgtagtggcaggactaggctctaagcccctcatttcaatgaggggccatgaagacgggggcatccggctggagtgcatatctagagggtggtacccaaagcccctcacagtgtggagggacccctacggtggggttgcgcctgccctgaaagaggtctccatgcctgatgcagacggcctcttcatggtcaccacggctgtgatcatcagagacaagtctgtgaggaacatgtcctgctctatcaacaacaccctgctcggccagaagaaagaaagtgtcatttttattccagaatcctttatgcccagtgtgtctccctgtgcagtggccctgcctatcattgtggttattctgatgatacccattgccgtatgcatctattggatcaacaaactccaaaaggaaaaaaagattctgtcaggggaaaaggagtttgaacgggaaacaagagaaattgctctaaaggaactggagaaagaacgtgtgcaaaaagaggaagaacttcaagtaaaagagaaacttcaagaagaattgcgatggagaagaacattcttacatgctgggccagtttgaagctttatatatcatttaccaaacttagggtggtgagtgggtgctgatggcagcctggtttgaaaatctccactggagagaagacacagcaggattcagatgcaaatgaccagagcactccaagttggaaagaactgctgagcgggtctgtagagcccatcgctctctcctgtctattcatcagctaggctgaagctcctgacagactcacaccagtatcttgctgctccagaaaggtcgaagatggcagttttcccaaactccggcttgcccagatgtctgctcaccctcattcttctccagctgcccaagctggtttcagataggtctctctctctggcctgcagagttaaaacatctcaataaatataaagtataaaaagaagctggagcccaaccacttcggcacatgttcacaggatctcggggctgtgtcacaagccactgggcactcatatctggctgagaataaatctcttgcaatatttt

SEQ ID NO: 3863 - DNA, 1780 bp, Homo sapiens
  source 1..1780: mol_type = unassigned DNA
agaccagatttcgtttcctgcatctccaaacatggcgacctaggagaaggggaagaacaattttttctcctcttttgggaaggtttgtgtctagtagtgcctgtgcccctgggcagattggagagaagagggacgactggagaatcgtcgagaaccagcggagaaaagaaaaagcaacgtttaattctagaagcccagtttattgtcgtggggcccactgatcccatcttggccacggttggagaaaacactacgttacgctgccatctgtcacccgagaaaaatgctgaggacatggaggtgcggtggttccggtctcagttctcccccgcagtgtttgtgtataaaggtggcagagagagaacagaggagcagatggaggagtaccgaggaagaaccacctttgtgagcaaagacatcagcaggggcagcgtggccctggtcatacacaacatcacagcccaggaaaacggcacctaccgctgttacttccaagaaggcaggtcctacgatgaggccatcctgcacctcgtagtggcaggactaggctctaagcccctcatttcaatgaggggccatgaagacgggggcatccggctggagtgcatatctagagggtggtacccaaagcccctcacagtgtggagggacccctacggtggggttgcgcctgccctgaaagaggtctccatgcctgatgcagacggcctcttcatggtcaccacggctgtgatcatcagagacaagtctgtgaggaacatgtcctgctctatcaacaacaccctgctcggccagaagaaagaaagtgtcatttttattccagaatcctttatgcccagtgtgtctccctgtgcagtggccctgcctatcattgtggttattctgatgatacccattgccgtatgcatctattggatcaacaaactccaaaaggaaaaaaagattctgtcaggggaaaaggagtttgaacgggaaacaagagaaattgctctaaaggaactggagaaagaacgtgtgcaaaaagaggaagaacttcaagtaaaagagaaacttcaagaagaattgcgatggagaagaacattcttacatgctgttgatgtggtcctggatccagacaccgctcatcccgatctcttcctgtcagaggaccggagaagtgtgagaaggtgccccttcaggcacctaggggagagcgtgcctgacaacccagagagattcgacagtcagccttgtgtcctaggccgggagagcttcgcttcagggaaacattactgggaggtggaggtggaaaacgtgattgagtggactgtgggggtctgtagagacagtgttgagaggaaaggggaggtcctgctgattcctcagaatggcttctggaccttggagatgcataaagggcaataccgggccgtgtcctcccctgataggattctccctttgaaggagtccctttgccgggtgggcgtcttcctggactatgaagctggagatgtctccttctacaacatgagggacagatcgcacatctacacatgtccccgttcagccttttccgtgcctgtgaggcccttcttcaggttggggtgtgaggacagccccatcttcatctgccctgcactcacaggagccaatggggtcacggtgcctgaagagggcctgacacttcacagagtggggacccaccagagcctatagaatcaattccttggtctcacagccatgtagacaagccctggtcatctcagcagccaccgcacaacacccctggtggaagacacgc

SEQ ID NO: 3864 - DNA, 3241 bp, Homo sapiens
  source 1..3241: mol_type = unassigned DNA
aatcttgggactttttggacacccagagaacaggtcccagataccgagtccgcaactccaaacatcgcgattaataggaggcctctggtctctgcctgccctgggtgctcatggaaccagctgctgctctgcacttctccctgccagcctccctcctcctcctcctgctcctcctccttctcagcctgtgtgcactggtctcaggccttgggtctaagcccctcattgaaatcaaggcccaagaggatgggagcatctggctggagtgcatatctggagggtggtacccagagcccctcacagtgtggagggacccctacggtgaggttgtgcccgccctgaaggaggtttccatcgctgatgctgacggcctcttcatggtcaccacagctgtgatcatcagagacaagtatgtgaggaatgtgtcctgctctgtcaacaacaccctgctcggccaggagaaggaaactgtcatttttattccagaatcctttatgcccagcgcatctccctggatggtggccctagctgtcatcctgaccgcatctccctggatggtgtccatgactgtcatcctggctgttttcatcatcttcatggctgtcagcatctgttgcatcaagaaacttcaaagggaaaaaaagattctgtcaggggaaaagaaagttgaacaagaggaaaaagaaattgcacagcaacttcaagaagaattgcgatggagaagaacattcttacatgctgctgatgtggtcctggatccagacaccgctcatcccgagctcttcctgtcagaggaccggagaagtgtgaggcggggcccctacaggcagagagtgcctgacaacccagagagattcgacagtcagccttgtgtcctgggatgggagagcttcgcctcagggaaacattactgggaggtggaggtggaaaacgtgatggtgtggactgtgggggtctgcagacacagtgttgagaggaaaggggaggtcctgctgattcctcagaatggcttctggaccctggagatgtttggaaaccaataccgggccctgtcctcccctgagaggattctccctttgaaggagtccctttgccgggtgggcgtcttcctggactatgaagctggagatgtctccttctacaacatgagggacagatcgcacatctacacatgtccccgttcagcctttactgtgcctgtgaggcccttcttcaggttagggtctgatgacagccccatcttcatctgccctgcactcacaggagccagtggggtcatggtgcctgaagagggcctgaaacttcacagagtggggacccaccagagcctatagaatcaattccttggactcacagccatgcagataagccctggccatctcagcagccaccgcacaacccccctaatgaaagacacgccctcctcccctctggtcacgtaagagaacatcttccagctgcctttttcacacccactccagccctctgccccagttttctcctcctcactagtctgtggctttagtagttcctttgcttgtaattatgggatgggatccaggcatagggaactagttgtttcatagctcccagtcaaaaagaaagtgagagaagctgttgggcagcgaacctactgtttaaaatcaggataaccacattaagcccaatatgccagttggcaccagatgctgtggacttggaatgaggccaacagggttcaccaggatgagagaggagagaggaatccacaggaccaccagaagggagagggaaccagatatgcagatcagagatagaggaagtggaaccagagagctgggagggaccaaggttgtaaggatggctaagtcccaccataagagctaaagggtcctgggagatgatggctcatttccacccaaccccaggatttccacagcacacacccacaggcctggacctgggatgaagatgaatgaagaacatggactcatgtggatgtggtttggctcagatgtccctgcaataaacaaggggtcagtacttagtccctgagtgtggttgaggtttgaggtcctggtcgagcagggcagtactggaccaggtctacgtcagcattcaggttcaatggggacaccagtggcttcaaacttcctgatctaattatgtttttagacacttagaagttattgaggactttaaagagcttttgtttatttgggttaatatttatgacatttgacattgaaacaaaaatttaaaatgttatcttttaatttatgttaaaatagcattaataaatcagttataggttaatgtagataggatgttttgtgaaaaagcaatctattgtgtccaaataaaaaaacaaaaagtgtgacactggttaactttttccagatctcatgtctggcttaataagagatatttgtattatcatatctgcctttgtattaaacctattggtatatcataggtcatgttagctcaaaaaaactttactgcacactactgagagaatgagatgaaaaacgattaatgtttcattattattattgtgaaaatattattaacactggggactccttaagagtacatcagagttctctctaggaatcccaaaaccacattttgaaactagaatagtggatcctggaagttaatccatgtgctggttaattttagatgtcaacctgactggattaaggaatacctagacagctggtacaacattatttctgggtgtgtctgtgagtgtgtttccagaagagattggcaagtgagtcagtgggaaattctctccttctgttggctgggtgcccaatacaacaaaaaggcagaggaaaggcaaattcttctctcctctggagctgagacactcttcttcttctgcccttggacatcagaactcctggctctccggcctttgaacttcaggacttgtaccaggaggccctgggttctcaggcctttggctttggactgagagttacacaatcagcttccctggttctgaggctttcagacttaaactgagccatgctaccagcatcccagggtctccagcctacagatgagctgttgtgcgatttcttagcctccataatcacatgagccaatctccttaataaatgcctgctcatagatctgtatctacatctatatctgtatgtgcatctatatctatgcctatatctatatctatatcatattgattttgtctctctggagaaccctgactaataaaatgaggcatctaaaa

SEQ ID NO: 3865 - DNA, 3590 bp, Homo sapiens
  source 1..3590: mol_type = unassigned DNA
aaatcttgggactttttggacacccagagaacaggtcccagataccgagtccgcaactccaaacatcgcgattaataggaggcctctggtctctgcctgccctgggtgctcatggaaccagctgctgctctgcacttctccctgccagcctccctcctcctcctcctgctcctcctccttctcagcctgtgtgcactggtctcagcccagtttactgtcgtggggccagctaatcccatcctggccatggtgggagaaaacactacattacgctgccatctgtcacccgagaaaaatgctgaggacatggaggtgcggtggttccggtctcagttctcccccgcagtgtttgtgtataagggtgggagagagagaacagaggagcagatggaggagtaccggggaagaatcacctttgtgagcaaagacatcaacaggggcagcgtggccctggtcatacataacgtcacagcccaggagaatgggatctaccgctgttacttccaagaaggcaggtcctacgatgaggccatcctacgcctcgtggtggcaggccttgggtctaagcccctcattgaaatcaaggcccaagaggatgggagcatctggctggagtgcatatctggagggtggtacccagagcccctcacagtgtggagggacccctacggtgaggttgtgcccgccctgaaggaggtttccatcgctgatgctgacggcctcttcatggtcaccacagctgtgatcatcagagacaagtatgtgaggaatgtgtcctgctctgtcaacaacaccctgctcggccaggagaaggaaactgtcatttttattccagaatcctttatgcccagcgcatctccctggatggtggccctagctgtcatcctgaccgcatctccctggatggtgtccatgactgtcatcctggctgttttcatcatcttcatggctgtcagcatctgttgcatcaagaaacttcaaagggaaaaaaagattctgtcaggggaaaagaaagttgaacaagaggaaaaagaaattgcacagcaacttcaagaagaattgcgatggagaagaacattcttacatgctgctgatgtggtcctggatccagacaccgctcatcccgagctcttcctgtcagaggaccggagaagtgtgaggcggggcccctacaggcagagagtgcctgacaacccagagagattcgacagtcagccttgtgtcctgggatgggagagcttcgcctcagggaaacattactgggaggtggaggtggaaaacgtgatggtgtggactgtgggggtctgcagacacagtgttgagaggaaaggggaggtcctgctgattcctcagaatggcttctggaccctggagatgtttggaaaccaataccgggccctgtcctcccctgagaggattctccctttgaaggagtccctttgccgggtgggcgtcttcctggactatgaagctggagatgtctccttctacaacatgagggacagatcgcacatctacacatgtccccgttcagcctttactgtgcctgtgaggcccttcttcaggttagggtctgatgacagccccatcttcatctgccctgcactcacaggagccagtggggtcatggtgcctgaagagggcctgaaacttcacagagtggggacccaccagagcctatagaatcaattccttggactcacagccatgcagataagccctggccatctcagcagccaccgcacaacccccctaatgaaagacacgccctcctcccctctggtcacgtaagagaacatcttccagctgcctttttcacacccactccagccctctgccccagttttctcctcctcactagtctgtggctttagtagttcctttgcttgtaattatgggatgggatccaggcatagggaactagttgtttcatagctcccagtcaaaaagaaagtgagagaagctgttgggcagcgaacctactgtttaaaatcaggataaccacattaagcccaatatgccagttggcaccagatgctgtggacttggaatgaggccaacagggttcaccaggatgagagaggagagaggaatccacaggaccaccagaagggagagggaaccagatatgcagatcagagatagaggaagtggaaccagagagctgggagggaccaaggttgtaaggatggctaagtcccaccataagagctaaagggtcctgggagatgatggctcatttccacccaaccccaggatttccacagcacacacccacaggcctggacctgggatgaagatgaatgaagaacatggactcatgtggatgtggtttggctcagatgtccctgcaataaacaaggggtcagtacttagtccctgagtgtggttgaggtttgaggtcctggtcgagcagggcagtactggaccaggtctacgtcagcattcaggttcaatggggacaccagtggcttcaaacttcctgatctaattatgtttttagacacttagaagttattgaggactttaaagagcttttgtttatttgggttaatatttatgacatttgacattgaaacaaaaatttaaaatgttatcttttaatttatgttaaaatagcattaataaatcagttataggttaatgtagataggatgttttgtgaaaaagcaatctattgtgtccaaataaaaaaacaaaaagtgtgacactggttaactttttccagatctcatgtctggcttaataagagatatttgtattatcatatctgcctttgtattaaacctattggtatatcataggtcatgttagctcaaaaaaactttactgcacactactgagagaatgagatgaaaaacgattaatgtttcattattattattgtgaaaatattattaacactggggactccttaagagtacatcagagttctctctaggaatcccaaaaccacattttgaaactagaatagtggatcctggaagttaatccatgtgctggttaattttagatgtcaacctgactggattaaggaatacctagacagctggtacaacattatttctgggtgtgtctgtgagtgtgtttccagaagagattggcaagtgagtcagtgggaaattctctccttctgttggctgggtgcccaatacaacaaaaaggcagaggaaaggcaaattcttctctcctctggagctgagacactcttcttcttctgcccttggacatcagaactcctggctctccggcctttgaacttcaggacttgtaccaggaggccctgggttctcaggcctttggctttggactgagagttacacaatcagcttccctggttctgaggctttcagacttaaactgagccatgctaccagcatcccagggtctccagcctacagatgagctgttgtgcgatttcttagcctccataatcacatgagccaatctccttaataaatgcctgctcatagatctgtatctacatctatatctgtatgtgcatctatatctatgcctatatctatatctatatcatattgattttgtctctctggagaaccctgactaataaaatgaggcatctaaaa

SEQ ID NO: 3866 - DNA, 2733 bp, Homo sapiens
  source 1..2733: mol_type = unassigned DNA
gggatgctttgttgtctggtggtgactgtgcccatgggtgagttgtatcggaaaatcgtcatgtgaggatcagaggggaaaagaaaacagaggttagttctagaaggcctctggtctctgcctgccctgggtgctcatggaaccagctgctgctctgcacttctccctgccagcctccctcctcctcctcctgctcctcctccttctcagcctgtgtgcactggtctcagcccagtttactgtcgtggggccagctaatcccatcctggccatggtgggagaaaacactacattacgctgccatctgtcacccgagaaaaatgctgaggacatggaggtgcggtggttccggtctcagttctcccccgcagtgtttgtgtataagggtgggagagagagaacagaggagcagatggaggagtaccggggaagaatcacctttgtgagcaaagacatcaacaggggcagcgtggccctggtcatacataacgtcacagcccaggagaatgggatctaccgctgttacttccaagaaggcaggtcctacgatgaggccatcctacgcctcgtggtggcaggccttgggtctaagcccctcattgaaatcaaggcccaagaggatgggagcatctggctggagtgcatatctggagggtggtacccagagcccctcacagtgtggagggacccctacggtgaggttgtgcccgccctgaaggaggtttccatcgctgatgctgacggcctcttcatggtcaccacagctgtgatcatcagagacaagtatgtgaggaatgtgtcctgctctgtcaacaacaccctgctcggccaggagaaggaaactgtcatttttattccagaatcctttatgcccagcgcatctccctggatggtggccctagctgtcatcctgaccgcatctccctggatggtgtccatgactgtcatcctggctgttttcatcatcttcatggctgtcagcatctgttgcatcaagaaacttcaaagggaaaaaaagattctgtcaggggaaaagaaagttgaacaagaggaaaaagaaattgcacagcaacttcaagaagaattgcgatggagaagaacattcttacatgctgctgatgtggtcctggatccagacaccgctcatcccgagctcttcctgtcagaggaccggagaagtgtgaggcggggcccctacaggcagagagtgcctgacaacccagagagattcgacagtcagccttgtgtcctgggatgggagagcttcgcctcagggaaacattactgggaggtggaggtggaaaacgtgatggtgtggactgtgggggtctgcagacacagtgttgagaggaaaggggaggtcctgctgattcctcagaatggcttctggaccctggagatgtttggaaaccaataccgggccctgtcctcccctgagaggattctccctttgaaggagtccctttgccgggtgggcgtcttcctggactatgaagctggagatgtctccttctacaacatgagggacagatcgcacatctacacatgtccccgttcagcctttactgtgcctgtgaggcccttcttcaggttagggtctgatgacagccccatcttcatctgccctgcactcacaggagccagtggggtcatggtgcctgaagagggcctgaaacttcacagagtggggacccaccagagcctatagaatcaattccttggactcacagccatgcagataagccctggccatctcagcagccaccgcacaacccccctaatgaaagacacgccctcctcccctctggtcacgtaagagaacatcttccagctgcctttttcacacccactccagccctctgccccagttttctcctcctcactagtctgtggctttagtagttcctttgcttgtaattatgggatgggatccaggcatagggaactagttgtttcatagctcccagtcaaaaagaaagtgagagaagctgttgggcagcgaacctactgtttaaaatcaggataaccacattaagcccaatatgccagttggcaccagatgctgtggacttggaatgaggccaacagggttcaccaggatgagagaggagagaggaatccacaggaccaccagaagggagagggaaccagatatgcagatcagagatagaggaagtggaaccagagagctgggagggaccaaggttgtaaggatggctaagtcccaccataagagctaaagggtcctgggagatgatggctcatttccacccaaccccaggatttccacagcacacacccacaggcctggacctgggatgaagatgaatgaagaacatggactcatgtggatgtggtttggctcagatgtccctgcaataaacaaggggtcagtacttagtccctgagtgtggttgaggtttgaggtcctggtcgagcagggcagtactggaccaggtctacgtcagcattcaggttcaatggggacaccagtggcttcaaacttcctgatctaattatgtttttagacacttagaagttattgaggactttaaagagcttttgtttatttgggttaatatttatgacatttgacattgaaacaaaaatttaaaatgttatcttttaatttatgttaaaatagcattaataaatcagttataggttaatgtagataggatgttttgtgaaaaagcaatctattgtgtccaaataaaaaaacaaaaagtgtga

SEQ ID NO: 3867 - DNA, 1790 bp, Homo sapiens
  source 1..1790: mol_type = unassigned DNA
agtggaaatcttgggactttttggacacccagagaacaggtcccagataccgagtccgcaactccaaacatcgcgattaataggaggtgaacacagcttttctcttctctttgggatgctttgttgtctggtggtgactgtgcccatgggtgagttgtatcggaaaatcgtcatgtgaggatcagaggggaaaagaaaacagaggcctctggtctctgcctgccctgggtgctcatggaaccagctgctgctctgcacttctccctgccagcctccctcctcctcctcctgctcctcctccttctcagcctgtgtgcactggtctcagcccagtttactgtcgtggggccagctaatcccatcctggccatggtgggagaaaacactacattacgctgccatctgtcacccgagaaaaatgctgaggacatggaggtgcggtggttccggtctcagttctcccccgcagtgtttgtgtataagggtgggagagagagaacagaggagcagatggaggagtaccggggaagaatcacctttgtgagcaaagacatcaacaggggcagcgtggccctggtcatacataacgtcacagcccaggagaatgggatctaccgctgttacttccaagaaggcaggtcctacgatgaggccatcctacgcctcgtggtggcaggccttgggtctaagcccctcattgaaatcaaggcccaagaggatgggagcatctggctggagtgcatatctggagggtggtacccagagcccctcacagtgtggagggacccctacggtgaggttgtgcccgccctgaaggaggtttccatcgctgatgctgacggcctcttcatggtcaccacagctgtgatcatcagagacaagtatgtgaggaatgtgtcctgctctgtcaacaacaccctgctcggccaggagaaggaaactgtcatttttattccagaatcctttatgcccagcgcatctccctggatggtggccctagctgtcatcctgaccgcatctccctggatggtgtccatgactgtcatcctggctgttttcatcatcttcatggctgtcagcatctgttgcatcaagaaacttcaaagggaaaaaaagattctgtcaggggaaaagaaagttgaacaagaggaaaaagaaattgcacagcaacttcaagaagaattgcgatggagaagaacattcttacatgctgatgtcaacctgactggattaaggaatacctagacagctggtacaacattatttctgggtgtgtctgtgagtgtgtttccagaagagattggcaagtgagtcagtgggaaattctctccttctgttggctgggtgcccaatacaacaaaaaggcagaggaaaggcaaattcttctctcctctggagctgagacactcttcttcttctgcccttggacatcagaactcctggctctccggcctttgaacttcaggacttgtaccaggaggccctgggttctcaggcctttggctttggactgagagttacacaatcagcttccctggttctgaggctttcagacttaaactgagccatgctaccagcatcccagggtctccagcctacagatgagctgttgtgcgatttcttagcctccataatcacatgagccaatctccttaataaatgcctgctcatagatctgtatctacatctatatctgtatgtgcatctatatctatgcctatatctatatctatatcatattgattttgtctctctggagaaccctgactaataaaatgaggcatctaaaa

SEQ ID NO: 3868 - DNA, 535 bp, Homo sapiens
  source 1..535: mol_type = unassigned DNA
agagaacaggtcccagataccgagtccgcaactccaaacatcgcgattaataggaggtgaacacagcttttctcttctctttgggatgctttgttgtctggtggtgactgtgcccatgggtgagttgtatcggaaaatcgtcatgtgaggatcagaggggaaaagaaaacagaggcctctggtctctgcctgccctgggtgctcatggaaccagctgctgctctgcacttctccctgccagcctccctcctcctcctcctgctcctcctccttctcagcctgtgtgcactggtctcaggccttgggtctaagcccctcattgaaatcaaggcccaagaggatgggagcatctggctggagtgcatatctggagggtggtacccagagcccctcacagtgtggagggacccctacggtgaggttgtgcccgccctgaaggaggtttccatcgctgatgctgacggcctcttcatggtcaccacagctgtgatcatcagagacaagtatgtgaggaatgtgtcctgctctgtcaaca

SEQ ID NO: 3869 - DNA, 942 bp, Homo sapiens
  source 1..942: mol_type = unassigned DNA
ctggtggggaggcgcagcctcgcctggctttacctcgagtgtcccgacctgggtctcggggagggggaagtggagggacgagggtgtgaaagaatccagggacaactgaagaaaccggactgtggcccgagaagtgggaagaggaaggaggaaaacggcccccttgatctctgcattgatggcttacttatggaatgtttacggaatccctctttcggagatacctgagccttgagatgcaagcgactcccagaagttggggcaccgatgagacctacttgagtgacaggagaggttgggcccgaccagcactgaggtgccaagactcctaggctgattctcctcctctgtaaccctaggcctctggtctctgcctgccctgggtgctcatggaaccagctgctgctctgcacttctccctgccagcctccctcctcctcctcctgctcctcctccttctcagcctgtgtgcactggtctcaggccttgggtctaagcccctcattgaaatcaaggcccaagaggatgggagcatctggctggagtgcatatctggagggtggtacccagagcccctcacagtgtggagggacccctacggtgaggttgtgcccgccctgaaggaggtttccatcgctgatgctgacggcctcttcatggtcaccacagctgtgatcatcagagacaagtatgtgaggaatgtgtcctgctctgtcaacaacaccctgctcggccaggagaaggaaactgtcatttttattccagaatcctttatgcccagcgcatctccctggatggtggccctagctgtcatcctgaccgcatctccctggatggtgtccatgactgtcatcctggctgttttcatcatcttcatggctgtcagcatctgttgcatcaagaaacttcaaagggaaaaaaagattctgtcaggggaaaaga

SEQ ID NO: 3870 - DNA, 881 bp, Homo sapiens
  source 1..881: mol_type = unassigned DNA
tttttggacacccagagaacaggtcccagataccgagtccgcaactccaaacatcgcgattaataggaggtgaacacagcttttctcttctctttgggatgctttgttgtctggtggtgactgtgcccatgggcctctggtctctgcctgccctgggtgctcatggaaccagctgctgctctgcacttctccctgccagcctccctcctcctcctcctgctcctcctccttctcagcctgtgtgcactggtctcagcccagtttactgtcgtggggccagctaatcccatcctggccatggtgggagaaaacactacattacgctgccatctgtcacccgagaaaaatgctgaggacatggaggtgcggtggttccggtctcagttctcccccgcagtgtttgtgtataagggtgggagagagagaacagaggagcagatggaggagtaccggggaagaatcacctttgtgagcaaagacatcaacaggggcagcgtggccctggtcatacataacgtcacagcccaggagaatgggatctaccgctgttacttccaagaaggcaggtcctacgatgaggccatcctacgcctcgtggtggcaggccttgggtctaagcccctcattgaaatcaaggcccaagaggatgggagcatctggctggagtgcatatctggagggtggtacccagagcccctcacagtgtggagggacccctacggtgaggttgtgcccgccctgaaggaggtttccatcgctgatgctgacggcctcttcatggtcaccacagctgtgatcatcagagacaagtatgtgaggaatgtgtcctgctctgtcaacaacaccctgctcggccaggagaaggaaactgtcatttttat

SEQ ID NO: 3871 - DNA, 540 bp, Homo sapiens
  source 1..540: mol_type = unassigned DNA
gttgtctggtggtgactgtgcccatgggtgagttgtatcggaaaatcgtcatgtgaggatcagaggggaaaagaaaacagagatacctgagccttgagatgcaagcgactcccagaagttggggcaccgatgagacctacttgagtgacaggagaggttgggcccgaccagcactgaggtgccaagactcctaggctgattctcctcctctgtaaccctaggcctctggtctctgcctgccctgggtgctcatggaaccagctgctgctctgcacttctccctgccagcctccctcctcctcctcctgctcctcctccttctcagcctgtgtgcactggtctcagcccagtttactgtcgtggggccagctaatcccatcctggccatggtgggagaaaacactacattacgctgccatctgtcacccgagaaaaatgctgaggacatggaggtgcggtggttccggtctcagttctcccccgcagtgtttgtgtataagggtgggagagagagaacagaggagcagatggaggagtacc

SEQ ID NO: 3872 - DNA, 3434 bp, Homo sapiens
  source 1..3434: mol_type = unassigned DNA
aatcaaaaaacttattcttccaaagagagattgttattattcctcacgatgacccgacagtctctgctttctttttcctttcttccagaaggagatttaaccatagtagaaagaatggagaactattaactgcctttcttctgtgggctgtgattttcagaggggaatgctaagaggtgattttcaatgttgggactcaaaggtgaagacactgaaggacagaatttttggcagaggaaagatcttcttcggtcaccatacttgagttagctctagggaagtggaggtttccatttggaattctatagcttcttccaggtcatagtgtctgccccccaccttccagtatctcctgatatgcagcatgaatgaaaatggcaagtttcctggccttccttctgctcaactttcgtgtctgcctccttttgcttcagctgctcatgcctcactcagctcagttttctgtgcttggaccctctgggcccatcctggccatggtgggtgaagacgctgatctgccctgtcacctgttcccgaccatgagtgcagagaccatggagctgaagtgggtgagttccagcctaaggcaggtggtgaacgtgtatgcagatggaaaggaagtggaagacaggcagagtgcaccgtatcgagggagaacttcgattctgcgggatggcatcactgcagggaaggctgctctccgaatacacaacgtcacagcctctgacagtggaaagtacttgtgttatttccaagatggtgacttctatgaaaaagccctggtggagctgaaggttgcagcactgggttctgatcttcacgttgatgtgaagggttacaaggatggagggatccatctggagtgcaggtccactggctggtacccccaaccccaaatacagtggagcaacaacaagggagagaacatcccgactgtggaagcacctgtggttgcagacggagtgggcctgtatgcagtagcagcatctgtgatcatgagaggcagctctggggagggtgtatcctgtaccatcagaagttccctcctcggcctggaaaagacagccagcatttccatcgcagaccccttcttcaggagcgcccagaggtggatcgccgccctggcagggaccctgcctgtcttgctgctgcttcttgggggagccggttacttcctgtggcaacagcaggaggaaaaaaagactcagttcagaaagaaaaagagagagcaagagttgagagaaatggcatggagcacaatgaagcaagaacaaagcacaagagtgaagctcctggaggaactcagatggagaagtatccagtatgcatctcggggagagagacattcagcctataatgaatggaaaaaggccctcttcaagcctgcggatgtgattctggatccaaaaacagcaaaccccatcctccttgtttctgaggaccagaggagtgtgcagcgtgccaaggagccccaggatctgccagacaaccctgagagatttaattggcattattgtgttctcggctgtgagagcttcatatcagggagacattactgggaggtggaggtaggggacaggaaagagtggcatataggggtgtgcagtaagaatgtgcagagaaaaggctgggtcaaaatgacacctgagaatggattctggactatggggctgactgatgggaataagtatcggactctaactgagcccagaaccaacctgaaacttcctaagccccctaagaaagtgggggtcttcctggactatgagactggagatatctcattctacaatgctgtggatggatcgcatattcatactttcctggacgtctccttctctgaggctctatatcctgttttcagaattttgaccttggagcccacggccctgactatttgtccagcgtgaaaagaagaagagagttcctccaattctgaccgagtgctgatcattccctagagacaccagtaaccccgggcttagctaacgaaagtggggagcctcaggctgaagtaacttttctctgcttctccctgcccagctcagagctgagggcctccccctccacagcaaccaatcacaaccataaagctacaagcacgcactgaagcactttactgatactcattcaattattcatatgacagttgtttgagtttggtaccatcttattttccccttatacagataaggaaactggggtgcagaaaagtgaattgactacaaagtagacatgactagttaacaacacagctgggatctaaacagcaataactaacattaatggagaacttaaaatgctctgagtgctgtgttatgagctttggtggatgtcactcctttaatcctcgcaacaccctgtcgggtagtctcatttagcaagtatggaagttgaggcagggcaacattaagcaacttacataactcatgcagtaatttctgcagttgggagatgttcagcttcagtccccggccctatggccgttcttttccaccctgtttcttcccccataggaagaacccacctgtagccctgaggttcttttcccaggatggctccaggataaggatcactgtaggtggttgtggagttgacacccctgttgactccttcccagctgattgtcagagccttagacccagcacgccttggattagctctgcagagtgtcttggttgagagaataacctcaccgtacccacatgacacgtgatttggaaagagactagaggccacacttgataaatcatggggaacagatgtgttccacccaacaaatgtgataagtgatcatgcagccagagccagccttccttcaatcaaggtttccaggcagagcaaataccctagagattctctgtgatataggaaatttggatgaagggagctagaagaaatacagggatttttttttttttttaagatggagtcttactctgttgctaggctggagtgcagtggtgcgatctcagctccctgcaacctccacctcctgggttcaaacaattctcctgcctcagcctcccgagtactgggaatataggtgcacgccaccacacccaacaaatttttgtacttttagtacagatgagggttcactatgttggccaggatggtctcgatctcttgacctcatgatccacccacctcggtctcccaaagtgctgggattacaggcttgagccaccgggtgaccggcttacagggatatttttaatcccgttatggactctgtctccaggagaggggtctatccacccctgctcattggtggatgttaaaccaatattcctttcaactgctgcctgctagggaaaaactactcctcattatcatcattattattgctctccactgtatcccctctacctggcatgtgcttgtcaagttctagttgttcaataaatttgttaataatgctgactcttcaa

SEQ ID NO: 3873 - DNA, 2077 bp, Homo sapiens
  source 1..2077: mol_type = unassigned DNA
agtctctgctttctttttcctttcttccagaaggagatttaaccatagtagaaagaatggagaactattaactgcctttcttctgtgggctgtgattttcagaggggaatgctaagaggtgattttcaatgttgggactcaaaggtgaagacactgaaggacagaatttttggcagaggaaagatcttcttcggtcaccatacttgagttagctctagggaagtggaggtttccatttggaattctatagcttcttccaggtcatagtgtctgccccccaccttccagtatctcctgatatgcagcatgaatgaaaatggcaagtttcctggccttccttctgctcaactttcgtgtctgcctccttttgcttcagctgctcatgcctcactcagctcagttttctgtgcttggaccctctgggcccatcctggccatggtgggtgaagacgctgatctgccctgtcacctgttcccgaccatgagtgcagagaccatggagctgaagtgggtgagttccagcctaaggcaggtggtgaacgtgtatgcagatggaaaggaagtggaagacaggcagagtgcaccgtatcgagggagaacttcgattctgcgggatggcatcactgcagggaaggctgctctccgaatacacaacgtcacagcctctgacagtggaaagtacttgtgttatttccaagatggtgacttctatgaaaaagccctggtggagctgaaggttgcagacggagtgggcctgtatgcagtagcagcatctgtgatcatgagaggcagctctggggagggtgtatcctgtaccatcagaagttccctcctcggcctggaaaagacagccagcatttccatcgcagaccccttcttcaggagcgcccagaggtggatcgccgccctggcagggaccctgcctgtcttgctgctgcttcttgggggagccggttacttcctgtggcaacagcaggaggaaaaaaagactcagttcagaaagaaaaagagagagcaagagttgagagaaatggcatggagcacaatgaagcaagaacaaagcacaagagtgaagctcctggaggaactcagatggagaagtatccagtatgcatctcggggagagagacattcagcctataatgaatggaaaaaggccctcttcaagcctgcggatgtgattctggatccaaaaacagcaaaccccatcctccttgtttctgaggaccagaggagtgtgcagcgtgccaaggagccccaggatctgccagacaaccctgagagatttaattggcattattgtgttctcggctgtgagagcttcatatcagggagacattactgggaggtggaggtaggggacaggaaagagtggcatataggggtgtgcagtaagaatgtgcagagaaaaggctgggtcaaaatgacacctgagaatggattctggactatggggctgactgatgggaataagtatcggactctaactgagcccagaaccaacctgaaacttcctaagccccctaagaaagtgggggtcttcctggactatgagactggagatatctcattctacaatgctgtggatggatcgcatattcatactttcctggacgtctccttctctgaggctctatatcctgttttcagaattttgaccttggagcccacggccctgactatttgtccagcgtgaaaagaagaagagagttcctccaattctgaccgagtgctgatcattccctagagacaccagtaaccccgggcttagctaacgaaagtggggagcctcaggctgaagtaacttttctctgcttctccctgcccagctcagagctgagggcctccccctccacagcaaccaatcacaaccataaagctacaagcacgcactgaagcactttactgatactcattcaattattcatatgacagttgtttgagtttggtaccatcttattttccccttatacagataaggaaactggggtgcagaaaagtgaattgactacaaagtagacatgactagttaacaacacagctgggatctaaacagcaataactaacattaatggag

SEQ ID NO: 3874 - DNA, 1882 bp, Homo sapiens
  source 1..1882: mol_type = unassigned DNA
attcttccaaagagagattgttattattcctcacgatgacccgacagtctctgctttctttttcctttcttccagaaggagatttaaccatagtagaaagaatggagaactattaactgcctttcttctgtgggctgtgattttcagaggggaatgctaagaggtgattttcaatgttgggactcaaaggtgaagacactgaaggacagaatttttggcagaggaaagatcttcttcggtcaccatacttgagttagctctagggaagtggaggtttccatttggaattctatagcttcttccaggtcatagtgtctgccccccaccttccagtatctcctgatatgcagcatgaatgaaaatggcaagtttcctggccttccttctgctcaactttcgtgtctgcctccttttgcttcagctgctcatgcctcactcagctcagttttctgtgcttggaccctctgggcccatcctggccatggtgggtgaagacgctgatctgccctgtcacctgttcccgaccatgagtgcagagaccatggagctgaagtgggtgagttccagcctaaggcaggtggtgaacgtgtatgcagatggaaaggaagtggaagacaggcagagtgcaccgtatcgagggagaacttcgattctgcgggatggcatcactgcagggaaggctgctctccgaatacacaacgtcacagcctctgacagtggaaagtacttgtgttatttccaagatggtgacttctatgaaaaagccctggtggagctgaaggttgcagcactgggttctgatcttcacgttgatgtgaagggttacaaggatggagggatccatctggagtgcaggtccactggctggtacccccaaccccaaatacagtggagcaacaacaagggagagaacatcccgactgtggaagcacctgtggttgcagacggagtgggcctgtatgcagtagcagcatctgtgatcatgagaggcagctctggggagggtgtatcctgtaccatcagaagttccctcctcggcctggaaaagacagccagcatttccatcgcagaccccttcttcaggagcgcccagaggtggatcgccgccctggcagggaccctgcctgtcttgctgctgcttcttgggggagccggttacttcctgtggcaacagcaggaggaaaaaaagactcagttcagaaagaaaaagagagagcaagagttgagagaaatggcatggagcacaatgaagcaagaacaaagcacaagagtgaagctcctggaggaactcagatggagaagtatccagtatgcatctcggggagagagacattcagcctataatgaatggaaaaaggccctcttcaagcctgggcctcccattggccaaacccaacagcaaaccagaggacaagggagcccagtggcactgtctcaggaatctgcccagaggacagattcctggggcccagaagagggtggagaaagctgaagggtggagagtgaatctagggcatataaggcaccacatagagcccagcacagagacggccttgcagctatcaggaagatgaggagcttccttcatggcctgctgtgggctgagtaaataacatgattgccttctacagcgctagagattcatttgtttatccccatttttcaggtgaggaaatgcttcagatgaggctccactttgttaaataaattggatgtatggaaaaatagactgcagaaaaggggaactcatttagctcatgagtggtcgaatgaaggttgaaaattaacctctgagtataaagcattagtgggcagagtgaatatggggagggaaacaagaaaaacgtagaaaggatccttgctgcttcctgaggccgcgtca

SEQ ID NO: 3875 - DNA, 570 bp, Homo sapiens
  source 1..570: mol_type = unassigned DNA
aaagagagattgttattattcctcacgatgacccgacagtctctgctttctttttcctttcttccagaaggagatttaaccatagtagaaagaatggagaactattaactgcctttcttctgtgggctgtgattttcagaggggaatgctaagagatcttgttctcagaggccattcccagacccacagcaagagggattatggctgcaggcctcatgctcctttgttttggaagaaactgttgaggagtgattttcaatgttgggactcaaaggtgaagacactgaaggacagaatttttggcagaggaaagatcttcttcggtcaccatacttgagttagctctagggaagtggaggtttccatttggaattctatagcttcttccaggtcatagtgtctgccccccaccttccagtatctcctgatatgcagcatgaatgaaaatggcaagtttcctggccttccttctgctcaactttcgtgtctgcctccttttgcttcagctgctcatgcctcactcagctcagttttctgtgcttggaccctctgggcccatcctggccatgg

SEQ ID NO: 3876 - DNA, 580 bp, Homo sapiens
  source 1..580: mol_type = unassigned DNA
attcttccaaagagagattgttattattcctcacgatgacccgacagtctctgctttctttttcctttcttccagaaggagatttaaccatagtagaaagaatggagaactattaactgcctttcttctgtgggctgtgattttcagaggggaatgctaagagcttcttccaggtcatagtgtctgccccccaccttccagtatctcctgatatgcagcatgaatgaaaatggcaagtttcctggccttccttctgctcaactttcgtgtctgcctccttttgcttcagctgctcatgcctcactcagctcagttttctgtgcttggaccctctgggcccatcctggccatggtgggtgaagacgctgatctgccctgtcacctgttcccgaccatgagtgcagagaccatggagctgaagtgggtgagttccagcctaaggcaggtggtgaacgtgtatgcagatggaaaggaagtggaagacaggcagagtgcaccgtatcgagggagaacttcgattctgcgggatggcatcactgcagggaaggctgctctccgaatacacaacgtcacagcctct

SEQ ID NO: 3877 - DNA, 1758 bp, Homo sapiens
  source 1..1758: mol_type = unassigned DNA
aatcaaaaaacttattcttccaaagagagattgttattattcctcacgatgacccgacagtctctgctttctttttcctttcttccagaaggagatttaaccatagtagaaagaatggagaactattaactgcctttcttctgtgggctgtgattttcagaggggaatgctaagagtatctcctgatatgcagcatgaatgaaaatggcaagtttcctggccttccttctgctcaactttcgtgtctgcctccttttgcttcagctgctcatgcctcactcagctcagttttctgtgcttggaccctctgggcccatcctggccatggtgggtgaagacgctgatctgccctgtcacctgttcccgaccatgagtgcagagaccatggagctgaagtgggtgagttccagcctaaggcaggtggtgaacgtgtatgcagatggaaaggaagtggaagacaggcagagtgcaccgtatcgagggagaacttcgattctgcgggatggcatcactgcagggaaggctgctctccgaatacacaacgtcacagcctctgacagtggaaagtacttgtgttatttccaagatggtgacttctatgaaaaagccctggtggagctgaaggttgcagcactgggttctgatcttcacgttgatgtgaagggttacaaggatggagggatccatctggagtgcaggtccactggctggtacccccaaccccaaatacagtggagcaacaacaagggagagaacatcccgactgtggaagcacctgtggttgcagacggagtgggcctgtatgcagtagcagcatctgtgatcatgagaggcagctctggggagggtgtatcctgtaccatcagaagttccctcctcggcctggaaaagacagccagcatttccatcgcagaccccttcttcaggagcgcccagaggtggatcgccgccctggcagggaccctgcctgtcttgctgctgcttcttgggggagccggttacttcctgtggcaacagcaggaggaaaaaaagactcagttcagaaagaaaaagagagagcaagagttgagagaaatggcatggagcacaatgaagcaagaacaaagcacaagagtgaagctcctggaggaactcagatggagaagtatccagtatgcatctcggggagagagacattcagcctataatgaatggaaaaaggccctcttcaagcctggtgaggaaatgcttcagatgaggctccactttgttaaataaattggatgtatggaaaaatagactgcagaaaaggggaactcatttagctcatgagtggtcgaatgaaggttgaaaattaacctctgagtataaagcattagtgggcagagtgaatatggggagggaaacaagaaaaacgtagaaaggatccttgctgcttcctgaggccgcgtcagggtattgggttaggcagagatgctgaggcaaccctcatttcaccctcctcttcccctctggacacaagatacctgatacctggggctttctctcctgacatcgatgagagagtcacatttagggcagactagggacaccaggctttggactcagacctcctcagcatggcccaggccttgcatgctgaggctctgaaatccaggaaaaatggttgacctcatggacacttcctcaaactctctgcagcggatgtgattctggatccaaaaacagcaaaccccatcctccttgtttctgaggaccagaggagtgtgcagcgtgcca

SEQ ID NO: 3878 - DNA, 619 bp, Homo sapiens
  source 1..619: mol_type = unassigned DNA
attcctcacgatgacccgacagtctctgctttctttttcctttcttccagaaggagatttaaccatagtagaaagaatggagaactattaactgcctttcttctgtgggctgtgattttcagaggggaatgctaagagacatgtttttacaggtgattttcaatgttgggactcaaaggtgaagacactgaaggacagaatttttggcagaggaaagatcttcttcggtcaccatacttgagttagctctagggaagtggaggtttccatttggaattctatagcttcttccaggtcatagtgtctgccccccaccttccagtatctcctgatatgcagcatgaatgaaaatggcaagtttcctggccttccttctgctcaactttcgtgtctgcctccttttgcttcagctgctcatgcctcactcagctcagttttctgtgcttggaccctctgggcccatcctggccatggtgggtgaagacgctgatctgccctgtcacctgttcccgaccatgagtgcagagaccatggagctgaagtgggtgagttccagcctaaggcaggtggtgaacgtgtatgcagatggaaaggaagtggaagacaggcagagtgcacc

SEQ ID NO: 3879 - DNA, 3017 bp, Homo sapiens
  source 1..3017: mol_type = unassigned DNA
atttgctttctctttttcctttcttccggatgagaggctaagccataatagaaagaatggagaattattgattgaccgtctttattctgtgggctctgattctccaatgggaataccaagggatggttttccatactggaacccaaaggtaaagacactcaaggacagacatttttggcagagcatagatgaaaatggcaagttccctggctttccttctgctcaactttcatgtctccctcctcttggtccagctgctcactccttgctcagctcagttttctgtgcttggaccctctgggcccatcctggccatggtgggtgaagacgctgatctgccctgtcacctgttcccgaccatgagtgcagagaccatggagctgaagtgggtaagttccagcctaaggcaggtggtgaacgtgtatgcagatggaaaggaagtggaagacaggcagagtgcaccgtatcgagggagaacttcgattctgcgggatggcatcactgcagggaaggctgctctccgaatacacaacgtcacagcctctgacagtggaaagtacttgtgttatttccaagatggtgacttctatgaaaaagccctggtggagctgaaggttgcagcactgggttctaatcttcacgtcgaagtgaagggttatgaggatggagggatccatctggagtgcaggtccaccggctggtacccccaaccccaaatacagtggagcaacgccaagggagagaacatcccagctgtggaagcacctgtggttgcagatggagtgggcctatatgaagtagcagcatctgtgatcatgagaggcggctccggggagggtgtatcctgcatcatcagaaattccctcctcggcctggaaaagacagccagcatttccatcgcagaccccttcttcaggagcgcccagccctggatcgcagccctggcagggaccctgcctatcttgctgctgcttctcgccggagccagttacttcttgtggagacaacagaaggaaataactgctctgtccagtgagatagaaagtgagcaagagatgaaagaaatgggatatgctgcaacagagcgggaaataagcctaagagagagcctccaggaggaactcaagaggaaaaaaatccagtacttgactcgtggagaggagtcttcgtccgataccaataagtcagcctgatgctctaatggaaaaatggccctcttcaagcctggaaaaatggctgaccccatggacacctcctcaaactctctgcagcagatgtaattctgtatccagacatggcaaatgccatcctccttgtttctgaggaccagaggagtgtacagcgtgctgaggagccccatgacctaccagacaaccctgagagatttgaatggcgttactgtgtgcttggctgtgaaagcttcatgtcagagagacactactgggaggtggaagtgggggacagaaaagagtggcatattggggtatgtagtaagaacgtggagaggaaaaaagtttgggtcaaaatgacaccggagaacggatactggactatgggcctgactgatgggaataagtatcgggctctcactgagcccagaaccaacctgaaacttcctgagcctcctaggaaagtgggggtcatcctggactatgagactggacatatctcgttctacaatgccacggatggatctcatatctacacatttctgcacgcctcttcctctgagcctctgtatcctgtattcagaattttgaccttggagcccactgccctgaccgtttgcccaataccaaaagtagagagttcccccgatcccgacctagtgcctgatcattccctggagataccactgaccccaggcttagctaatgaaagtggggagcctcaggctgaagtaacatctctgcttctccctgcccagcctggagctaagggtctcaccctccacaacagccagtcagaaccataaagctacaggcacacactgaagcactttactgatattcattcaattattccataggacagttgtttgagtttggtgccaccttattggcccctttatacagataaggaaactggggtgtagaaaagtgtattgactttacaaagcagacaggaatagtgaacaacagagctgggatctgaacaacaatgactaacattaatggagaatttaaaacgttctgagtgctgtgttatgagctttggtgggtgtcactcctttaatcctcacaacaccctgtcaggtagtctcatttggcaagtatggaagcagaggcagggcaacattaagtagcttacataactcacacggtaatttgtgcagttgggagatgttcagcttcagtccctggccaattgcccgttcttttccagcctgatttttcctgcatgggaagagcccacatgtagccctgaggttcccttcccaggacagctccaggatcgagatcactgtgagtggttgtggagttaagacccctatggactccttcccagctgattatcagagccttagacccagcactccttggattggctctgcagagtgtcttggttgagagaataacgttgcagttcccacagggcatgtgactttgaaagagactagaggccacactcagttaataatggggcacagatgtgttcccacccaacaaatgtgataagtgatcgtgcagccagagccagccttccttcagtcaaggtttccaggcagagcaaataccctagagattctctgtaatattggtaatttggatgaaggaagctagaagaattacagggatgtttttaatcccactatggactcagtctcctggaaaaggatctgtccactcctggtcattggtggatgttaaacccatattcctttcaactgctgcctgctagggaaaactgctcctcattatcatcactattattgctcaccactgtatcccctctactgggcaagtgcttgtcaagttctagttgttcaataaatttgttaataatgctgactcttc

SEQ ID NO: 3880 - DNA, 1634 bp, Homo sapiens
  source 1..1634: mol_type = unassigned DNA
gaggctaagccataatagaaagaatggagaattattgattgaccgtctttattctgtgggctctgattctccaatgggaataccaagggatggttttccatactggaacccaaaggtaaagacactcaaggacagacatttttggcagagcatagatgaaaatggcaagttccctggctttccttctgctcaactttcatgtctccctcctcttggtccagctgctcactccttgctcagctcagttttctgtgcttggaccctctgggcccatcctggccatggtgggtgaagacgctgatctgccctgtcacctgttcccgaccatgagtgcagagaccatggagctgaagtgggtaagttccagcctaaggcaggtggtgaacgtgtatgcagatggaaaggaagtggaagacaggcagagtgcaccgtatcgagggagaacttcgattctgcgggatggcatcactgcagggaaggctgctctccgaatacacaacgtcacagcctctgacagtggaaagtacttgtgttatttccaagatggtgacttctatgaaaaagccctggtggagctgaaggttgcagcactgggttctaatcttcacgtcgaagtgaagggttatgaggatggagggatccatctggagtgcaggtccaccggctggtacccccaaccccaaatacagtggagcaacgccaagggagagaacatcccagctgtggaagcacctgtggttgcagatggagtgggcctatatgaagtagcagcatctgtgatcatgagaggcggctccggggagggtgtatcctgcatcatcagaaattccctcctcggcctggaaaagacagccagcatttccatcgcagaccccttcttcaggagcgcccagccctggatcgcagccctggcagggaccctgcctatcttgctgctgcttctcgccggagccagttacttcttgtggagacaacagaaggaaataactgctctgtccagtgagatagaaagtgagcaagagatgaaagaaatgggatatgctgcaacagagcgggaaataagcctaagagagagcctccaggaggaactcaagaggaaaaaaatccagtacttgactcgtggagaggagtcttcgtccgataccaataagtcagcctgatgctctaatggaaaaatggccctcttcaagcctggtgaggaaatgcttcagatgaggctccaccttgttaaataaattggatgtatggaaaaatagactgcagaaaaggggaactcatttagctcacgagtggtcgagtgaagattgaaaattaacctctgagggccagcacagcagctcatgcctgtaatcctagcactttggaaggctgaggagggcggatcacaaggtcaggagatcaagaccatcctggctaacacggtgaaaccccgtctctactaaaaatacaaaaaataaaaaattagccgggcatggtgacgggcacctgtagtcccagctactcgggaggctgaggcaggagaatggcatgaacccggaaggcagagcttgcagtgagccgagatcacgccactgcactccagcctgggagacagagcgagactctgtctcaagaaaaaaaaaaaaaaaaaaaaa

SEQ ID NO: 3881 - DNA, 1225 bp, Homo sapiens
  source 1..1225: mol_type = unassigned DNA
cctttcttccggatgagaggctaagccataatagaaagaatggagaattattgattgaccgtctttattctgtgggctctgattctccaatgggaataccaagggctcagttttctgtgcttggaccctctgggcccatcctggccatggtgggtgaagacgctgatctgccctgtcacctgttcccgaccatgagtgcagagaccatggagctgaagtgggtaagttccagcctaaggcaggtggtgaacgtgtatgcagatggaaaggaagtggaagacaggcagagtgcaccgtatcgagggagaacttcgattctgcgggatggcatcactgcagggaaggctgctctccgaatacacaacgtcacagcctctgacagtggaaagtacttgtgttatttccaagatggtgacttctatgaaaaagccctggtggagctgaaggttgcagcactgggttctaatcttcacgtcgaagtgaagggttatgaggatggagggatccatctggagtgcaggtccaccggctggtacccccaaccccaaatacagtggagcaacgccaagggagagaacatcccagctgtggaagcacctgtggttgcagatggagtgggcctatatgaagtagcagcatctgtgatcatgagaggcggctccggggagggtgtatcctgcatcatcagaaattccctcctcggcctggaaaagacagccagcatttccatcgcagaccccttcttcaggagcgcccagccctggatcgcagccctggcagggaccctgcctatcttgctgctgcttctcgccggagccagttacttcttgtggagacaacagaaggaaataactgctctgtccagtgagatagaaagtgagcaagagatgaaagaaatgggatatgctgcaacagagcgggaaataagcctaagagagagcctccaggaggaactcaagaggaaaaaaatccagtacttgactcgtggagaggagtcttcgtccgataccaataagtcagcctgatgctctaatggaaaaatggccctcttcaagcctggtgaggaaatgcttcagatgaggctccaccttgttaaataaattggatgtatggaaaaatagactgcagaaaaggggaactcatttagctcacgagtggtcgagtgaagattgaaaattaacctctgagggccagcacagcagctcatgcctgtaatcctagcact

SEQ ID NO: 3882 - DNA, 1494 bp, Homo sapiens
  source 1..1494: mol_type = unassigned DNA
ggctaagccataatagaaagaatggagaattattgattgaccgtctttattctgtgggctctgattctccaatgggaataccaagggatggttttccatactggaacccaaaggtaaagacactcaaggacagacatttttggcagagcatagatgaaaatggcaagttccctggctttccttctgctcaactttcatgtctccctcctcttggtccagctgctcactccttgctcagctcagttttctgtgcttggaccctctgggcccatcctggccatggtgggtgaagacgctgatctgccctgtcacctgttcccgaccatgagtgcagagaccatggagctgaagtgggtaagttccagcctaaggcaggtggtgaacgtgtatgcagatggaaaggaagtggaagacaggcagagtgcaccgtatcgagggagaacttcgattctgcgggatggcatcactgcagggaaggctgctctccgaatacacaacgtcacagcctctgacagtggaaagtacttgtgttatttccaagatggtgacttctatgaaaaagccctggtggagctgaaggttgcagcactgggttctaatcttcacgtcgaagtgaagggttatgaggatggagggatccatctggagtgcaggtccaccggctggtacccccaaccccaaatacagtggagcaacgccaagggagagaacatcccagctgtggaagcacctgtggttgcagatggagtgggcctatatgaagtagcagcatctgtgatcatgagaggcggctccggggagggtgtatcctgcatcatcagaaattccctcctcggcctggaaaagacagccagcatttccatcgcagaccccttcttcaggagcgcccagccctggatcgcagccctggcagggaccctgcctatcttgctgctgcttctcgccggagccagttacttcttgtggagacaacagaaggaaataactgctctgtccagtgagatagaaagtgagcaagagatgaaagaaatgggatatgctgcaacagagcgggaaataagcctaagagagagcctccaggaggaactcaagaggaaaaaaatccagtacttgactcgtggagaggagtcttcgtccgataccaataagtcagcctgatgctctaatggaaaaatggccctcttcaagcctgggcctcccattggccaaacacagcagcaaaccagaggacaagggagcccagtggcactgtccatagaggacagattcctggggtccagaagagggtggagaaagctgaaggctggagagtgaatctagggcatataaggccccacacagagcccagcacagagacggccttgcagctatcaggaagatgaggagcttccttcatggcctgctgtgggctgagtaaataatatgattgccttctacagcgctagagattcatatgtttatccccatttttcaggtgaggaaatgcttcagatg

SEQ ID NO: 3883 - DNA, 1512 bp, Homo sapiens
  source 1..1512: mol_type = unassigned DNA
ataatagaaagaatggagaattattgattgaccgtctttattctgtgggctctgattctccaatgggaataccaagggatggttttccatactggaacccaaaggtaaagacactcaaggacagacatttttggcagagctcagttttctgtgcttggaccctctgggcccatcctggccatggtgggtgaagacgctgatctgccctgtcacctgttcccgaccatgagtgcagagaccatggagctgaagtgggtaagttccagcctaaggcaggtggtgaacgtgtatgcagatggaaaggaagtggaagacaggcagagtgcaccgtatcgagggagaacttcgattctgcgggatggcatcactgcagggaaggctgctctccgaatacacaacgtcacagcctctgacagtggaaagtacttgtgttatttccaagatggtgacttctatgaaaaagccctggtggagctgaaggttgcagcactgggttctaatcttcacgtcgaagtgaagggttatgaggatggagggatccatctggagtgcaggtccaccggctggtacccccaaccccaaatacagtggagcaacgccaagggagagaacatcccagctgtggaagcacctgtggttgcagatggagtgggcctatatgaagtagcagcatctgtgatcatgagaggcggctccggggagggtgtatcctgcatcatcagaaattccctcctcggcctggaaaagacagccagcatttccatcgcagaccccttcttcaggagcgcccagccctggatcgcagccctggcagggaccctgcctatcttgctgctgcttctcgccggagccagttacttcttgtggagacaacagaaggaaataactgctctgtccagtgagatagaaagtgagcaagagatgaaagaaatgggatatgctgcaacagagcgggaaataagcctaagagagagcctccaggaggaactcaagaggaaaaaaatccagtacttgactcgtggagaggagtcttcgtccgataccaataagtcagcctgatgctctaatggaaaaatggccctcttcaagcctggtgaggaaatgcttcagatgaggctccaccttgttaaataaattggatgtatggaaaaatagactgcagaaaaggggaactcatttagctcacgagtggtcgagtgaagattgaaaattaacctctgagggccagcacagcagctcatgcctgtaatcctagcactttggaaggctgaggagggcggatcacaaggtcaggagatcaagaccatcctggctaacacggtgaaaccccgtctctactaaaaatacaaaaaataaaaaattagccgggcatggtgacgggcacctgtagtcccagctactcgggaggctgaggcaggagaatggcatgaacccggaaggcagagcttgcagtgagccgagatcacgccactgcactccagcctgggagacagagcgagactctgtctcaag

SEQ ID NO: 3884 - DNA, 1460 bp, Homo sapiens
  source 1..1460: mol_type = unassigned DNA
atttgctttctctttttcctttcttccggatgagaggctaagccataatagaaagaatggagaattattgattgaccgtctttattctgtgggctctgattctccaatgggaataccaagggatattatttttacagatggttttccatactggaacccaaaggtaaagacactcaaggacagacatttttggcagagatgaaaatggcaagttccctggctttccttctgctcaactttcatgtctccctcctcttggtccagctgctcactccttgctcagctcagttttctgtgcttggaccctctgggcccatcctggccatggtgggtgaagacgctgatctgccctgtcacctgttcccgaccatgagtgcagagaccatggagctgaagtgggtaagttccagcctaaggcaggtggtgaacgtgtatgcagatggaaaggaagtggaagacaggcagagtgcaccgtatcgagggagaacttcgattctgcgggatggcatcactgcagggaaggctgctctccgaatacacaacgtcacagcctctgacagtggaaagtacttgtgttatttccaagatggtgacttctatgaaaaagccctggtggagctgaaggttgcagcactgggttctaatcttcacgtcgaagtgaagggttatgaggatggagggatccatctggagtgcaggtccaccggctggtacccccaaccccaaatacagtggagcaacgccaagggagagaacatcccagctgtggaagcacctgtggttgcagatggagtgggcctatatgaagtagcagcatctgtgatcatgagaggcggctccggggagggtgtatcctgcatcatcagaaattccctcctcggcctggaaaagacagccagcatttccatcgcagaccccttcttcaggagcgcccagccctggatcgcagccctggcagggaccctgcctatcttgctgctgcttctcgccggagccagttacttcttgtggagacaacagaaggaaataactgctctgtccagtgagatagaaagtgagcaagagatgaaagaaatgggatatgctgcaacagagcgggaaataagcctaagagagagcctccaggaggaactcaagaggaaaaaaatccagtacttgactcgtggagaggagtcttcgtccgataccaataagtcagcctgatgctctaatggaaaaatggccctcttcaagcctgggcctcccattggccaaacacagcagcaaaccagaggacaagggagcccagtggcactgtccatagaggacagattcctggggtccagaagagggtggagaaagctgaaggctggagagtgaatctagggcatataaggccccacacagagcccagcacagagacggccttgcagctatcaggaagatgaggagcttccttcatggcctgctgtgggctgagt

SEQ ID NO: 3885 - DNA, 1149 bp, Homo sapiens
  source 1..1149: mol_type = unassigned DNA
tatttgctttctctttttcctttcttccggatgagaggctaagccataatagaaagaatggagaattattgattgaccgtctttattctgtgggctctgattctccaatgggaataccaagggatggttttccatactggaacccaaaggtaaagacactcaaggacagacatttttggcagagcatagatgaaaatggcaagttccctggctttccttctgctcaactttcatgtctccctcctcttggtccagctgctcactccttgctcagctcagttttctgtgcttggaccctctgggcccatcctggccatggtgggtgaagacgctgatctgccctgtcacctgttcccgaccatgagtgcagagaccatggagctgaagtgggtaagttccagcctaaggcaggtggtgaacgtgtatgcagatggaaaggaagtggaagacaggcagagtgcaccgtatcgagggagaacttcgattctgcgggatggcatcactgcagggaaggctgctctccgaatacacaacgtcacagcctctgacagtggaaagtacttgtgttatttccaagatggtgacttctatgaaaaagccctggtggagctgaaggttgcagcactgggttctaatcttcacgtcgaagtgaagggttatgaggatggagggatccatctggagtgcaggtccaccggctggtacccccaaccccaaatacagtggagcaacgccaagggagagaacatcccagctgtggaagcacctgtggttgcagatggagtgggcctatatgaagtagcagcatctgtgatcatgagaggcggctccggggagggtgtatcctgcatcatcagaaattccctcctcggcctggaaaagacagccagcatttccatcgcagaccccttcttcaggagcgcccagccctggatcgcagccctggcagggaccctgcctatcttgctgctgcttctcgccggagccagttacttcttgtggagacaacagaaggaaataactgctctgtccagtgagatagaaagtgagcaagagatgaaagaaatgggatatgctgcaacagagcgggaaataagcctaagagagagcctccaggaggaactcaagaggaaaaaatccagtacttga

SEQ ID NO: 3886 - DNA, 3002 bp, Homo sapiens
  source 1..3002: mol_type = unassigned DNA
aatcaaaaaactaattcttccaaaaagagattgttattattcctcacaataaccagatagcctctgctttctttttcctttcttcggaatgagagactcaaccataatagaaagaatggagaactattaaccaccattcttcagtgggctgtgattttcagaggggaatactaagaaatggttttccatactggaacccaaaggtaaagacactcaaggacagacatttttggcagagcatagatgaaaatggcaagttccctggctttccttctgctcaactttcatgtctccctcttcttggtccagctgctcactccttgctcagctcagttttctgtgcttggaccctctgggcccatcctggccatggtgggtgaagacgctgatctgccctgtcacctgttcccgaccatgagtgcagagaccatggagctgaggtgggtgagttccagcctaaggcaggtggtgaacgtgtatgcagatggaaaggaagtggaagacaggcagagtgcaccgtatcgagggagaacttcgattctgcgggatggcatcactgcagggaaggctgctctccgaatacacaacgtcacagcctctgacagtggaaagtacttgtgttatttccaagatggtgacttctacgaaaaagccctggtggagctgaaggttgcagcattgggttctgatcttcacattgaagtgaagggttatgaggatggagggatccatctggagtgcaggtccactggctggtacccccaaccccaaataaagtggagcgacaccaagggagagaacatcccggctgtggaagcacctgtggttgcagatggagtgggcctgtatgcagtagcagcatctgtgatcatgagaggcagctctggtgggggtgtatcctgcatcatcagaaattccctcctcggcctggaaaagacagccagcatatccatcgcagaccccttcttcaggagcgcccagccctggatcgcggccctggcagggaccctgcctatctcgttgctgcttctcgcaggagccagttacttcttgtggagacaacagaaggaaaaaattgctctgtccagggagacagaaagagagcgagagatgaaagaaatgggatacgctgcaacagagcaagaaataagcctaagagagaagctccaggaggaactcaagtggaggaaaatccagtacatggctcgtggagagaagtctttggcctatcatgaatggaaaatggccctcttcaaacctgcggatgtgattctggatccagacacggcaaacgccatcctccttgtttctgaggaccagaggagtgtgcagcgtgctgaagagccgcgggatctgccagacaaccctgagagatttgaatggcgttactgtgtccttggctgtgaaaacttcacatcagggagacattactgggaggtggaagtgggggacagaaaagagtggcatattggggtatgtagtaagaacgtggagaggaaaaaaggttgggtcaaaatgacaccggagaacggatactggactatgggcctgactgatgggaataagtatcgggctctcactgagcccagaaccaacctgaaacttcctgagcctcctaggaaagtggggatcttcctggactatgagactggagagatctcgttctataatgccacagatggatctcatatctacacctttccgcacgcctctttctctgagcctctatatcctgttttcagaattttgaccttggagcccactgccctgaccatttgcccaataccaaaagaagtagagagttcccccgatcctgacctagtgcctgatcattccctggagacaccactgaccccgggcttagctaatgaaagtggggagcctcaggctgaagtaacatctctgcttctccctgcccaccctggagctgaggtctccccttctgcaacaaccaatcagaaccataagctacaggcacgcactgaagcactttactgatattcattccattattccatatgacagttgttttgagtttcgtaccaccttattgtccccttatacagataaggaaactggggtgcagaaaggtgaattaactttacaaagtagacatgacaagtgaacagcagagctgggatctaaacagcaataactaacattaacagagaatttaaaatgttcttagtgctgtgttataagctttggtggatgtcactcctttaatcctcacaacaccctgtcgggtagtcatattttgcaagtatggaagctgaggcagggcaacatgaagtaacttacataactcatacagtaatttgtgcagttgggagatgttcagccttagtccctggctaattgcctgttcttttccagcctgattttttttcccacaggaagagcccacatgtagccctgaggtttccttcccaggacagctgcagggtagagatcattttaagtgcttgtggagttgacatccctattgactctttcccagctgatatcagagacttagacccagcactccttggattagctctgcagagtgtcttggttgagagaataacctcatagtaccaacatgacatgtgacttggaaagagactagaggccacacttgataaatcatggggcacagatatgttcccacccaacaaatgtgataagtgattgtgcagccagagccagccttccttcaatcaaggtttccaggcagagcaaataccctagagattctctgtgatataggaaatttggatcaaggaagctaaaagaattacagggatgtttttaatcccactatggactcagtctcctggaaataggtctgtccactcctggtcattggtggatgttaaacccatattcctttcaactgctgcctgctagggaaaactgctcctcattatcatcactattattgctcaccactgtatcccctctacttggcaagtggttgtcaagttctagttgttcaataaatgtgttaataatgctta

SEQ ID NO: 3887 - DNA, 2930 bp, Homo sapiens
  source 1..2930: mol_type = unassigned DNA
aatcaaaaaactaattcttccaaaaagagattgttattattcctcacaataaccagatagcctctgctttctttttcctttcttcggaatgagagactcaaccataatagaaagaatggagaactattaaccaccattcttcagtgggctgtgattttcagaggggaatactaagaaatggttttccatactggaacccaaaggtaaagacactcaaggacagacatttttggcagagctgctcactccttgctcagctcagttttctgtgcttggaccctctgggcccatcctggccatggtgggtgaagacgctgatctgccctgtcacctgttcccgaccatgagtgcagagaccatggagctgaggtgggtgagttccagcctaaggcaggtggtgaacgtgtatgcagatggaaaggaagtggaagacaggcagagtgcaccgtatcgagggagaacttcgattctgcgggatggcatcactgcagggaaggctgctctccgaatacacaacgtcacagcctctgacagtggaaagtacttgtgttatttccaagatggtgacttctacgaaaaagccctggtggagctgaaggttgcagcattgggttctgatcttcacattgaagtgaagggttatgaggatggagggatccatctggagtgcaggtccactggctggtacccccaaccccaaataaagtggagcgacaccaagggagagaacatcccggctgtggaagcacctgtggttgcagatggagtgggcctgtatgcagtagcagcatctgtgatcatgagaggcagctctggtgggggtgtatcctgcatcatcagaaattccctcctcggcctggaaaagacagccagcatatccatcgcagaccccttcttcaggagcgcccagccctggatcgcggccctggcagggaccctgcctatctcgttgctgcttctcgcaggagccagttacttcttgtggagacaacagaaggaaaaaattgctctgtccagggagacagaaagagagcgagagatgaaagaaatgggatacgctgcaacagagcaagaaataagcctaagagagaagctccaggaggaactcaagtggaggaaaatccagtacatggctcgtggagagaagtctttggcctatcatgaatggaaaatggccctcttcaaacctgcggatgtgattctggatccagacacggcaaacgccatcctccttgtttctgaggaccagaggagtgtgcagcgtgctgaagagccgcgggatctgccagacaaccctgagagatttgaatggcgttactgtgtccttggctgtgaaaacttcacatcagggagacattactgggaggtggaagtgggggacagaaaagagtggcatattggggtatgtagtaagaacgtggagaggaaaaaaggttgggtcaaaatgacaccggagaacggatactggactatgggcctgactgatgggaataagtatcgggctctcactgagcccagaaccaacctgaaacttcctgagcctcctaggaaagtggggatcttcctggactatgagactggagagatctcgttctataatgccacagatggatctcatatctacacctttccgcacgcctctttctctgagcctctatatcctgttttcagaattttgaccttggagcccactgccctgaccatttgcccaataccaaaagaagtagagagttcccccgatcctgacctagtgcctgatcattccctggagacaccactgaccccgggcttagctaatgaaagtggggagcctcaggctgaagtaacatctctgcttctccctgcccaccctggagctgaggtctccccttctgcaacaaccaatcagaaccataagctacaggcacgcactgaagcactttactgatattcattccattattccatatgacagttgttttgagtttcgtaccaccttattgtccccttatacagataaggaaactggggtgcagaaaggtgaattaactttacaaagtagacatgacaagtgaacagcagagctgggatctaaacagcaataactaacattaacagagaatttaaaatgttcttagtgctgtgttataagctttggtggatgtcactcctttaatcctcacaacaccctgtcgggtagtcatattttgcaagtatggaagctgaggcagggcaacatgaagtaacttacataactcatacagtaatttgtgcagttgggagatgttcagccttagtccctggctaattgcctgttcttttccagcctgattttttttcccacaggaagagcccacatgtagccctgaggtttccttcccaggacagctgcagggtagagatcattttaagtgcttgtggagttgacatccctattgactctttcccagctgatatcagagacttagacccagcactccttggattagctctgcagagtgtcttggttgagagaataacctcatagtaccaacatgacatgtgacttggaaagagactagaggccacacttgataaatcatggggcacagatatgttcccacccaacaaatgtgataagtgattgtgcagccagagccagccttccttcaatcaaggtttccaggcagagcaaataccctagagattctctgtgatataggaaatttggatcaaggaagctaaaagaattacagggatgtttttaatcccactatggactcagtctcctggaaataggtctgtccactcctggtcattggtggatgttaaacccatattcctttcaactgctgcctgctagggaaaactgctcctcattatcatcactattattgctcaccactgtatcccctctacttggcaagtggttgtcaagttctagttgttcaataaatgtgttaataatgctt

SEQ ID NO: 3888 - DNA, 671 bp, Homo sapiens
  source 1..671: mol_type = unassigned DNA
aatcaaaaaactaattcttccaaaaagagattgttattattcctcacaataaccagatagcctctgctttctttttcctttcttcggaatgagagactcaaccataatagaaagaatggagaactattaaccaccattcttcagtgggctgtgattttcagaggggaatactaagaaatattatttttacagatggttttccatactggaacccaaaggtaaagacactcaaggacagacatttttggcagagcatagatgaaaatggcaagttccctggctttccttctgctcaactttcatgtctccctcttcttggtccagctgctcactccttgctcagctcagttttctgtgcttggaccctctgggcccatcctggccatggtgggtgaagacgctgatctgccctgtcacctgttcccgaccatgagtgcagagaccatggagctgaggtgggtgagttccagcctaaggcaggtggtgaacgtgtatgcagatggaaaggaagtggaagacaggcagagtgcaccgtatcgagggagaacttcgattctgcgggatggcatcactgcagggaaggctgctctccgaatacacaacgtcacagcctctgacagtggaaagtacttgtgttatttccaagatggtgacttctacgaaaaagccct

SEQ ID NO: 3889 - DNA, 1002 bp, Homo sapiens
  source 1..1002: mol_type = unassigned DNA
agagattgttattattcctcacaataaccagatagcctctgctttctttttcctttcttcggaatgagagactcaaccataatagaaagaatggagaactattaaccaccattcttcagtgggctgtgattttcagaggggaatactaagaagtaagtggggaatgttgattagagcctgggctacaatgcctgggaggacaagagctgaatcgctgagagtgatggttttccatactggaacccaaaggtaaagacactcaaggacagacatttttggcagagcatagatgaaaatggcaagttccctggctttccttctgctcaactttcatgtctccctcttcttggtccagctgctcactccttgctcagctcagttttctgtgcttggaccctctgggcccatcctggccatggtgggtgaagacgctgatctgccctgtcacctgttcccgaccatgagtgcagagaccatggagctgaggtgggtgagttccagcctaaggcaggtggtgaacgtgtatgcagatggaaaggaagtggaagacaggcagagtgcaccgtatcgagggagaacttcgattctgcgggatggcatcactgcagggaaggctgctctccgaatacacaacgtcacagcctctgacagtggaaagtacttgtgttatttccaagatggtgacttctacgaaaaagccctggtggagctgaaggttgcagcattgggttctgatcttcacattgaagtgaagggttatgaggatggagggatccatctggagtgcaggtccactggctggtacccccaaccccaaataaagtggagcgacaccaagggagagaacatcccggctgtggaagcacctgtggttgcagatggagtgggcctgtatgcagtagcagcatctgtgatcatgagaggcagctctggtgggggtgtatcctgcatcatcagaaattccctcctcggcctggaaaagacagccagcatatccatcgc

SEQ ID NO: 3890 - DNA, 1368 bp, Homo sapiens
  source 1..1368: mol_type = unassigned DNA
atggtggattttccaggctacaatctgtctggtgcagtcgcctccttcctattcatcctgctgacaatgaagcagtcagaagactttagagtcattggccctgctcatcctatcctggccggggttggggaagatgccctgttaacctgccagctactccccaagaggaccacaatgcacgtggaggtgaggtggtaccgctcagagcccagcacacctgtgtttgtgcacagggatggagtggaggtgactgagatgcagatggaggagtacagaggctgggtagagtggatagagaatggcattgcaaagggaaatgtggcactgaagatacacaacatccagccctccgacaatggacaatactggtgccatttccaggatgggaactactgtggagaaacaagcttgctgctcaaagtagcaggtctggggtctgcccctagcatccacatggagggacctggggagagtggagtccagcttgtgtgcactgcaaggggctggttcccagagccccaggtgtattgggaagacatccggggagagaagctgctggccgtgtctgagcatcgcatccaagataaagatggcctgttctatgcggaagccaccctggtggtcaggaacgcctctgcagagtctgtgtcctgcttggtccacaaccccgtcctcactgaggagaaggggtcggtcatcagcctcccagagaaactccagactgagctggcttctttaaaagtgaatggaccttcccagcccatcctcgtcagagtgggagaagatatacagctaacctgttacctgtcccccaaggcgaatgcacagagcatggaggtgaggtgggaccgatcccaccgttaccctgctgtgcatgtgtatatggatggggaccatgtggctggagagcagatggcagagtacagagggaggactgtactggtgagtgacgccattgacgagggcagactgaccctgcagatactcagtgccagaccttcggacgacgggcagtaccgctgcctttttgaaaaagatgatgtctaccaggaggccagtttggatctgaaggtggtaagtctgggttcttccccactgatcactgtggaggggcaagaagatggagaaatgcagccgatgtgctcttcagatgggtggttcccacagccccacgtgccatggagggacatggaaggaaagacgataccatcatcttcccaggccctgactcaaggcagccacgggctgttccacgtgcagacattgctaagggtcacaaacatctccgctgtggacgtcacttgttccatcagcatcccctttttgggcgaggagaaaatcgcaactttttctctctcaggttggtga

SEQ ID NO: 3891 - DNA, 1167 bp, Homo sapiens
  source 1..1167: mol_type = unassigned DNA
atggtggattttccaggctacaatctgtctggtgcagtcgcctccttcctattcatcctgctgacaatgaagcagtcagaagactttagagtcattggccctgctcatcctatcctggccggggttggggaagatgccctgttaacctgccagctactccccaagaggaccacaatgcacgtggaggtgaggtggtaccgctcagagcccagcacacctgtgtttgtgcacagggatggagtggaggtgactgagatgcagatggaggagtacagaggctgggtagagtggatagagaatggcattgcaaagggaaatgtggcactgaagatacacaacatccagccctccgacaatggacaatactggtgccatttccaggatgggaactactgtggagaaacaagcttgctgctcaaagtagcagagaagctgctggccgttctgtcttctttaaaagtgaatggaccttcccagcccatcctcgtcagagtgggagaagatatacagctaacctgttacctgtcccccaaggcgaatgcacagagcatggaggtgaggtgggaccgatcccaccgttaccctgctgtgcatgtgtatatggatggggaccatgtggctggagagcagatggcagagtacagagggaggactgtactggtgagtgacgccattgacgagggcagactgaccctgcagatactcagtgccagaccttcggacgacgggcagtaccgctgcctttttgaaaaagatgatgtctaccaggaggccagtttggatctgaaggtggtaagtctgggttcttccccactgatcactgtggaggggcaagaagatggagaaatgcagccgatgtgctcttcagatgggtggttcccacagccccacgtgccatggagggacatggaaggaaagacgataccatcatcttcccaggccctgactcaaggcagccacgggctgttccacgtgcagacattgctaagggtcacaaacatctccgctgtggacgtcacttgttccatcagcatcccctttttgggcgaggagaaaatcgcaactttttctctctcagagtccaggatgacgtttttgtggaaaacactgcttgtttggggattgcttcttgctgtggctgtaggcctgcccaggaagaggagctga

SEQ ID NO: 3892 - DNA, 738 bp, Homo sapiens
  source 1..738: mol_type = unassigned DNA
atggtggattttccaggctacaatctgtctggtgcagtcgcctccttcctattcatcctgctgacaatgaagcagtcagagaaactccagactgagctggcttctttaaaagtgaatggaccttcccagcccatcctcgtcagagtgggagaagatatacagctaacctgttacctgtcccccaaggcgaatgcacagagcatggaggtgaggtgggaccgatcccaccgttaccctgctgtgcatgtgtatatggatggggaccatgtggctggagagcagatggcagagtacagagggaggactgtactggtgagtgacgccattgacgagggcagactgaccctgcagatactcagtgccagaccttcggacgacgggcagtaccgctgcctttttgaaaaagatgatgtctaccaggaggccagtttggatctgaaggtggtaagtctgggttcttccccactgatcactgtggaggggcaagaagatggagaaatgcagccgatgtgctcttcagatgggtggttcccacagccccacgtgccatggagggacatggaaggaaagacgataccatcatcttcccaggccctgactcaaggcagccacgggctgttccacgtgcagacattgctaagggtcacaaacatctccgctgtggacgtcacttgttccatcagcatcccctttttgggcgaggagaaaatcgcaactttttctctctcaggttggtga

SEQ ID NO: 3893 - DNA, 333 bp, Homo sapiens
  source 1..333: mol_type = unassigned DNA
agggaggatggtggattttccaggctacaatctgtctggtgcagtcgcctccttcctattcatcctgctgacaatgaagcagtcagactttagagtcattggccctgctcatcctatcctggccggggttggggaagatgccctgttaacctgccagctactccccaagaggaccacaatgcacgtggaggtgaggtggtaccgctcagagcccagcacacctgtgtttgtgcacagggatggagtggaggtgactgagatgcagatggaggagtacagaggctgggtagagtggatagagaatggcattgcaaagggaaatgtggcactgaa

SEQ ID NO: 3894 - DNA, 784 bp, Homo sapiens
  source 1..784: mol_type = unassigned DNA
agggaggatggtggattttccaggctacaatctgtctggtgcagtcgcctccttcctattcatcctgctgacaatgaagcagtcagaagactttagagtcattggccctgctcatcctatcctggccggggttggggaagatgccctgttaacctgccagctactccccaagaggaccacaatgcacgtggaggtgaggtggtaccgctcagagcccagcacacctgtgtttgtgcacagggatggagtggaggtgactgagatgcagatggaggagtacagaggctgggtagagtggatagagaatggcattgcaaagggaaatgtggcactgaagatacacaacatccagccctccgacaatggacaatactggtgccatttccaggatgggaactactgtggagaaacaagcttgctgctcaaagtagcaggtctggggtctgcccctagcatccacatggagggacctggggagagtggagtccagcttgtgtgcactgcaaggggctggttcccagagccccaggtgtattgggaagacatccggggagagaagctgctggccgtgtctgagcatcgcatccaagatgaagatggcctgttctatgcggaagccaccctggtggtcaggaacgcctctgcagagtctgtgtcctgcttggtccacaaccccgtcctcactgaggagaaggggtcggtcatcagcctcccagagaaactccagactgagctgggtaagtacgaggtgctggcacacacctgtggagggagcctctgccct

SEQ ID NO: 3895 - DNA, 784 bp, Homo sapiens
  source 1..784: mol_type = unassigned DNA
agggaggatggtggattttccaggctacaatctgtctggtgcagtcgcctccttcctattcatcctgctgacaatgaagcagtcagaagactttagagtcattggccctgctcatcctatcctggccggggttggggaagatgccctgttaacctgccagctactccccaagaggaccacaatgcacgtggaggtgaggtggtaccgctcagagcccagcacacctgtgtttgtgcacagggatggagtggaggtgactgagatgcagatggaggagtacagaggctgggtagagtggatagagaatggcattgcaaagggaaatgtggcactgaagatacacaacatccagccctccgacaatggacaatactggtgccatttccaggatgggaactactgtggagaaacaagcttgctgctcaaagtagcaggtctggggtctgcccctagcatccacatggagggacctggggagagtggagtccagcttgtgtgcactgcaaggggctggttcccagagccccaggtgtattgggaagacatccggggagagaagctgctggccgtgtctgagcatcgcatccaagataaagatggcctgttctatgcggaagccaccctggtggtcaggaacgcctctgcagagtctgtgtcctgcttggtccacaaccccgtcctcactgaggagaaggggtcggtcatcagcctcccagagaaactccagactgagctgggtaagtacgaggtgctggcacacacctgtggagggagcctctgccct

SEQ ID NO: 3896 - DNA, 688 bp, Homo sapiens
  source 1..688: mol_type = unassigned DNA
aaggcgaatgcacagagcatggaggtgaggtgggaccgatcccaccgttaccctgctgtgcatgtgtatatggatggggaccatgtggctggagagcagatggcagagtacagagggaggactgtactggtgagtgacgccattgacgagggcagactgaccctgcagatactcagtgccagaccttcggacgacgggcagtaccgctgcctttttgaaaaagatgatgtctaccaggaggccagtttggatctgaaggtggtaagtctgggttcttccccactgatcactgtggaggggcaagaagatggagaaatgcagccgatgtgctcttcagatgggtggttcccacagccccacgtgccatggagggacatggaaggaaagacgataccatcatcttcccaggccctgactcaaggcagccacgggctgttccacgtgcagacattgctaagggtcacaaacatctccgctgtggacgtcacttgttccatcagcatcccctttttgggcgaggagaaaatcgcaactttttctctctcagagtccaggatgacatttttgtggaaaacactgcttgtttggggattgcttcttgctgtggctgtaggcctgcccaggaagaggagctgaaaagaggtaagttctctggacattttttctgtacccacaagaacatctccaa

SEQ ID NO: 3897 - DNA, 784 bp, Homo sapiens; identical to SEQ ID NO: 3895
  source 1..784: mol_type = unassigned DNA

SEQ ID NO: 3898 - DNA, 333 bp, Homo sapiens; identical to SEQ ID NO: 3893
  source 1..333: mol_type = unassigned DNA

SEQ ID NO: 3899 - DNA, 333 bp, Homo sapiens; identical to SEQ ID NO: 3893
  source 1..333: mol_type = unassigned DNA

SEQ ID NO: 3900 - DNA, 688 bp, Homo sapiens
  source 1..688: mol_type = unassigned DNA
aaggcgaatgcacagagcatggaggtgaggtgggaccgatcccaccgttaccctgctgtgcatgtgtatatggatggggaccatgtggctggagagcagatggcagagtacagagggaggactgtgctggtgagtgacgccattgacgagggcagactgaccctgcagatactcagtgccagaccttcggacgacgggcagtaccgctgcctttttgaaaaagatgatgtctaccaagaggccagtttggatctgaaggtggtaggtctgggttcttccccactgatcactgtggaggggcaagaagatggagaaatgcagccgatgtgctcttcagatgggtggttcccacagccccacgtgccatggagggacatggaaggaaagacgataccatcatcttcccaggccctgactcaaggcagccacgggctgttccacgtgcagacattgctaagggtcacaaacatctccgctgtggacgtcacttgttccatcagcatcccctttttgggcgaggagaaaatcgcaactttttctctctcagagtccaggatgacgtttttgtggaaaacactgcttgtttggggattgcttcttgctgtggctgtaggcctgcccaggaagaggagctgaaaagaggtaagttctctggacattttttctgtacccacaagaacatctccaa

SEQ ID NO: 3901 - DNA, 1085 bp, Homo sapiens
  source 1..1085: mol_type = unassigned DNA
atggtggattttccaggctacaatctgtctggtgcagtcgcctccttcctattcatcctgctgacaatgaagcagtcagaagactttagagtcattggccctgctcatcctatcctggccggggttggggaagatgccctgttaacctgccagctactccccaagaggaccacaatgcacgtggaggtgaggtggtaccgctcagagcccagcacacctgtgtttgtgcacagggatggagtggaggtgactgagatgcagatggaggagtacagaggctgggtagagtggatagagaatggcattgcaaagggaaatgtggcactgaagatacacaacatccagccctccgacaatggacaatactggtgccatttccaggatgggaactactgtggagaaacaagcttgctgctcaaagtagcagctgttcttagagatgacattattgcttctttaaaagtgaatggaccttcccagcccatcctcgtcagagtgggagaagatatacagctaacctgttacctgtcccccaaggcgaatgcacagagcatggaggtgaggtgggaccgatcccaccgttaccctgctgtgcatgtgtatatggatggggaccatgtggctggagagcagatggcagagtacagagggaggactgtactggtgagtgacgccattgacgagggcagactgaccctgcagatactcagtgccagaccttcggacgacgggcagtaccgctgcctttttgaaaaagatgatgtctaccaggaggccagtttggatctgaaggtggtctgggttcttccccactgatcactgtggaggggcaagaagatggagaaatgcagccgatgtgctcttcagatgggtggttcccacagccccacgtgccatggagggacatggaaggaaagacgataccatcatcttcccaggccctgactcaaggcagccacgggctgttccacgtgcagacattgctaagggtcacaaacatctccgctgtggacgtcacttgttccatcagcatcccctttttgggcgaggagaaaatcgcaactttttctctctcaggttggtga

SEQ ID NO: 3902 - DNA, 333 bp, Homo sapiens; identical to SEQ ID NO: 3893
  source 1..333: mol_type = unassigned DNA

SEQ ID NO: 3903 - DNA, 784 bp, Homo sapiens; identical to SEQ ID NO: 3894
  source 1..784: mol_type = unassigned DNA

SEQ ID NO: 3904 - DNA, 333 bp, Homo sapiens; identical to SEQ ID NO: 3893
  source 1..333: mol_type = unassigned DNA

SEQ ID NO: 3905 - DNA, 688 bp, Homo sapiens; identical to SEQ ID NO: 3900
  source 1..688: mol_type = unassigned DNA

SEQ ID NO: 3906 - DNA, 784 bp, Homo sapiens; identical to SEQ ID NO: 3894
  source 1..784: mol_type = unassigned DNA

SEQ ID NO: 3907 - DNA, 784 bp, Homo sapiens; identical to SEQ ID NO: 3895
  source 1..784: mol_type = unassigned DNA

SEQ ID NO: 3908 - DNA, 333 bp, Homo sapiens; identical to SEQ ID NO: 3893
  source 1..333: mol_type = unassigned DNA

SEQ ID NO: 3909 - DNA, 784 bp, Homo sapiens; identical to SEQ ID NO: 3895
  source 1..784: mol_type = unassigned DNA

SEQ ID NO: 3910 - DNA, 688 bp, Homo sapiens; identical to SEQ ID NO: 3900
  source 1..688: mol_type = unassigned DNA

SEQ ID NO: 3911 - DNA, 688 bp, Homo sapiens
  source 1..688: mol_type = unassigned DNA
aaggcgaatgcacagagcatggaggtgaggtgggaccgatcccaccgttaccctgctgtgcatgtgtatatggatggggaccatgtggctggagagcagatggcagagtacagagggaggactgtactggtgagtgacgccattgacgagggcagactgaccctgcagatactcagtgccagaccttcggacgacgggcagtaccgctgcctttttgaaaaagatgatgtctaccaggaggccagtttggatctgaaggtggtaagtctgggttcttccccactgatcactgtggaggggcaagaagatggagaaatgcagccgatgtgctcttcagatgggtggttcccacagccccacgtgccatggagggacatggaaggaaagacgataccatcatcttcccaggccctgactcaaggcagccacgggctgttccacgtgcagacattgctaagggtcacaaacatctccgctgtggacgtcacttgttccatcagcatcccctttttgggcgaggagaaaatcgcaactttttctctctcagagtccaggatgacgtttttgtggaaaacactgcttgtttggggattgcttcttgctgtggctgtaggcctgcccaggaagaggagctgaaaagaggtaagttctctggacattttttctgtacccacaagaacatctccaa

SEQ ID NO: 3912 - DNA, 688 bp, Homo sapiens; identical to SEQ ID NO: 3911
  source 1..688: mol_type = unassigned DNA

SEQ ID NO: 3913 - DNA, 333 bp, Homo sapiens; identical to SEQ ID NO: 3893
  source 1..333: mol_type = unassigned DNA

SEQ ID NO: 3914 - DNA, 688 bp, Homo sapiens; identical to SEQ ID NO: 3911
  source 1..688: mol_type = unassigned DNA

SEQ ID NO: 3915 - DNA, 3182 bp, Homo sapiens
  source 1..3182: mol_type = unassigned DNA
gtccccggagtttcactgttgagaggattatagctgttaggaggtgaatgtgctattctgattttcagaatgcaatctcattttcacagggcctccgggatttggctctgccttcaactggggtgagacggcttaaatcctccttcacccaaagtcctggaggaggcctccacactctctggctctcccacagttctgtctttgatcagcacaccccagggctctgacctgtttctgaccacctgctatgtggatgaagatacatctggggctaaggaggatggtggattttccaggctacaatctgtctggtgcagtcgcctccttcctattcatcctgctgacaatgaagcagtcagaagactttagagtcattggccctgctcatcctatcctggccggggttggggaagatgccctgttaacctgccagctactccccaagaggaccacaatgcacgtggaggtgaggtggtaccgctcagagcccagcacacctgtgtttgtgcacagggatggagtggaggtgactgagatgcagatggaggagtacagaggctgggtagagtggatagagaatggcattgcaaagggaaatgtggcactgaagatacacaacatccagccctccgacaatggacaatactggtgccatttccaggatgggaactactgtggagaaacaagcttgctgctcaaagtagcaggtctggggtctgcccctagcatccacatggagggacctggggagagtggagtccagcttgtgtgcactgcaaggggctggttcccagagccccaggtgtattgggaagacatccggggagagaagctgctggccgtgtctgagcatcgcatccaagataaagatggcctgttctatgcggaagccaccctggtggtcaggaacgcctctgcagagtctgtgtcctgcttggtccacaaccccgtcctcactgaggagaaggggtcggtcatcagcctcccagagaaactccagactgagctggcttctttaaaagtgaatggaccttcccagcccatcctcgtcagagtgggagaagatatacagctaacctgttacctgtcccccaaggcgaatgcacagagcatggaggtgaggtgggaccgatcccaccgttaccctgctgtgcatgtgtatatggatggggaccatgtggctggagagcagatggcagagtacagagggaggactgtactggtgagtgacgccattgacgagggcagactgaccctgcagatactcagtgccagaccttcggacgacgggcagtaccgctgcctttttgaaaaagatgatgtctaccaggaggccagtttggatctgaaggtggtaagtctgggttcttccccactgatcactgtggaggggcaagaagatggagaaatgcagccgatgtgctcttcagatgggtggttcccacagccccacgtgccatggagggacatggaaggaaagacgataccatcatcttcccaggccctgactcaaggcagccacgggctgttccacgtgcagacattgctaagggtcacaaacatctccgctgtggacgtcacttgttccatcagcatcccctttttgggcgaggagaaaatcgcaactttttctctctcagagtccaggatgacgtttttgtggaaaacactgcttgtttggggattgcttcttgctgtggctgtaggcctgcccaggaagaggagctgaaaagaggttctctggacattttttctgtacccacaagaacatctccaacgtatcaggaaaataacaatctgggattctggaaaccagaatgatattctgagtcctgatcatttctcatttctctaactgcttgaagggggctgccatgatcattgaagtactaactcaaggtgttttaattctactcaggaaaatctgctggagactgatcttttcagagacctatcctgttccaggttctctgagatccggcctatcaatcacaatctgacatctgataatcaaggacccttagaaaatcccatgggaaatacaatttagcctacaggaagaaatgaaaggaataatcaaggatttggtcagtttctttttttttttttttttcttttctttttttttttttttttttttttctgagacaaagtctcactctgtcacccaggctggagtgcagtggcatgatctcagctgactgcaacctctgcctcccgggttcaagcaattctcttgcctcagtctcatgagtagctgggattacaggcatgtgccaccatgcccagcctatttttgtatttttagtagagatggggtttcactttgttggccaggctggtctcaaacttctggcctcaaatgatccactcgcctcggcctcccaaagtgctggaattacaggcatgagccaccacacctggcctgatcagtttatttaagatggtgacaattaattgtccacataggtggaactgagaaaataaaaaatatatatatacagttaaaaaaaagtgaaagaaaatacagctgcataagggggagaaaaatctgatcactaaaatataatcttgaaaatcttatgaagtgttgtaaaatccctcctccagactttttgagaaagttgatacaggaaattgagtcaggaaaaaaattttacactttccgatccaagcgaaaaattatgtatcatctatacgaacatgtcaattttattgttagagcaaaataaagtgcacaatttaaaattaataattataaaataaacaaatataagcagtacatgtaacacagtaaaaatattttaaagttataatgagttcaagaagataaactatatgtggaagacagaagaatgtcaacaagacttttggaaagaatgttatgaagtgagaagacgaggacctgctagtgacgctctgctgctctccaggatggcagacgtcagaggcatcgcggtcccatgcggatcactcatgaacagcactctgaacttgctcttctgggccatcatttttttttctatttttaaactcataaatttaaacacataaatgttagaaactacacattattcttccacaaatgtttacacattaattttaataaacatttttttcaattgtggtaaaatacataacataaaataaaaccctttaaccattttaaagtgtacagttct

SEQ ID NO: 3916 - DNA, 738 bp, Homo sapiens
  source 1..738: mol_type = unassigned DNA
atggtggattttccaggctacaatctgtctggtgcagtcgcctccttcctattcatcctgctgacaatgaagcagtcagacaggctggacaccccaaaagcttctttaaaagtgaatggaccttcccagcccatcctcgtcagagtgggagaagatatacagctaacctgttacctgtcccccaaggcgaatgcacagagcatggaggtgaggtgggaccgatcccaccgttaccctgctgtgcatgtgtatatggatggggaccatgtggctggagagcagatggcagagtacagagggaggactgtactggtgagtgacgccattgacgagggcagactgaccctgcagatactcagtgccagaccttcggacgacgggcagtaccgctgcctttttgaaaaagatgatgtctaccaggaggccagtttggatctgaaggtggtaagtctgggttcttccccactgatcactgtggaggggcaagaagatggagaaatgcagccgatgtgctcttcagatgggtggttcccacagccccacgtgccatggagggacatggaaggaaagacgataccatcatcttcccaggccctgactcaaggcagccacgggctgttccacgtgcagacattgctaagggtcacaaacatctccgctgtggacgtcacttgttccatcagcatcccctttttgggcgaggagaaaatcgcaactttttctctctcaggttggtga

SEQ ID NO: 3917 - DNA, 845 bp, Homo sapiens
  source 1..845: mol_type = unassigned DNA
atggtggattttccaggctacaatctgtctggtgcagtcgcctccttcctattcatcctgctgacaatgaagcagtcagaagactttagagtcattggccctgctcatcctatcctggccggggttggggaagatgccctgttaacctgccagctactccccaagaggaccacaatgcacgtggagagaaactccagactgagctggcttctttaaaagtgaatggaccttcccagcccatcctcgtcagagtgggagaagatatacagctaacctgttacctgtcccccaaggcgaatgcacagagcatggaggtgaggtgggaccgatcccaccgttaccctgctgtgcatgtgtatatggatggggaccatgtggctggagagcagatggcagagtacagagggaggactgtactggtgagtgacgccattgacgagggcagactgaccctgcagatactcagtgccagaccttcggacgacgggcagtaccgctgcctttttgaaaaagatgatgtctaccaggaggccagtttggatctgaaggtggtaagtctgggttcttccccactgatcactgtggaggggcaagaagatggagaaatgcagccgatgtgctcttcagatgggtggttcccacagccccacgtgccatggagggacatggaaggaaagacgataccatcatcttcccaggccctgactcaaggcagccacgggctgttccacgtgcagacattgctaagggtcacaaacatctccgctgtggacgtcacttgttccatcagcatcccctttttgggcgaggagaaaatcgcaactttttctctctcaggttggtga

SEQ ID NO: 3918 - DNA, 1167 bp, Homo sapiens; identical to SEQ ID NO: 3891
  source 1..1167: mol_type = unassigned DNA

SEQ ID NO: 3919 - DNA, 1167 bp, Homo sapiens
  source 1..1167: mol_type = unassigned DNA
atggtggattttccaggctacaatctgtctggtgcagtcgcctccttcctattcatcctgctgacaatgaagcagtcagaagactttagagtcattggccctgctcatcctatcctggccggggttggggaagatgccctgttaacctgccagctactccccaagaggaccacaatgcacgtggaggtgaggtggtaccgctcagagcccagcacacctgtgtttgtgcacagggatggagtggaggtgactgagatgcagatggaggagtacagaggctgggtagagtggatagagaatggcattgcaaagggaaatgtggcactgaagatacacaacatccagccctccgacaatggacaatactggtgccatttccaggatgggaactactgtggagaaacaagcttgctgctcaaagtagcagagaagctgctggccgttctgtcttctttaaaagtgaatggaccttcccagcccatcctcgtcagagtgggagaagatatacagctaacctgttacctgtcccccaaggcgaatgcacagagcatggaggtgaggtgggaccgatcccaccgttaccctgctgtgcatgtgtatatggatggggaccatgtggctggagagcagatggcagagtacagagggaggactgtgctggtgagtgacgccattgacgagggcagactgaccctgcagatactcagtgccagaccttcggacgacgggcagtaccgctgcctttttgaaaaagatgatgtctaccaagaggccagtttggatctgaaggtggtaggtctgggttcttccccactgatcactgtggaggggcaagaagatggagaaatgcagccgatgtgctcttcagatgggtggttcccacagccccacgtgccatggagggacatggaaggaaagacgataccatcatcttcccaggccctgactcaaggcagccacgggctgttccacgtgcagacattgctaagggtcacaaacatctccgctgtggacgtcacttgttccatcagcatcccctttttgggcgaggagaaaatcgcaactttttctctctcagagtccaggatgacgtttttgtggaaaacactgcttgtttggggattgcttcttgctgtggctgtaggcctgcccaggaagaggagctga

SEQ ID NO: 3920 - DNA, 1167 bp, Homo sapiens; identical to SEQ ID NO: 3891
  source 1..1167: mol_type = unassigned DNA

SEQ ID NO: 3921 - DNA, 738 bp, Homo sapiens
  source 1..738: mol_type = unassigned DNA
atggtggattttccaggctacaatctgtctggtgcagtcgcctccttcctattcatcctgctgacaatgaagcagtcagacaggctggacaccccaaaagcttctttaaaagtgaatggaccttcccagcccatcctcgtcagagtgggagaagatatacagctaacctgttacctgtcccccaaggcgaatgcacagagcatggaggtgaggtgggaccgatcccaccgttaccctgctgtgcatgtgtatatggatggggaccatgtggctggagagcagatggcagagtacagagggaggactgtgctggtgagtgacgccattgacgagggcagactgaccctgcagatactcagtgccagaccttcggacgacgggcagtaccgctgcctttttgaaaaagatgatgtctaccaagaggccagtttggatctgaaggtggtaggtctgggttcttccccactgatcactgtggaggggcaagaagatggagaaatgcagccgatgtgctcttcagatgggtggttcccacagccccacgtgccatggagggacatggaaggaaagacgataccatcatcttcccaggccctgactcaaggcagccacgggctgttccacgtgcagacattgctaagggtcacaaacatctccgctgtggacgtcacttgttccatcagcatcccctttttgggcgaggagaaaatcgcaactttttctctctcaggttggtga

SEQ ID NO: 3922 - DNA, 738 bp, Homo sapiens; identical to SEQ ID NO: 3916
  source 1..738: mol_type = unassigned DNA

SEQ ID NO: 3923 - DNA, 1167 bp, Homo sapiens
  source 1..1167: mol_type = unassigned DNA
atggtggattttccaggctacaatctgtctggtgcagtcgcctccttcctattcatcctgctgacaatgaagcagtcagaagactttagagtcattggccctgctcatcctatcctggccggggttggggaagatgccctgttaacctgccagctactccccaagaggaccacaatgcacgtggaggtgaggtggtaccgctcagagcccagcacacctgtgtttgtgcacagggatggagtggaggtgactgagatgcagatggaggagtacagaggctgggtagagtggatagagaatggcattgcaaagggaaatgtggcactgaagatacacaacatccagccctccgacaatggacaatactggtgccatttccaggatgggaactactgtggagaaacaagcttgctgctcaaagtagcagagaagctgctggccgttctgtcttctttaaaagtgaatggaccttcccagcccatcctcgtcagagtgggagaagatatacagctaacctgttacctgtcccccaaggcgaatgcacagagcatggaggtgaggtgggaccgatcccaccgttaccctgctgtgcatgtgtatatggatggggaccatgtggctggagagcagatggcagagtacagagggaggactgtactggtgagtgacgccattgacgagggcagactgaccctgcagatactcagtgccagaccttcggacgacgggcagtaccgctgcctttttgaaaaagatgatgtctaccaggaggccagtttggatctgaaggtggtaagtctgggttcttccccactgatcactgtggaggggcaagaagatggagaaatgcagccgatgtgctcttcagatgggtggttcccacagccccacgtgccatggagggacatggaaggaaagacgataccatcatcttcccaggccctgactcaaggcagccacgggctgttccacgtgcagacattgctaagggtcacaaacatctccgctgtggacgtcacttgttccatcagcatcccctttttgggcgaggagaaaatcgcaactttttctctctcagagtccaggatgacatttttgtggaaaacactgcttgtttggggattgcttcttgctgtggctgtaggcctgcccaggaagaggagctga

SEQ ID NO: 3924 - DNA, 1085 bp, Homo sapiens
  source 1..1085: mol_type = unassigned DNA
atggtggattttccaggctacaatctgtctggtgcagtcgcctccttcctattcatcctgctgacaatgaagcagtcagaagactttagagtcattggccctgctcatcctatcctggccggggttggggaagatgccctgttaacctgccagctactccccaagaggaccacaatgcacgtggaggtgaggtggtaccgctcagagcccagcacacctgtgtttgtgcacagggatggagtggaggtgactgagatgcagatggaggagtacagaggctgggtagagtggatagagaatggcattgcaaagggaaatgtggcactgaagatacacaacatccagccctccgacaatggacaatactggtgccatttccaggatgggaactactgtggagaaacaagcttgctgctcaaagtagcagctgttcttagagatgacattattgcttctttaaaagtgaatggaccttcccagcccatcctcgtcagagtgggagaagatatacagctaacctgttacctgtcccccaaggcgaatgcacagagcatggaggtgaggtgggaccgatcccaccgttaccctgctgtgcatgtgtatatggatggggaccatgtggctggagagcagatggcagagtacagagggaggactgtgctggtgagtgacgccattgacgagggcagactgaccctgcagatactcagtgccagaccttcggacgacgggcagtaccgctgcctttttgaaaaagatgatgtctaccaagaggccagtttggatctgaaggtggtctgggttcttccccactgatcactgtggaggggcaagaagatggagaaatgcagccgatgtgctcttcagatgggtggttcccacagccccacgtgccatggagggacatggaaggaaagacgataccatcatcttcccaggccctgactcaaggcagccacgggctgttccacgtgcagacattgctaagggtcacaaacatctccgctgtggacgtcacttgttccatcagcatcccctttttgggcgaggagaaaatcgcaactttttctctctcaggttggtga

SEQ ID NO: 3925 - DNA, 738 bp, Homo sapiens
  source 1..738: mol_type = unassigned DNA
atggtggattttccaggctacaatctgtctggtgcagtcgcctccttcctattcatcctgctgacaatgaagcagtcagagaaactccagactgagctggcttctttaaaagtgaatggaccttcccagcccatcctcgtcagagtgggagaagatatacagctaacctgttacctgtcccccaaggcgaatgcacagagcatggaggtgaggtgggaccgatcccaccgttaccctgctgtgcatgtgtatatggatggggaccatgtggctggagagcagatggcagagtacagagggaggactgtgctggtgagtgacgccattgacgagggcagactgaccctgcagatactcagtgccagaccttcggacgacgggcagtaccgctgcctttttgaaaaagatgatgtctaccaagaggccagtttggatctgaaggtggtaggtctgggttcttccccactgatcactgtggaggggcaagaagatggagaaatgcagccgatgtgctcttcagatgggtggttcccacagccccacgtgccatggagggacatggaaggaaagacgataccatcatcttcccaggccctgactcaaggcagccacgggctgttccacgtgcagacattgctaagggtcacaaacatctccgctgtggacgtcacttgttccatcagcatcccctttttgggcgaggagaaaatcgcaactttttctctctcaggttggtga

SEQ ID NO: 3926 - DNA, 845 bp, Homo sapiens
  source 1..845: mol_type = unassigned DNA
atggtggattttccaggctacaatctgtctggtgcagtcgcctccttcctattcatcctgctgacaatgaagcagtcagaagactttagagtcattggccctgctcatcctatcctggccggggttggggaagatgccctgttaacctgccagctactccccaagaggaccacaatgcacgtggagagaaactccagactgagctggcttctttaaaagtgaatggaccttcccagcccatcctcgtcagagtgggagaagatatacagctaacctgttacctgtcccccaaggcgaatgcacagagcatggaggtgaggtgggaccgatcccaccgttaccctgctgtgcatgtgtatatggatggggaccatgtggctggagagcagatggcagagtacagagggaggactgtgctggtgagtgacgccattgacgagggcagactgaccctgcagatactcagtgccagaccttcggacgacgggcagtaccgctgcctttttgaaaaagatgatgtctaccaagaggccagtttggatctgaaggtggtaggtctgggttcttccccactgatcactgtggaggggcaagaagatggagaaatgcagccgatgtgctcttcagatgggtggttcccacagccccacgtgccatggagggacatggaaggaaagacgataccatcatcttcccaggccctgactcaaggcagccacgggctgttccacgtgcagacattgctaagggtcacaaacatctccgctgtggacgtcacttgttccatcagcatcccctttttgggcgaggagaaaatcgcaactttttctctctcaggttggtga

SEQ ID NO: 3927 - DNA, 738 bp, Homo sapiens; identical to SEQ ID NO: 3916
  source 1..738: mol_type = unassigned DNA

SEQ ID NO: 3928 - DNA, 1368 bp, Homo sapiens
  source 1..1368: mol_type = unassigned DNA
atggtggattttccaggctacaatctgtctggtgcagtcgcctccttcctattcatcctgctgacaatgaagcagtcagaagactttagagtcattggccctgctcatcctatcctggccggggttggggaagatgccctgttaacctgccagctactccccaagaggaccacaatgcacgtggaggtgaggtggtaccgctcagagcccagcacacctgtgtttgtgcacagggatggagtggaggtgactgagatgcagatggaggagtacagaggctgggtagagtggatagagaatggcattgcaaagggaaatgtggcactgaagatacacaacatccagccctccgacaatggacaatactggtgccatttccaggatgggaactactgtggagaaacaagcttgctgctcaaagtagcaggtctggggtctgcccctagcatccacatggagggacctggggagagtggagtccagcttgtgtgcactgcaaggggctggttcccagagccccaggtgtattgggaagacatccggggagagaagctgctggccgtgtctgagcatcgcatccaagatgaagatggcctgttctatgcggaagccaccctggtggtcaggaacgcctctgcagagtctgtgtcctgcttggtccacaaccccgtcctcactgaggagaaggggtcggtcatcagcctcccagagaaactccagactgagctggcttctttaaaagtgaatggaccttcccagcccatcctcgtcagagtgggagaagatatacagctaacctgttacctgtcccccaaggcgaatgcacagagcatggaggtgaggtgggaccgatcccaccgttaccctgctgtgcatgtgtatatggatggggaccatgtggctggagagcagatggcagagtacagagggaggactgtgctggtgagtgacgccattgacgagggcagactgaccctgcagatactcagtgccagaccttcggacgacgggcagtaccgctgcctttttgaaaaagatgatgtctaccaagaggccagtttggatctgaaggtggtaggtctgggttcttccccactgatcactgtggaggggcaagaagatggagaaatgcagccgatgtgctcttcagatgggtggttcccacagccccacgtgccatggagggacatggaaggaaagacgataccatcatcttcccaggccctgactcaaggcagccacgggctgttccacgtgcagacattgctaagggtcacaaacatctccgctgtggacgtcacttgttccatcagcatcccctttttgggcgaggagaaaatcgcaactttttctctctcaggttggtga

SEQ ID NO: 3929 - DNA, 1085 bp, Homo sapiens; identical to SEQ ID NO: 3901
  source 1..1085: mol_type = unassigned DNA

SEQ ID NO: 3930 - DNA, 1085 bp, Homo sapiens; identical to SEQ ID NO: 3924
  source 1..1085: mol_type = unassigned DNA

SEQ ID NO: 3931 - DNA, 738 bp, Homo sapiens; identical to SEQ ID NO: 3916
  source 1..738: mol_type = unassigned DNA

SEQ ID NO: 3932 - DNA, 1085 bp, Homo sapiens; identical to SEQ ID NO: 3901
  source 1..1085: mol_type = unassigned DNA

SEQ ID NO: 3933 - DNA, 738 bp, Homo sapiens; identical to SEQ ID NO: 3921
  source 1..738: mol_type = unassigned DNA

SEQ ID NO: 3934 - DNA, 738 bp, Homo sapiens; identical to SEQ ID NO: 3916
  source 1..738: mol_type = unassigned DNA

SEQ ID NO: 3935 - DNA, 1368 bp, Homo sapiens; identical to SEQ ID NO: 3890
  source 1..1368: mol_type = unassigned DNA

SEQ ID NO: 3936 - DNA, 1368 bp, Homo sapiens; identical to SEQ ID NO: 3890
  source 1..1368: mol_type = unassigned DNA

SEQ ID NO: 3937 - DNA, 845 bp, Homo sapiens; identical to SEQ ID NO: 3917
  source 1..845: mol_type = unassigned DNA

SEQ ID NO: 3938 - DNA, 1368 bp, Homo sapiens; identical to SEQ ID NO: 3890
  source 1..1368: mol_type = unassigned DNA

SEQ ID NO: 3939 - DNA, 1085 bp, Homo sapiens; identical to SEQ ID NO: 3901
  source 1..1085: mol_type = unassigned DNA

SEQ ID NO: 3940 - DNA, 1368 bp, Homo sapiens; identical to SEQ ID NO: 3928
  source 1..1368: mol_type = unassigned DNA

SEQ ID NO: 3941 - DNA, 1368 bp, Homo sapiens; identical to SEQ ID NO: 3928
  source 1..1368: mol_type = unassigned DNA

SEQ ID NO: 3942 - DNA, 1085 bp, Homo sapiens; identical to SEQ ID NO: 3924
  source 1..1085: mol_type = unassigned DNA

SEQ ID NO: 3943 - DNA, 845 bp, Homo sapiens; identical to SEQ ID NO: 3926
  source 1..845: mol_type = unassigned DNA

SEQ ID NO: 3944 - DNA, 738 bp, Homo sapiens; identical to SEQ ID NO: 3925
  source 1..738: mol_type = unassigned DNA

SEQ ID NO: 3945 - DNA, 738 bp, Homo sapiens; identical to SEQ ID NO: 3892
  source 1..738: mol_type = unassigned DNA

SEQ ID NO: 3946 - DNA, 1167 bp, Homo sapiens; identical to SEQ ID NO: 3891
  source 1..1167: mol_type = unassigned DNA

SEQ ID NO: 3947 - DNA, 1368 bp, Homo sapiens; identical to SEQ ID NO: 3890
  source 1..1368: mol_type = unassigned DNA

SEQ ID NO: 3948 - DNA, 1167 bp, Homo sapiens; identical to SEQ ID NO: 3919
  source 1..1167: mol_type = unassigned DNA

SEQ ID NO: 3949 - DNA, 738 bp, Homo sapiens; identical to SEQ ID NO: 3921
  source 1..738: mol_type = unassigned DNA

SEQ ID NO: 3950 - DNA, 1085 bp, Homo sapiens; identical to SEQ ID NO: 3901
  source 1..1085: mol_type = unassigned DNA

SEQ ID NO: 3951 - DNA, 1167 bp, Homo sapiens; identical to SEQ ID NO: 3919
  source 1..1167: mol_type = unassigned DNA

SEQ ID NO: 3952 - DNA, 2440 bp, Homo sapiens
  source 1..2440: mol_type = unassigned DNA
catactcctcattcatacagccatgtttagggaggctctagggagaaatgcacagtttgacatcgttcatgaagagcctctccacggctcctgcgcctgagacagctggcctgacctccaaatcatccatccacccctgctgtcatctgttttcatagtgtgagatcaacccacaggaatatccatggcttttgtgctcattttggttctcagtttctacgagctggtgtcaggacagtggcaagtcactggaccgggcaagtttgtccaggccttggtgggggaggacgccgtgttctcctgctccctctttcctgagaccagtgcagaggctatggaagtgcggttcttcaggaatcagttccatgctgtggtccacctctacagagatggggaagactgggaatctaagcagatgccacagtatcgagggagaactgagtttgtgaaggactccattgcaggggggcgtgtctctctaaggctaaaaaacatcactccctcggacatcggcctgtatgggtgctggttcagttcccagatttacgatgaggaggccacctgggagctgcgggtggcagcactgggctcacttcctctcatttccatcgtgggatatgttgacggaggtatccagttactctgcctgtcctcaggctggttcccccagcccacagccaagtggaaaggtccacaaggacaggatttgtcttcagactccagagcaaatgcagatgggtacagcctgtatgatgtggagatctccattatagtccaggaaaatgctgggagcatattgtgttccatccaccttgctgagcagagtcatgaggtggaatccaaggtattgataggagagacgtttttccagccctcaccttggcgcctggcttctattttactcgggttactctgtggtgccctgtgtggtgttgtcatggggatgataattgttttcttcaaatccaaagggaaaatccaggcggaactggactggagaagaaagcacggacaggcagaattgagagacgcccggaaacacgcagtggaggtgactctggatccagagacggctcacccgaagctctgcgtttctgatctgaaaactgtaacccatagaaaagctccccaggaggtgcctcactctgagaagagatttacaaggaagagtgtggtggcttctcagggtttccaagcagggaaacattactgggaggtggacgtgggacaaaatgtagggtggtatgtgggagtgtgtcgggatgacgtagacagggggaagaacaatgtgactttgtctcccaacaatgggtattgggtcctcagactgacaacagaacatttgtatttcacattcaatccccattttatcagcctcccccccagcacccctcctacacgagtaggggtcttcctggactatgagggtgggaccatctccttcttcaatacaaatgaccagtcccttatttataccctgctgacatgtcagtttgaaggcttgttgagaccctatatccagcatgcgatgtatgacgaggaaaaggggactcccatattcatatgtccagtgtcctggggatgagacagagaagaccctgcttaaagggccccacaccacagacccagacacagccaagggagagtgctcccgacaggtggccccagcttcctctccggagcctgcgcacagagagtcacgccccccactctcctttagggagctgaggttcttctgccctgagccctgcagcagcggcagtcacagcttccagatgaggggggattggcctgaccctgtgggagtcagaagccatggctgccctgaagtggggacggaatagactcacattaggtttagtttgtgaaaactccatccagctaagcgatcttgaacaagtcacaacctcccaggctcctcatttgctagtcacggacagtgattcctgcctcacaggtgaagattaaagagacaacgaatgtgaatcatgcttgcaggtttgagggcacagtgtttgctaatgatgtgtttttatattatacattttcccaccataaactctgtttgcttattccacattaatttacttttctctataccaaatcacccatggaatagttattgaacacctgctttgtgaggctcaaagaataaagaggaggtaggatttttcactgattctataagcccagcattacctgataccaaaaccaggcaaagaaaacagaagaagaggaaggaaaactacaggtccatatccctcattaacacagacacaaaaattctaaataaaattttaacaaattaaactaaacaatatatttaaagatgatatataactactcagtgtggtttgtcccacaaatgcagagttggtttaatatttaaatatcaaccagtgtaattcagcacattaataaagtaaaaaagaaaaccata

SEQ ID NO: 3953 - DNA, 2266 bp, Homo sapiens
  source 1..2266: mol_type = unassigned DNA
ttgacatcgttcatgaagagcctctccacggctcctgcgcctgagacagctggcctgacctccaaatcatccatccacccctgctgtcatctgttttcatagtgtgagatcaacccacaggaatatccatggcttttgtgctcattttggttctcagtttctacgagctggtgtcaggacagtggcaagtcactggaccgggcaagtttgtccaggccttggtgggggaggacgccgtgttctcctgctccctctttcctgagaccagtgcagaggctatggaagtgcggttcttcaggaatcagttccatgctgtggtccacctctacagagatggggaagactgggaatctaagcagatgccacagtatcgagggagaactgagtttgtgaaggactccattgcaggggggcgtgtctctctaaggctaaaaaacatcactccctcggacatcggcctgtatgggtgctggttcagttcccagatttacgatgaggaggccacctgggagctgcgggtggcagcactgggctcacttcctctcatttccatcgtgggatatgttgacggaggtatccagttactctgcctgtcctcagtccagccctcaccttggcgcctggcttctattttactcgggttactctgtggtgccctgtgtggtgttgtcatggggatgataattgttttcttcaaatccaaagggaaaatccaggcggaactgggtatgtgtcatgtcctgagcctcccacacatggttctcccgggtccctccctgatccacagtttgagcctctggacgaccctggctgcaggctggacaggaagcaccgactggagaagaaagcacggacaggcagaattgagagacgcccggaaacacgcagtggaggtgactctggatccagagacggctcacccgaagctctgcgtttctgatctgaaaactgtaacccatagaaaagctccccaggaggtgcctcactctgagaagagatttacaaggaagagtgtggtggcttctcagggtttccaagcagggaaacattactgggaggtggacgtgggacaaaatgtagggtggtatgtgggagtgtgtcgggatgacgtagacagggggaagaacaatgtgactttgtctcccaacaatgggtattgggtcctcagactgacaacagaacatttgtatttcacattcaatccccattttatcagcctcccccccagcacccctcctacacgagtaggggtcttcctggactatgagggtgggaccatctccttcttcaatacaaatgaccagtcccttatttataccctgctgacatgtcagtttgaaggcttgttgagaccctatatccagcatgcgatgtatgacgaggaaaaggggactcccatattcatatgtccagtgtcctggggatgagacagagaagaccctgcttaaagggccccacaccacagacccagacacagccaagggagagtgctcccgacaggtggccccagcttcctctccggagcctgcgcacagagagtcacgccccccactctcctttagggagctgaggttcttctgccctgagccctgcagcagcggcagtcacagcttccagatgaggggggattggcctgaccctgtgggagtcagaagccatggctgccctgaagtggggacggaatagactcacattaggtttagtttgtgaaaactccatccagctaagcgatcttgaacaagtcacaacctcccaggctcctcatttgctagtcacggacagtgattcctgcctcacaggtgaagattaaagagacaacgaatgtgaatcatgcttgcaggtttgagggcacagtgtttgctaatgatgtgtttttatattatacattttcccaccataaactctgtttgcttattccacattaatttacttttctctataccaaatcacccatggaatagttattgaacacctgctttgtgaggctcaaagaataaagaggaggtaggatttttcactgattctataagcccagcattacctgataccaaaaccaggcaaagaaaacagaagaagaggaaggaaaactacaggtccatatccctcattaacacagacacaaaaattctaaataaaattttaacaaattaaactaaacaatatatttaaagatgatatataactactcagtgtggtttgtcccacaaatgcagagttggtttaatatttaaatatcaaccagtgtaattcagcacattaataaagt

SEQ ID NO: 3954 - DNA, 2454 bp, Homo sapiens
  source 1..2454: mol_type = unassigned DNA
gagctttgtcagtaacagttgattgttacattcagtaacactgaatgtcagtgcagtccaatttacaggctggagcagcagctgcatcctgcatttccccgaagtattacatgattttcactccttgcaaactttgccatctttgttgcagagaatcggaaatcaatatgcatagcaaagtcacaatcatatgcatcagatttctcttttggtttcttttgctctgcatgcttattgggaagtcacatactgaagatgacatcataattgcaacaaagaatggaaaagtcagagggatgaacttgacagtttttggtggcacggtaacagcctttcttggaattccctatgcacagccacctcttggtagacttcgattcaaaaagccacagtctctgaccaagtggtctgatatttggaatgccacaaaatatgcaaattcttgctgtcagaacatagatcaaagttttccaggcttccatggatcagagatgtggaacccaaacactgacctcagtgaagactgtttatatctaaatgtatggattccagcacctaaaccaaaaaatgccactgtattgatatggatttatggtggtggttttcaaactggaacatcatctttacatgtttatgatggcaagtttctggctcgggttgaaagagttattgtagtgtcaatgaactatagggtgggtgccctaggattcttagctttgccaggaaatcctgaggctccagggaacatgggtttatttgatcaacagttggctcttcagtgggttcaaaaaaatatagcagcctttggtggaaatcctaaaagtgtaactctctttggagaaagtgcaggagcagcttcagttagcctgcatttgctttctcctggaagccattcattgttcaccagagccattctgcaaagtggatcctttaatgctccttgggcggtaacatctctttatgaagctaggaacagaacgttgaacttagctaaattgactggttgctctagagagaatgagactgaaataatcaagtgtcttagaaataaagatccccaagaaattcttctgaatgaagcatttgttgtcccctatgggactcctttgtcagtaaactttggtccgaccgtggatggtgattttctcactgacatgccagacatattacttgaacttggacaatttaaaaaaacccagattttggtgggtgttaataaagatgaagggacagcttttttagtctatggtgctcctggcttcagcaaagataacaatagtatcataactagaaaagaatttcaggaaggtttaaaaatattttttccaggagtgagtgagtttggaaaggaatccatcctttttcattacacagactgggtagatgatcagagacctgaaaactaccgtgaggccttgggtgatgttgttggggattataatttcatatgccctgccttggagttcaccaagaagttctcagaatggggaaataatgcctttttctactattttgaacaccgatcctccaaacttccgtggccagaatggatgggagtgatgcatggctatgaaattgaatttgtctttggtttacctctggaaagaagagataattacacaaaagccgaggaaattttgagtagatccatagtgaaacggtgggcaaattttgcaaaatatgggaatccaaatgagactcagaacaatagcacaagctggcctgtcttcaaaagcactgaacaaaaatatctaaccttgaatacagagtcaacaagaataatgacgaaactacgtgctcaacaatgtcgattctggacatcattttttccaaaagtcttggaaatgacaggaaatattgatgaagcagaatgggagtggaaagcaggattccatcgctggaacaattacatgatggactggaaaaatcaatttaacgattacactagcaagaaagaaagttgtgtgggtctctaattaatagatttaccctttatagaacatattttcctttagatcaaggcaaaaatatcaggagcttttttacacacctactaaaaaagttattatgtagctgaaacaaaaatgccagaaggataatattgattcctcacatctttaacttagtattttacctagcatttcaaaacccaaatggctagaacgtgtttaattaaatttcacaatataaagttctacagttaattatgtgcatattaaaacaatggcctggttcaatttctttctttccttaataaatttaagtttttccccccaaaattatcagtgctctgcttttagtcacgtgtattttcattaccactcgtaaaaaggtatcttttttaaatgaattaaatattgaaacactgtacaccatagtttacaatattatgtttcctaattaaaataagaattgaatgtcaatatgagatattaaaataagcacagaaaatca

SEQ ID NO: 3955 - DNA, 702 bp, Homo sapiens
  source 1..702: mol_type = unassigned DNA
gcagtccaatttacaggctggagcagcagctgcatcctgcatttccccgaagtattacatgattttcactccttgcaaactttgccatctttgttgcagagaatcgggaatccaaatgagactcagaacaatagcacaagctggcctgtcttcaaaagcactgaacaaaaatatctaaccttgaatacagagtcaacaagaataatgacgaaactacgtgctcaacaatgtcgattctggacatcattttttccaaaagtcttggaaatgacaggaaatattgatgaagcagaatgggagtggaaagcaggattccatcgctggaacaattacatgatggactggaaaaatcaatttaacgattacactagcaagaaagaaagttgtgtgggtctctaattaatagatttaccctttatagaacatattttcctttagatcaaggcaaaaatatcaggagcttttttacacacctactaaaaaagttattatgtagctgaaacaaaaatgccagaaggataatattgattcctcacatctttaacttagtattttacctagcatttcaaaacccaaatggctagaacgtgtttaattaaatttcacaatataaagttctacagttaattatgtgcatattaaaacaatggcctggttcaatttctttctttccttaataaatttaagtttttccccccaaaa

SEQ ID NO: 3956 - DNA, 697 bp, Homo sapiens
  source 1..697: mol_type = unassigned DNA
gcagtccaatttacaggctggagcagcagctgcatcctgcatttccccgaagtattacatgattttcactccttgcaaactttgccatctttgttgcagagaatcgggaatccaaatgagactcagaacaatagcacaagctggcctgtcttcaaaagcactgaacaaaaatatctaaccttgaatacagagtcaacaagaataatgacgaaactacgtgctcaacaatgtcgattctggacatcattttttccaaaagtcttggaaatgacaggaaatattgatgaagcagaatgggagtggaaagcaggattccatcgctggaacaattacatgatggactggaaaaatcaatttaacgattacactagcaagaaagaaagttgtgtgggtctctaattaatagatttaccctttatagaacatattttcctttagatcaaggcaaaaatatcaggagcttttttacacacctactaaaaaagttattatgtagctgaaacaaaaatgccagaaggataatattgattcctcacatctttaacttagtattttacctagcatttcaaaacccaaatggctagaacgtgtttaattaaatttcacaatataaagttctacagttaattatgtgcatattaaaacaatggcctggttcaatttctttctttccttaataaatttaagtttttccccc

SEQ ID NO: 3957 - DNA, 2029 bp, Homo sapiens
  source 1..2029: mol_type = unassigned DNA
tctcggcacccctcggtgacgcctccactgacatcatctgcggattcccgccccgaggtttctaaatccagacattcccgtttggctgagcactctaggcctacatccatgaagctaggagagcgacactcaaagactgcactattgagagaagctaacgttaaaggcagtgaatatattcgggagtccagctccggaacccgggagctcttttagtgggaggggcggcgctgatggcgcttctggcctccgaatgctagggggcgctgtgatcgccgggcggcctcttgggcgctgggagtccaccgcgcaagcgcatcctggcctttcttcagtccccacgtgcgatccttcccggcaactttttcgagaaaaatgcccaaattcaaggcggcccgtggggtggggggtcaggaaaaacatgcgcccctggccgatcagatcctggctgggaatgcggtgcgggcgggggtccgggagaagcggcggggtcgcgggacaggagaagcggaggaagagtatgtggggccccggctgagccgacggattttgcagcaagcacggcagcaacaggaggaactcgaggccgagcatgggactggggacaagcccgcggcgccgcgggaacgcaccacgcggctgggtccaagaatgcctcaggatggatcagatgacgaggacgaggagtggcccaccctggagaaggctgccacaatgacagcagcgggccatcatgcagaggtggttgtggaccctgaggatgagcgtgccatagagatgttcatgaacaagaaccctcctgccaggcgcaccctggctgacatcatcatggagaagctgactgagaagcagacagaggttgagacagtcatgtcagaggtgtcgggcttccctatgccccagctggacccccgggtcctagaagtgtacaggggggtccgggaggtattatctaagtaccgcagtggaaaactgcccaaggcatttaagatcatccctgcactctccaactgggagcaaatcctctacgtcacagagccggaggcctggactgcagctgccatgtaccaggccaccaggatttttgcctctaacctgaaggaacgcatggcccagcgcttctacaaccttgtcctgctccctcgagtacgagatgacgttgctgaatacaaacgactcaacttccatctctacatggctctcaagaaggcccttttcaaacctggagcctggttcaaagggatcctgattccactgtgcgagtctggcacttgtaccctccgggaagccatcattgtgggtagcatcatcaccaagtgctccatccctgtgttgcactccagtgcggccatgctgaaaattgctgagatggaatacagcggtgccaacagcatcttcctgcgactgctgctggataagaagtatgcactgccttaccgggtgctggatgccctagtcttccacttcctggggttccggacagagaagcgtgaactgcctgtgctgtggcaccagtgcctcctgactttggtccagcgctacaaggccgacttggccacagaccagaaagaggccctcttagaactgctccggctgcagccccatccacagctatcgcccgaaatcaggcgtgagcttcagagtgcagtcccccgcgatgtggaagatgttcccatcaccgtggagtgaggaaaacagtcagctgtcctggccaaaggggtttggaaggacaccaagacccccgttggtgactgaagatgacactgagctttaatggctgaagacccagatcagggcagtgacagatcacagggacatctgtggctcccagtccaggacaggaaggactgagggtctggctggttccctcttccattctaggcccttatccctgtttagttctgagagccaacttgagataccatatgctagcattcccagtccccagctggggcttggtgtgagtactttttctatggctattgtgtcaggtcactgtggataaaggcaaagacagatatttattgaa

SEQ ID NO: 3958 - DNA, 2233 bp, Homo sapiens
  source 1..2233: mol_type = unassigned DNA
gggagactggagtcgaaggccgtgaggtatttttctaagtcagccataatggcaggtgaagaaattaatgaagactatccagtagaaattcacgagtatttgtcagcgtttgagaattccattggtgctgtggatgagatgctgaagaccatgatgtctgtttctagaaatgagttgttgcagaagttggatccacttgaacaagcaaaagtggatttggtttctgcatacacattaaattcaatgttttgggtttatttggcaacccaaggagttaatcctaaggaacatccagtaaaacaggaattggaaagaatcagagtatatatgaacagagtcaaggaaataacagacaagaaaaaggctggcaagctggacagaggtgcagcttcaagatttgtaaaaaatgccctctgggaaccaaaatcgaaaaatgcatcaaaagttgccaataaaggaaaaagtaaaagttaactttttggttttgatgtacacatattcaaaaagtacatcttcccccccccccccccccccgcaaaataattctgtggcagggcaaggtttaaatgtgtttcttattaatatgtaaattcacagtaaatatgtaaagctaaatactttcctctccaaagatcattatctttattgattagcactgaggattttaacattgtgatatattatatatttataatttaccatctcttgatgagactcttatttctttatataggtcagtcttgcaagtaccattttataagcagctgtgaaatttaagtgaaatgttctttgtaaacatttgtactattttaaatgaataatgaccttatgaagtatgctatctgtaggctgaaattataggtacatctgttttcactatatgatattaagaaagcgtgaaatgacttaaatgttcatttttttctgtatagatactttatcatgttttcatgattttaggaattactgctttgttgatattcaaagtgtgaaactaaaactttatggttgtactttaattcttggcatgttgcctctatgtcccatttaaaataaaatacattctcattaactttagatgggaaataaggttgtatgttgatggatgaattttggcatgatgactgtactctcaataaaggctgaaaatgttgtataactgacctgtgtatttttatcttttgagtaaatttgccttccaaattaggaagataggttttagaagtcatcacaaatagagaaattcttgagtttttgttcctgatgcatggtgtccacagttcttttcatctcattttttttcagattttttttatttcatgtttttgaggctgtatcaagtacatacaagtgttttggaacaacttcttaagttacctaatgccacttaagcagatgagaagtccaaaggagattacactgtgtttgtattgtggtttatttttctggaatattagttacagagagtactacatagtaaacctttttttaaatgtctaagcccatgaattttaattatatgcccttaatgctttcagtgtttgaatccatatcattatgtgtaggaatgccaagtatagtaaagtactttaatttttgaaaaaggagttgttaaaattttctgtgtgattaattctccataagtaaccttgaataaatggatttcttgatttatgatagcagatattggaaatggtcttaaaatgtaatggattttgtaaagcatgttgaactctttctatgacacatgaagaggaagtcactgatagacgcagaaggtcttttctgtctctgatgtcagtttttgaagtggaagaacattagtgaacatttatagttattttactcctttttttgcctttgtctccaaatttctagctatttttaaaaataacctcttcatgagagaaatgtgttactgttaagatcaagtgtagtgtacctgtctttgtgttatttattgcaaagaaatttatttggatttctgtatattttctaatttcataaaagaaaaacagcttaaatgaaaaatgttatacaattgcagaaaatcattattggttttagctaagttattggtttatgaaagtgcacctctacgttctgttaaattgtgtaacttttaagtgagtaattctttcattattaggtagaaataaaagtttgagtatattccattttattatgtataattttaaatacttagcacgtaataaggagctgaatggctgta

SEQ ID NO: 3959 - DNA, 1379 bp, Homo sapiens
  source 1..1379: mol_type = unassigned DNA
ggagactggagtcgaaggccgtgaggtatttttctaagtgagaggaaggactgagtggcagtaacatctgttagggttactgggcagcatccccgcaacccaggtactcagtctcagccacaccttactgagtggtgaagagaagcaagttttctcatgccctctccgtctgtctctacctctgcagccagtgttttagaaggagtatgtggaagggcaaggagtacctatagaaccccggaggagggtgaggagcagagctggtcagccataatggcaggtgaagaaattaatgaagactatccagtagaaattcacgagtatttgtcagcgtttgagaattccattggtgctgtggatgagatgctgaagaccatgatgtctgtttctagaaatgagttgttgcagaagttggatccacttgaacaagcaaaagtggatttggtttctgcatacacattaaattcaatgttttgggtttatttggcaacccaaggagttaatcctaaggaacatccagtaaaacaggaattggaaagaatcagagtatatatgaacagagtcaaggaaataacagacaagaaaaaggctggcaagctggacagaggtgcagcttcaagatttgtaaaaaatgccctctgggaaccaaaatcgaaaaatgcatcaaaagttgccaataaaggaaaaagtaaaagttaactttttggttttgatgtacacatattcaaaaagtacatcttcccccccccccccccccccgcaaaataattctgtggcagggcaaggtttaaatgtgtttcttattaatatgtaaattcacagtaaatatgtaaagctaaatactttcctctccaaagatcattatctttattgattagcactgaggattttaacattgtgatatattatatatttataatttaccatctcttgatgagactcttatttctttatataggtcagtcttgcaagtaccattttataagcagctgtgaaatttaagtgaaatgttctttgtaaacatttgtactattttaaatgaataatgaccttatgaagtatgctatctgtaggctgaaattataggtacatctgttttcactatatgatattaagaaagcgtgaaatgacttaaatgttcatttttttctgtatagatactttatcatgttttcatgattttaggaattactgctttgttgatattcaaagtgtgaaactaaaactttatggttgtactttaattcttggcatgttgcctctatgtcccatttaaaataaaatacattctcattaactttagatgggaaataaggttgtatgttgatggatgaattttggcatgatgactgtactctcaataaaggctgaaaatgttg

SEQ ID NO: 3960 - DNA, 772 bp, Homo sapiens
  source 1..772: mol_type = unassigned DNA
tcgtcatcgttgcccgaccgctttccgggagactggagtcgaaggccgtgagccagtgttttagaaggagtatgtggaagggcaaggagtacctatagaaccccggaggagggtgaggagcagagctggccataatggcaggtgaagaaattaatgaagactatccagtagaaattcacgagtatttgtcagcgtttgagaattccattggtgctgtggatgagatgctgaagaccatgatgtctgtttctagaaatgagttgttgcagaagttggatccacttgaacaagcaaaagtggatttggtttctgcatacacattaaattcaatgttttgggtttatttggcaacccaaggagttaatcctaaggaacatccagtaaaacaggaattggaaagaatcagagtatatatgaacagagtcaaggaaataacagacaagaaaaaggctggcaagctggacagaggtgcagcttcaagatttgtaaaaaatgccctctgggaaccaaaatcgaaaaatgcatcaaaagttgccaataaaggaaaaagtaaaagttaactttttggttttgatgtacacatattcaaaaagtacatcttcccccccccccccccccccgcaaaataattctgtggcagggcaaggtttaaatgtgtttcttattaatatgtaaattcacagtaaatatgtaaagctaaatactttcctctccaaagatcattatctttattgattagcactgaggattttaacattgtgatatattatat

SEQ ID NO: 3961 - DNA, 736 bp, Homo sapiens
  source 1..736: mol_type = unassigned DNA
agccggcgcgtcattgtcgtcatcgttgcccgaccgctttccgggagactggagtcgaaggccgtgagtcagccataatggcaggtgaagaaattaatgaagactatccagtagaaattcacgagtatttgtcagcgtttgagaattccattggtgctgtggatgagatgctgaagaccatgatgtctgtttctagaaatgagttgttgcagaagttggatccacttgaacaagcaaaagtggatttggtttctgcatacacattaaattcaatgttttgggtttatttggcaacccaaggagttaatcctaaggaacatccagtaaaacaggaattggaaagaatcagagtatatatgaacagagtcaaggaaataacagacaagaaaaaggctggcaagctggacagaggtgcagcttcaagatttgtaaaaaatgccctctgggaaccaaaatcgaaaaatgcatcaaaagttgccaataaaggaaaaagtaaaagttaactttttggttttgatgtacacatattcaaaaagtacatcttcccccccccccccccccccgcaaaataattctgtggcagggcaaggtttaaatgtgtttcttattaatatgtaaattcacagtaaatatgtaaagctaaatactttcctctccaaagatcattatctttattgattagcactgaggattttaacattgtgatatattatatatttataatttaccatctctt

SEQ ID NO: 3962 - DNA, 1613 bp, Homo sapiens
  source 1..1613: mol_type = unassigned DNA
cgcgggcgggcaaacggacggctccgcccagccgccggctcctttaccccgccccactacccccgccttcgcggcgctcgtttcctggcgctccccacctttagcgagaccaacgagagaacaccgcctgcagctagaacagcctggtcaggagcgtaacggagtggtgcgccaacgtgagaggaaacccgtgcgcggctgcgctttcctgtccccaagccgttctagacgcgggaaaaatgctttctgaaagcagctcctttttgaagggtgtgatgcttggaagcattttctgtgctttgatcactatgctaggacacattaggattggtcatggaaatagaatgcaccaccatgagcatcatcacctacaagctcctaacaaagaagatatcttgaaaatttcagaggatgagcgcatggagctcagtaagagctttcgagtatactgtattatccttgtaaaacccaaagatgtgagtctttgggctgcagtaaaggagacttggaccaaacactgtgacaaagcagagttcttcagttctgaaaatgttaaagtgtttgagtcaattaatatggacacaaatgacatgtggttaatgatgagaaaagcttacaaatacgcctttgataagtatagagaccaatacaactggttcttccttgcacgccccactacgtttgctatcattgaaaacctaaagtattttttgttaaaaaaggatccatcacagcctttctatctaggccacactataaaatctggagaccttgaatatgtgggtatggaaggaggaattgtcttaagtgtagaatcaatgaaaagacttaacagccttctcaatatcccagaaaagtgtcctgaacagggagggatgatttggaagatatctgaagataaacagctagcagtttgcctgaaatatgctggagtatttgcagaaaatgcagaagatgctgatggaaaagatgtatttaataccaaatctgttgggctttctattaaagaggcaatgacttatcaccccaaccaggtagtagaaggctgttgttcagatatggctgttacttttaatggactgactccaaatcagatgcatgtgatgatgtatggggtataccgccttagggcatttgggcatattttcaatgatgcattggttttcttacctccaaatggttctgacaatgactgagaagtggtagaaaagcgtgaatatgatctttgtataggacgtgtgttgtcattatttgtagtagtaactacatatccaatacagctgtatgtttctttttcttttctaatttggtggcactggtataaccacacattaaagtcagtagtacatttttaaatgagggtggtttttttctttaaaacacatgaacattgtaaatgtgttggaaagaagtgttttaagaataataattttgcaaataaactattaataaatattatatgtgataaattctaaattatgaacattagaaatctgtggggcacatatttttgctgattggttaaaaaattttaacaggtctttagcgttctaagatatgcaaatgatatctctagttgtgaatttgtgattaaagtaaaacttttagctgtg

SEQ ID NO: 3963 - DNA, 1492 bp, Homo sapiens
  source 1..1492: mol_type = unassigned DNA
gtaacggagtggtgcgccaacgtgagaggaaacccgtgcgcggctgcgctttcctgtccccaagccgttctagacgcggatgaagtgcaaaacaaacttctccatagaggagttgttgcaaagttccagtttataccaaacagtaatcagattccattggaagctaaagattttgagagccttttgtactatatgcaactaacttgatttcaagcttgggaaccttttaaaaaaaacattaaaagcaaaatgaaaaatgctttctgaaagcagctcctttttgaagggtgtgatgcttggaagcattttctgtgctttgatcactatgctaggacacattaggattggtcatggaaatagaatgcaccaccatgagcatcatcacctacaagctcctaacaaagaagatatcttgaaaatttcagaggatgagcgcatggagctcagtaagagctttcgagtatactgtattatccttgtaaaacccaaagatgtgagtctttgggctgcagtaaaggagacttggaccaaacactgtgacaaagcagagttcttcagttctgaaaatgttaaagtgtttgagtcaattaatatggacacaaatgacatgtggttaatgatgagaaaagcttacaaatacgcctttgataagtatagagaccaatacaactggttcttccttgcacgccccactacgtttgctatcattgaaaacctaaagtattttttgttaaaaaaggatccatcacagcctttctatctaggccacactataaaatctggagaccttgaatatgtgggtatggaaggaggaattgtcttaagtgtagaatcaatgaaaagacttaacagccttctcaatatcccagaaaagtgtcctgaacagggagggatgatttggaagatatctgaagataaacagctagcagtttgcctgaaatatgctggagtatttgcagaaaatgcagaagatgctgatggaaaagatgtatttaataccaaatctgttgggctttctattaaagaggcaatgacttatcaccccaaccaggtagtagaaggctgttgttcagatatggctgttacttttaatggactgactccaaatcagatgcatgtgatgatgtatggggtataccgccttagggcatttgggcatattttcaatgatgcattggttttcttacctccaaatggttctgacaatgactgagaagtggtagaaaagcgtgaatatgatctttgtataggacgtgtgttgtcattatttgtagtagtaactacatatccaatacagctgtatgtttctttttcttttctaatttggtggcactggtataaccacacattaaagtcagtagtacatttttaaatgagggtggtttttttctttaaaacacatgaacattgtaaatgtgttggaaagaagtgttttaagaataataattttgcaaataaactattaataaatattatatgtgataaattctaa

SEQ ID NO: 3964 - DNA, 3917 bp, Homo sapiens
  source 1..3917: mol_type = unassigned DNA
actctaccaaggacagcccaagaactggtctagcctggcagccttttccctcgggtagtagaggctgcccctctgacagggagtttgtggtcagcgagtgggcccttgggggtcttgggctgtcacagggactccagaaagccatgcagagccttgtgccatgaaggacttctcagatgtcatcctctgcatggaggcaacagaatcgagcaagaccgagttctgcaatcctgccttcgagcctgagtctgggccaccctgccctcccccagttttcccagaggatgccagctacagcgtcccagctccctggcatggtcggcgtcctcgagggctacggccagactgccgcttctcctggctctgtgtcctcctgctctccagcctgctcctcctgctgcttgggctgctggtggccatcatcctggcccagctgcaggctgcacccccatctggggcgtcccatagcccactgcctgccggaggccttaccacgaccaccaccacccccaccatcaccacctctcaggcagctgggacccctaaagggcagcaggagtcaggcgtgagcccctccccacagtccacctgtggaggcctcctctctggcccaaggggcttcttcagcagccctaactacccagacccttacccccccaacacccactgcgtgtggcatatccaggtggccacagaccatgcaatacagctcaagatcgaagccctcagcatagagagtgtggcctcttgcctttttgatcgcttggaactctcccctgagcctgaaggccccctcctcagggtttgtggaagggtgcctccccccacgctcaacaccaatgccagccacctcctggtggtcttcgtctctgacagcagtgtggaaggatttggtttccatgcctggtaccaggctatggcccctgggcgcgggagctgtgcccatgatgagttccgctgtgaccagctcatctgcctgctacctgactcagtgtgtgatggttttgccaactgtgctgacggcagtgatgagaccaattgcagtgccaagttctcggggtgtggggggaatctgactggcctccagggcactttctctactcccagctacctgcagcagtaccctcaccaactgctctgcacctggcatatctcggtgcctgccggacacagcatagaactacagttccacaacttcagcctggaggctcaggacgagtgcaagtttgactacgtggaggtgtatgagaccagcagctcaggggccttcagcctcctgggcaggttctgtggagcagagccacccccccacctcgtctcctcgcaccatgagctggctgtgctgtttaggacagatcatggcatcagcagtggaggcttctcagccacctacctggccttcaatgccacggagaacccctgtgggcccagtgagctctcctgccaggcaggagggtgtaagggtgtgcagtggatgtgtgacatgtggagagactgcaccgatggcagcgatgacaactgcagcggccccttgttcccacccccagagctggcctgtgagcctgtccaggtggagatgtgcctcggtctgagctacaacaccacagccttccctaacatctgggtgggcatgatcacccaggaggaggtggtagaggtcctcagcggttacaagagcctgacaagcctgccctgctaccagcatttccggaggctcctgtgtgggctgcttgtgccccgttgcaccccactaggcagtgttctgcccccttgccgctctgtctgccaggaagcggagcaccagtgccagtctggcctggcactactgggcaccccctggcccttcaactgcaacaggctgccagaggcagctgacctggaagcttgtgcccagccctgaccctgaagccggcccctgccctcttcctgcccgtcctcttttgccggtcagggctggcacgcaggggaacaaaggaaggagcatcagcagggtctctacccatccttctctggggctcccagggagggggaagagaagtcctcagctggggctcatgggaccctaccaccctccctgctccttcctgtccctttaccggtcccaggctgctgactggccccacactgtgccaccggacaatcgagaccacttcccatccaggcctcttcccctttccatctgctttttcagcttctccatcgcctgccttctgaccttttccttgattcaacaaaaatgtactgagcatctattcatgtggcaggcccctgtcctaggccctagggatccaactggctgtctgcctctagaactctccaccctcatctctctgcgtatttctccctgaaatggggtctggtccttggtctctgccactgccctgcctctcctctggccctgggaacaggaggtgccctgtgtgtccgtctctcgaagttctgcctctctgtgcccagctcaagtctctctccccctcctttctccccctaaactttggccggccgccgggcgacaccacgagttatttcccagctatttcccggtccgggagctcttggcccctgaacaactggtttcctcttggagtctgggaggaggaaagcggagccggcagggagcgaaccaggactggggtgacggcagggcagggggcgcctggccggggagaagcgcgggggctggagcaccaccaactggagggtccggagtagcgagcgccccgaaggaggccatcggggagccgggaggggggactgcgagaggaccccggcgtccgggctcccggtgccagcgctatgaggccactcctcgtcctgctgctcctgggcctggcggccggctcgcccccactggacgacaacaagatccccagcctctgcccggggcaccccggccttccaggcacgccgggccaccatggcagccagggcttgccgggccgcgatggccgcgacggccgcgacggcgcgcccggggctccgggagagaaaggcgagggcgggaggccgggactgccgggacctcgaggggaccccgggccgcgaggagaggcgggacccgcggggcccaccgggcctgccggggagtgctcggtgcctccgcgatccgccttcagcgccaagcgctccgagagccgggtgcctccgccgtctgacgcacccttgcccttcgaccgcgtgctggtgaacgagcagggacattacgacgccgtcaccggcaagttcacctgccaggtgcctggggtctactacttcgccgtccatgccaccgtctaccgggccagcctgcagtttgatctggtgaagaatggcgaatccattgcctctttcttccagtttttcggggggtggcccaagccagcctcgctctcggggggggccatggtgaggctggagcctgaggaccaagtgtgggtgcaggtgggtgtgggtgactacattggcatctatgccagcatcaagacagacagcaccttctccggatttctggtgtactccgactggcacagctccccagtctttgcttagtgcccactgcaaagtgagctcatgctctcactcctagaaggagggtgtgaggctgacaaccaggtcatccaggagggctggcccccctggaatattgtgaatgactagggaggtggggtagagcactctccgtcctgctgctggcaaggaatgggaacagtggctgtctgcgatcaggtctggcagcatggggcagtggctggatttctgcccaagaccagaggagtgtgctgtgctggcaagtgtaagtcccccagttgctctggtccaggagcccacggtggggtgctctcttcctggtcctctgcttctctggatcctccccaccccctcctgctcctggggccggcccttttctcagagatcactcaataaacctaagaaccctc

SEQ ID NO: 3965 - DNA, 1353 bp, Homo sapiens
  source 1..1353: mol_type = unassigned DNA
gaacaactggtttcctcttggagtctgggaggaggaaagcggagccggcagggagcgaaccaggactggggtgacggcagggcagggggcgcctggccggggagaagcgcgggggctggagcaccaccaactggagggtccggagtagcgagcgccccgaaggaggccatcggggagccgggaggggggactgcgagaggaccccggcgtccgggctcccggtgccagcgctatgaggccactcctcgtcctgctgctcctgggcctggcggccggctcgcccccactggacgacaacaagatccccagcctctgcccggggcaccccggccttccaggcacgccgggccaccatggcagccagggcttgccgggccgcgatggccgcgacggccgcgacggcgcgcccggggctccgggagagaaaggcgagggcgggaggccgggactgccgggacctcgaggggaccccgggccgcgaggagaggcgggacccgcggggcccaccgggcctgccggggagtgctcggtgcctccgcgatccgccttcagcgccaagcgctccgagagccgggtgcctccgccgtctgacgcacccttgcccttcgaccgcgtgctggtgaacgagcagggacattacgacgccgtcaccggcaagttcacctgccaggtgcctggggtctactacttcgccgtccatgccaccgtctaccgggccagcctgcagtttgatctggtgaagaatggcgaatccattgcctctttcttccagtttttcggggggtggcccaagccagcctcgctctcggggggggccatggtgaggctggagcctgaggaccaagtgtgggtgcaggtgggtgtgggtgactacattggcatctatgccagcatcaagacagacagcaccttctccggatttctggtgtactccgactggcacagctccccagtctttgcttagtgcccactgcaaagtgagctcatgctctcactcctagaaggagggtgtgaggctgacaaccaggtcatccaggagggctggcccccctggaatattgtgaatgactagggaggtggggtagagcactctccgtcctgctgctggcaaggaatgggaacagtggctgtctgcgatcaggtctggcagcatggggcagtggctggatttctgcccaagaccagaggagtgtgctgtgctggcaagtgtaagtcccccagttgctctggtccaggagcccacggtggggtgctctcttcctggtcctctgcttctctggatcctccccaccccctcctgctcctggggccggcccttttctcagagatcactcaataaacctaagaaccctc

SEQ ID NO: 3966 - DNA, 3406 bp, Homo sapiens
  source 1..3406: mol_type = unassigned DNA
gcccagaggaagccacgggcgcccaggcgggcatgaaagggctctttgacggctgggttgctgggacagtaacacagacggccggccaggaggaaggaccttgccctgtgctacaatcccagagggcttcctgaaggaggcagcctagatctttgtccagcagagcccatcttcagggaatattgaggatcccgacccgtgcacctgccctagcggaagacactcctggccaagcctccagatgtggctgtgaggggagtgggccctggccaagatggcagcccccgccctgctgctcctagcactgctgctgcccgtgggggcctggcccgggctgcccaggaggccctgtgtgcactgctgccgcccggcctggccccctggaccctatgcccgggtgagtgacagggacctgtggaggggggacctgtggagggggctgcctcgagtacggcccactatagacatcgaaatcctcaaaggtgagaagggtgaggccggcgtccgaggtcgggccggcaggagcgggaaagaggggccgccaggcgcccggggcctgcagggccgcagaggccagaaggggcaggtggggccgccgggcgccgcgtgccgacgtgcctacgccgccttctccgtgggccggcgcgagggcctgcacagctccgaccacttccaggcggtgcccttcgacacggagctggtgaacctggacggcgccttcgacctggccgcgggccgcttcctctgcacggtgcccggcgtctacttcctcagcctcaacgtgcacacctggaactacaaggagacctacctgcacatcatgctgaaccggcggcccgcggccgtgctctacgcgcagcccagcgagcgcagcgtcatgcaggcccagagcctgatgctgctgctggcggcgggcgacgccgtctgggtgcgcatgttccagcgcgaccgggacaacgccatctacggcgagcacggagacctctacatcaccttcagcggccacctggtcaagccggccgccgagctgtagccggacagacgtccgcctgtggggactctgggagccccggctggcgcgcccgcctctccacttcgcctcactcctgtcctgggacagagggtgccctgcccttgggagatggtgctctgaggcccggccagagtctgcagaacccgcgtgtgtgtgctggagccactccccaggcaggcgggggaacaagcgtggcccccaacagcgcaggacaggaggaggggcggctacaggggcccgccatttgctgtgcacacatggcccctctgcagggagaggggctctgtcccggctgcgccacccccacccactgcccaagcctgctgcctcccaagtcgcccggcatccacctctttccctgaggctgtccctggggccaggctgcccctcagcacccccaagtggccccgtactcaagtcccaccttgtgtgtctgtgggggggcggtagcagggcttctggaagtgtggtgacaaccaaggacaggaggggctggggccggtggccgtggctggtgaaccctggccctgctagagacaggaggggcactggcgctggggctggacccggaaccttccctctccttcgccccacactgaggtgggcggggcctcaggctgcactttggcccagggcctgagtctgctcctggctgggatagcgggacacacccagggcgcccggcaaccggcaggggtcggagccatctccgggcactcacggggccttggcacagaggcttccgccttagagagaaaggcgcccgaacaggaaggggtgggccgaggggagattggcagaccccaggcctcccaccccgaccgggacacccccagccctaccccgtgtgctgacggccggtggcgctaagaggtgccaggagagaagcccacagcctggtcctggctgcagcagcagggcgcctggtcagcactctggggagccttgtgctcactcagcccgttcccaagtgaggacacccagtgccacgcaggcagagccaggctgcagccacgtcccgcccaccccacacagagcccgtgtccctgccagctctgcctgtcgcctcagcttcccgtgcagcagggggtgcgcaaaggcctctgtcggggaccccagagcagctgtgaggggccctgggcttgcaggtcccaagtgggcactgcccagagccgagcccttggtgtccaggccccggaggacagctgcacggctccaggggttcctgcttggggggatccccaggaggagcctgttggggtcaagtgtggcaggtgcttgaagaaccagaggtggggggtatgggctgctgggggtgggggtcccggctggccatgcagaggttcttggccccggtgagagagcagggctggatgggagatgggagccaggggtccggaccaccccagggccagggaggacatctcctctcgcaggctgcctgttctgtgctggggaagcaccccagaatcccagacaaccgttcctttccctggccctggccctggcccggctgccctggggtctccagcctctgtgattccagtgagcctgtgctgccagggtggcaggtggtcctgaggaagagagtcccgggaagacgccagcccctgcaccagggagctcagaaagtgcccgtcaccaggcccagccaaggacccagacgtgaccacagcagccccgaagccaggcgcttattccgagggacaggctggacctccccgcacagacgtcgccgtggcctataggtagttgcagctgcggatactaagaagcagcaggggtcaggcgggcaggggtcgggctgcagcaggggtcaggcgggcaggggtgcaaggtctcttggaagctggcgggggtgtctaatgaatgccagtggcgaccctggttctcagagaaccggggtggggagatgcctgtgagagcctcagacagcaggacctgcatcccgccaaccttccaggtttatttgtttaaaaaacaatgactgagaactgaaagtgagataagatacggtcacgattctctgccaagtgataaaagcctgagggacgctgccagtgccaggtgggagcggaaagagggatgcttggtagaggccagagacacgaaaagcagcgacagcctcgtgctgccctggccacttaggagacaagggggagccaccccatcagaaccgcaccgggcacccccgtggtcggcccgtgctggctttaatcatgagtcaaccgcacaggaagggactggggaacgcggcttcccgcggggacatccctgtgacattccaggcaagcatcgggctggggaggcagcttatcccatgtaactttatccgtttagtggaattccagtaaaaatccaattttaaatgtt

SEQ ID NO: 3967 - DNA, 1830 bp, Homo sapiens
  source 1..1830: mol_type = unassigned DNA
gcacagtatctgggtccagcctgcagccctagggtccagttcagagtctgtcatctgaaccatgaggatctggtggcttctgcttgccattgaaatctgcacagggaacataaactcacaggacacctgcaggcaagggcaccctggaatccctgggaaccccggtcacaatggtctgcctggaagagatggacgagacggagcgaagggtgacaaaggcgatgcaggagaaccaggacgtcctggcagcccggggaaggatgggacgagtggagagaagggagaacgaggagcagatggaaaagttgaagcaaaaggcatcaaaggtgatcaaggctcaagaggatccccaggaaaacatggccccaaggggcttgcagggcccatgggagagaagggcctccgaggagagactgggcctcaggggcagaaggggaataagggtgacgtgggtcccactggtcctgaggggccaaggggcaacattgggcctttgggcccaactggtttaccgggccccatgggccctattggaaagcctggtcccaaaggagaagctggacccacggggccccagggtgagccaggagtccggggaataagaggctggaaaggagatcgaggagagaaagggaaaatcggtgagactctagtcttgccaaaaagtgctttcactgtggggctcacggtgctgagcaagtttccttcttcagatatgcccattaaatttgataagatcctgtataacgaattcaaccattatgatacagcagcggggaaattcacgtgccacattgctggggtctattacttcacctaccacatcactgttttctccagaaatgttcaggtgtctttggtcaaaaatggagtaaaaatactgcacaccaaagatgcttacatgagctctgaggaccaggcctctggcggcattgtcctgcagctgaagctcggggatgaggtgtggctgcaggtgacaggaggagagaggttcaatggcttgtttgctgatgaggacgatgacacaactttcacagggttccttctgttcagcagcccgtgacagaggagagtttaaaaatccgccacaccatccatcagaatcagcttgggatgaacttattcagatggttttactttattaattcctccaattattacaataatcataaaaaggtgaaaatggaaaagttattcccaaaactgattctgtgtaacttactatttttccaggagtaaatatttaaaatagctgcatggtttattctaatttatttcacatttcttattcctattatctgaagaatccctcgtctgtgcgtttcttgtgggaagagtgttttaatatcattttagtgctctgaggagtcatatgaagatgtatccctcatctgtgtttctgaggacattaaggggaaattagagggaaatgtttattcaatttagtactagcaacagctttaagctggtgatgctgtcatactccagaaagctgtagacactgctcattttgtcttttaaaaaaattttattttattttaagttctgggatacatatgcaaaacatgcatgtttgttacataggtaaacatgtgctgtggtggtttgctgtatctatcaacccatcacctaggtattaagccctgcatgcattagctatttgtcctggtgctctccctcccactttgctcattttctaacctaggttttaatcaccattttacccaacaaatcattgttcgatcattatttgccagacttgaatctctatgtgttttctaggactgctctaataaagtacacaaactgggagtctttaaacaacagaaa

SEQ ID NO: 3968 - DNA, 1854 bp, Homo sapiens
  source 1..1854: mol_type = unassigned DNA
tgatgtccctagacttctcagtggcaacaactcatccattcaggagctccatgtaaccactggttcagagtctgtcatctgaaccatgaggatctggtggcttctgcttgccattgaaatctgcacagggaacataaactcacaggacacctgcaggcaagggcaccctggaatccctgggaaccccggtcacaatggtctgcctggaagagatggacgagacggagcgaagggtgacaaaggcgatgcaggagaaccaggacgtcctggcagcccggggaaggatgggacgagtggagagaagggagaacgaggagcagatggaaaagttgaagcaaaaggcatcaaaggtgatcaaggctcaagaggatccccaggaaaacatggccccaaggggcttgcagggcccatgggagagaagggcctccgaggagagactgggcctcaggggcagaaggggaataagggtgacgtgggtcccactggtcctgaggggccaaggggcaacattgggcctttgggcccaactggtttaccgggccccatgggccctattggaaagcctggtcccaaaggagaagctggacccacggggccccagggtgagccaggagtccggggaataagaggctggaaaggagatcgaggagagaaagggaaaatcggtgagactctagtcttgccaaaaagtgctttcactgtggggctcacggtgctgagcaagtttccttcttcagatatgcccattaaatttgataagatcctgtataacgaattcaaccattatgatacagcagcggggaaattcacgtgccacattgctggggtctattacttcacctaccacatcactgttttctccagaaatgttcaggtgtctttggtcaaaaatggagtaaaaatactgcacaccaaagatgcttacatgagctctgaggaccaggcctctggcggcattgtcctgcagctgaagctcggggatgaggtgtggctgcaggtgacaggaggagagaggttcaatggcttgtttgctgatgaggacgatgacacaactttcacagggttccttctgttcagcagcccgtgacagaggagagtttaaaaatccgccacaccatccatcagaatcagcttgggatgaacttattcagatggttttactttattaattcctccaattattacaataatcataaaaaggtgaaaatggaaaagttattcccaaaactgattctgtgtaacttactatttttccaggagtaaatatttaaaatagctgcatggtttattctaatttatttcacatttcttattcctattatctgaagaatccctcgtctgtgcgtttcttgtgggaagagtgttttaatatcattttagtgctctgaggagtcatatgaagatgtatccctcatctgtgtttctgaggacattaaggggaaattagagggaaatgtttattcaatttagtactagcaacagctttaagctggtgatgctgtcatactccagaaagctgtagacactgctcattttgtcttttaaaaaaattttattttattttaagttctgggatacatatgcaaaacatgcatgtttgttacataggtaaacatgtgctgtggtggtttgctgtatctatcaacccatcacctaggtattaagccctgcatgcattagctatttgtcctggtgctctccctcccactttgctcattttctaacctaggttttaatcaccattttacccaacaaatcattgttcgatcattatttgccagacttgaatctctatgtgttttctaggactgctctaataaagtacacaaactgggagtctttaaacaacagaaa

SEQ ID NO: 3969 - DNA, 369 bp, Homo sapiens
  source 1..369: mol_type = unassigned DNA
gccccagcaacaaaggtttctcctctgggtttctgtttccctctttcagttcagtctgtcatctgaaccatgaggatctggtggcttctgcttgccattgaaatctgcacagggaacataaactcacaggacacctgcaggcaagggcaccctggaatccctgggaaccccggtcacaatggtctgcctggaagagatggacgagacggagcgaagggtgacaaaggcgatgcaggagaaccaggatgtcctggcagcccggggaaggatgggacgagtggagagaagggagaacgaggagcagatggaaaagttgaagcaaaaggcatcaaaggaatgttcaggtgtctttggtcaaaaacggagtaa

SEQ ID NO: 3970 - DNA, 1111 bp, Homo sapiens
  source 1..1111: mol_type = unassigned DNA
gccccagcaacaaaggtttctcctctgggtttctgtttccctctttcagttcagtctgtcatctgaaccatgaggatctggtggcttctgcttgccattgaaatctgcacagggaacataaactcacaggacacctgcaggcaagggcaccctggaatccctgggaaccccggtcacaatggtctgcctggaagagatggacgagacggagcgaagggtgacaaaggcgatgcaggagaaccaggatgtcctggcagcccggggaaggatgggacgagtggagagaagggagaacgaggagcagatggaaaagttgaagcaaaaggcatcaaaggtgatcaaggctcaagaggatccccaggaaaacatggccccaaggggcttgcagggcccatgggagagaaaggcctccgaggagagactgggcctcaggggcagaaggggaataagggtgacgtgggtcccactggtcctgaggggccaaggggcaacattgggcctttgggcccaactggtttaccgggccccatgggccctattggaaagcctggtcccaagggagaagctggacccacggggccccagggtgagccaggagtccggggaataagaggctggaaaggagatcgaggagagaaagggaaaatcggtgagactctagtcttgccaaaaagtgctttcactgtggggctcacggtgctgagcaagtttccttcttcagatgtgcccattaaatttgataagatcctgtataatgaattcaaccattatgatacagcagtggggaaattcacgtgccacattgctggggtctattacttcacctaccacatcactgttttctccaggaatgttcaggtgtctttggtcaaaaacggagtaaaaatactgcacaccagagatgcttacgtgagctctgaggaccaggcctctggcagcattgtcctgcagctgaagctcggggatgagatgtggctgcaggtgacaggaggagagaggttcaatggcttgtttgctgatgaggacgatgacacaactttcacagggttccttctgttcagcagccagtgacagaggagagtttataaatctgccagaccatccatcagaa

SEQ ID NO: 3971 - DNA, 1063 bp, Homo sapiens
  source 1..1063: mol_type = unassigned DNA
gcgcagtatctgggtccagcctgcagccctcgggtccagttcagtgtctgtcatctgaaccatgaggatctggtggcttctgcttgccattgaaatctgcacagggaacataaactcacaggacacctgcaggcaagggcaccctggaatccctgggaaccccggtcacaatggtctgcctggaagagatggacgagacggagcgaagggtgacaaaggcgatgcaggagaaccaggatgtcctggcagcccggggaaggatgggacgagtggagagaagggagaacgaggagcagatggaaaagttgaagcaaaaggcatcaaaggtgatcaaggctcaagaggatccccaggaaaacatggccccaaggggcttgcagggcccatgggagagaaaggcctccgaggagagactgggcctcaggggcagaaggggaataagggtgacgtgggtcccactggtcctgaggggccaaggggcaacattgggcctttgggcccaactggtttaccgggccccatgggccctattggaaagcctggtcccaagggagaagctggacccacggggccccagggtgagccaggagtccggggaataagaggctggaaaggagatcgaggagagaaagggaaaatcggtgagactctagtcttgccaaaaagtgctttcactgtggggctcacggtgctgagcaagtttccttcttcagatgtgcccattaaatttgataagatcctgtataatgaattcaaccattatgatacagcagtggggaaattcacgtgccacattgctggggtctattacttcacctaccacatcactgttttctccaggaatgttcaggtgtctttggtcaaaaacggagtaaaaatactgcacaccagagatgcttacgtgagctctgaggaccaggcctctggcagcattgtcctgcagctgaagctcggggatgagatgtggctgcaggtgacaggaggagagaggttcaatggcttgtttgctgatgaggacgatgacacaactttcacagggttccttctgttcagcagccagtga

SEQ ID NO: 3972 - DNA, 147 bp, Homo sapiens
  source 1..147: mol_type = unassigned DNA
gtgggtcccactggtcctgaggggccaaggggcaacattgggcctttgggcccaactggtttaccgggccccatgggccctattggaaagcctggtcccaagggagaagctggacccacggggccccaggttttccctttttgtatc

SEQ ID NO: 3973 - DNA, 1432 bp, Homo sapiens
  source 1..1432: mol_type = unassigned DNA
actggtgctgaaccccgccgcgcgcgctttgaatttcccagccgctaagcgcctctcctggtcggtgtcccaggcagaaaggtgcagagacccatctgacgcaggactccaggtagacaagctccagcagagagtggccagatgtggtgcctggagcgactccgcttgggtcctgagtgccttcggcggagcggagactggcttctcccgggtcgggcccgcggagccaagtctcgcaccaccgccgcgtgcgcaaatgtgctcactccggaccgcatccctgagttctgcatcccgccacggctcatgccccgcctggccttggctgcgctccggaattcttgggtcgaagaagcagggatggacgagggcgccggccgcacagactgggacccgcgctcgcaggccgcgctgtcactgccgcacctgccccgtgtgcgcaccgcctacggcttctgcgcgctgctcgagagcccgcacacgcgccgcaaggagtcgctcctgctcgggggcccgcccgcgccccggccccgggcccacacctacggcggcggcggcggcccggacgccctcctggggaccctgcgcgtcccgcgagctccgggcccggcgacccccgcggcccccggctgtccccgcccgccccaggacgcgctcgcccggcggccccgcggctgccgcctcctgcgcgtccccgacgggctgctgagtcgcgcgctgcgggctgggaggagtcgccgcctgacccgcgtccgctccgtctccagcgggaacgaggacaaggagcgccgcgcgggctcccagtccccggcccgggccccctccacgagcccgccgtcgtcccgggtcccgtttcccgagcgcctggaggccgagggcaccgtggctctgggccgcgccggcgacgccctgcgcctggccgccgagtactgtccgggaaccgggcggctccgcctccggctgctccgcgccgagagcccggccggaggcgcccccgggccccgagccgtcagctgtcgcctcagcctcgtcctgcggccgccgggcaccgcgcttcggcaatgcagcactgtggtggggcgcagccgcaaggcctcctttgaccaggacttctgcttcgacggcctctcggaggacgaagtgcgccgcctggccgttcgagtcaaggcccgggacgagggccgcggccgggagcggggccgcctgctgggccagggtgagctgtccctgggcgccctcctgctgctctgagggcccagccctccccggggcgctctgcccgggggactccggacactgacagccgcgtggtacaaaataaacgtgtatttgttgttcttatcagtcccgtttcagtacaacactggcagagatgattctagattaactatcccagtaaaagatatgatattttccatagatacctccagaa

SEQ ID NO: 3974 - DNA, 1579 bp, Homo sapiens
  source 1..1579: mol_type = unassigned DNA
agtactgaaggtggcgcctcggcagcgggctagaggccactggcactgagcttgcaaccagatccagagacactgaagaagagagaaaggcgcacctcttcccgccactcctagccccagcctccaaggatgcggctcctcgagaaactctgttcctcggccgcaggcagctccgcgccgaagcccgccttcgccaaagtgctcacgccgaatcgcatccccgaattctgcatcccgccgcggctgccggccccttgcacgctcgagtctccaatccgggccgccgccgtgccccggcgctgcgccgctgaaagcgacctgtggccccgcgcggcagacgaggacgccggccgcacggactgggacccgcgctcgcaggcagcgctgtcactgccgcacctgccccgtgtgcgcaccacctacggcttctgcgcgctgctcgagagcccgcacacgcgccgcaaggagtcgctcctgctcgggggcccgcccgcgccccggccccgggcccacagctgcggcggcggcggaggcccggacgcccccctggggaccctgtgcggcccgcgaggtccgggcccggccacccccgcggcccccggcggtccccgcctgccccaggacgcgctcgctgcggggccccgccgctgccgcctcctgcgcgtccccgacgggctgctgagtcgcgcgctgcgggctggaaggagtcgccgcctggcccgcgtccgctccgtctccagcgggaacgaggacgaggagcgccgcgcgggatccgagtccccggcccgggccccctcctcgagcccgctgtcatccagggccccgcttcctgagcgcctggaggccaagggcaccgtggctctgggccgcgccggcgacgccctgcgcctggctgctgagtactgtccgggaacccggcgtctccgcctccggctgctccgcgcggagagcctgttcggaggcgcccccgggccccgcgccgtccgctgccgcctcagcctcgtcctgcggccgccgggcactgcgcgttggcaatgcagcgctgtggtggggcgcagccgcaaggcctcctttgaccaggacttttgcttcgacggcctctcggaagacgaggtgcgccgcctggccgttcgcgtcaaggcccgggatgagggtcgcggccgggatcggggccgcctgctgggccagggtgagctgtccctgggcgccctcctgctgctctgagggcccagccctccccggggcgctctgccctggagactccggacactgacagccgcgtggtacagaataaacgttatttatttttttatttatgatactgctttattgacgttttacttcctcaccatccacatttgtcatcgtctattggtaaagaagaaaaagataatgactccctgttctgttcacaggacccccatatctctttccagaccatttttgcattccaaggaaaaatgggttggcttgggactgggagagaaaggaagtacacccatctgcattgtttttaattccttccggttttctatcaatgttacagtttttttttaataaagcaagttattcattcaga

SEQ ID NO: 3975 - DNA, 3124 bp, Homo sapiens
  source 1..3124: mol_type = unassigned DNA
gcggtttcccgccgcgggtgaatgagtccgactgcgctgccgccgccgccgccgcccgcatcgaagctccggccgcgtcccccgcgccagccccgggagcctgcgcgccgagacccctgcgtgtctgcgaacagacctccggcctcgggccatcaccccgggcagacgctgcagcccctgtccgggcctcttgcctgccgcccccatgagaaaaaccaacatgtggttcttggagcggcttcgggggtctggggaaaacggtgctgcccggggcgtggggagtgaggcgggggacaaggcctccaaggggcccctgtacagcaatgtgttgacgcccgacaagatccccgactttttcatcccccccaagctgccctcgggccccgcggagggcgagggacaggccgcgctgggcccctccacgtcggaacagaacctggcctctgcggccccccgccagaccccacggagcccccggctgcctgccaagctggcagccgagagcaagagcctgctgaaggcagccacccggcacgtgatccagatcgagagtgccgaggactggctgtccgaggaggccactgacgccgacccccaggcccagggtgccatgtccctgccctcggtgcccaaggcccagacgtcctacggcttcgccatgctggctgagagcccccacacgaggcgcaaggagtctctgttccacagtgagcacggggctctggcccaggtgggctccccaggggccgggcgccgccgggcagctgccaaggccaacgggggtgatgggggccccagggaggctggcggggccctcatgagccccggccgctacttcagtggcggggagagcgacacagggtcctcggccgagtcctcccccttcgggtcccctctgctgtcccgctccgtgtctctgctcaaaggtttcgcccaggacagccaggccaaggtgagccagctccggcactccgtgggccgccacggctccctgtctgcggacgacagcaccccggacgccagccccgggagccggcgccgcctgacccgccgggcacccccggaacctggccccgagtcgggccaggcgcgtggggagcacacggtccacgtgggccctcggggcagcgtgcggctgctggccgagtacgaggccggccaggcccgcctgcgggtgcacctgctggccgccgagggcctctacgaccgcctgtgcgacgcccgcagcatcaactgctgcgtgggcctgtgcctggtgccgggcaagctgcagaagcagcgcagcaccatcgtgaagaacagccgccgccccgtcttcaacgaggatttcttcttcgacggcctggggcccgccagcgtccggaaactggccctcaggatcaaggtggtgaacaagggcagcagcctcaagcgggacacgctgctcggggagaaggagctgcccctgacctccctgctccccttcctgtagagcggggacctgctcgctgtccgctcgggtgcagagggcagaccccggtctctcctccacaccgggtgctggcgggcgggtccgctggcttgggctggggctggccggggaggggctcacactcaggctgggctgggcgctgatgctgtagctgacgcagggtttcctgggtcacccgatgctgactggagtattatttttcatgaattaatttctcctttggaggaggaggaggaggaggagaggggcctcgggggaagagaaggggccacttcgcggggcagagggtccccctttgcccctccacactgcctcgcgcctttcacgcagagttctagaaggaggttctcaggggttcaggaatccgtgcatgtggccagggcggggccgtggacagggaggtgacaagtcttggagcccacagtctccttcactgcacgtgtgtcttcctcccccacagcctgccgccatccagttcccaccccgcggagagcagggcctcgcggccacaccaggcccaggctctgcccgggacgccccctcccaggggtcaggcttggctctgggagaccccagcttcccaggctccggtggggagtggggccaggcgagggtgccctgacgagggtgggcgcggagggagcagccgctgccacagtcggagcagaggaggtcttggcagaggtccgcggggaggagacggctctcctggcctgttttcctccaacactgtcgccgctggctttttgggtacaggcccgtctggccatttctgctgtggcgccggagggtcttgctcagagatgcccagagagcagccctatggcccatccgtcctcgctgggggctgccaccccgtcgcccttttgtccagcgtctgcagctgggagcgacacgcagtgattgacggccgtggctttgacgccacgtgtgtaaataggctgtggctacggtgggtgggtcggagcccaggaggcagctggggggacctggctatggcctttcctgctgttaggtggctgcaaggcttccattgtgtggttatgtgggtccttgaatgattttggggaggtttccagctcagaatgatgcagaaatgataagactcaaagcaggggccaggccaggccagtgccttcgcctctcccggctgctggtgggcacggaggaaccagggcacatctgtggtacccagggacgtcccttgtcagcccgtttgccacacattgttcctcttgtccaggggagggtggaggagctgcttcccaggactggaggagcagctgggcccctgctgcacgtccggtgggacacacctgtgagccctccagagggagagtgcaggccccttctgagcctggtgttgcagggctccgctctctcccggaagccagggcacccagggcggaggctcctcaggccggggaggcggggagggtgccctgcatggagagagacgccggcgctccccgccttctctgatgctcacccctcccaggccctgttctccctggggtcccccgtttagtagcccccctgcactctttgatatcttagtgtctgaggttgactgtgggtaaatctttaagacactccccagctgtgtttgtttataaatgctgtttatagtgcaataaaggtgtttcgggaata

SEQ ID NO: 3976 - DNA, 4591 bp, Homo sapiens
  source 1..4591: mol_type = unassigned DNA
ctcctcccttcgcgcttctgggtctgagcccagctcgcgaccgccgggcagaggatcagtcgcggcggccgaggctgagcagcagcgctctcgctccctgacctggggagaagcgcccacccgggagagctgatccccggctgcctccagcgccccccaccttttgcactccaagccgggggctccagagaccccgctccccaggcgccactatgctggacccttcgtccagcgaagaagaatcggatgagatcgtggaggaggagagcggcaaggaggtgctcggctcggccccgtccggcgcgcgcctgtctcccagccgtaccagcgagggctcggccggcagcgccgggctggggggcggcggcgccggcgccggagccggggtgggtgcaggcggcggcgggggcagcggcgcgagcagcggcggcggggccggggggctgcaacccagcagccgcgctggcggcggccggccctccagccccagcccgtcggtggtgagcgagaaggagaaggaagagttggagcggctgcagaaagaggaggaggagaggaagaagaggctgcagctgtatgtgttcgtgatgcgctgcatcgcctacccctttaatgccaagcagcccaccgacatggctcgccggcagcagaagatcagcaaacagcagctgcagacagtcaaggaccggtttcaggctttcctcaatggggaaacccagatcatggctgacgaagccttcatgaacgctgtgcagagttactatgaggtgttcctgaagagcgaccgtgtggcccgcatggttcagagtggaggctgttccgccaacgactcccgggaggtcttcaagaagcacattgagaagagagtgcgcagcctgcctgagattgacggcctcagcaaggagactgtgctgagctcctggatggccaaatttgatgccatctaccgtggagaagaggacccgcggaagcagcaggcccggatgacagccagcgcagcctccgagctgattctgagcaaggagcaactctatgagatgttccagaacattcttgggatcaagaagttcgaacatcagctcctttacaatgcctgccagctggacaatccagatgagcaagcagcccagatcagacgagagctggatggacgtctacaaatggcagaccaaatagccagggaacgcaaatttcccaagtttgtatccaaagaaatggaaaacatgtacattgaggagctgaagtcatctgtcaacctgctcatggccaacttggagagcatgccggtatccaaaggcggggagttcaagctccagaaactcaaacgcagccacaatgcttccatcatcgacatgggcgaggagagtgagaaccagctctccaagtcagatgtcgtgctgtctttctcattggaggtggtaattatggaagtccaaggcctcaaatctttggctccaaatcgcatcgtatattgcacaatggaggtggaaggaggagagaaactacagactgatcaggccgaggcttctaaaccaacctggggcacccagggtgacttctccacaacccatgcactgccagctgtgaaggtgaagctgttcacagagagcacaggcgtcctggcgttggaggacaaggagcttgggcgggttattctccatcccaccccgaacagccccaaacagtcagagtggcacaaaatgacagtctccaaaaactgccccgaccaagatctcaaaatcaaacttgctgtccgaatggataagcctcaaaacatgaagcattctgggtatttatgggccatcggtaagaatgtctggaagagatggaagaaaaggttttttgtattggtgcaggtcagtcagtacacgtttgccatgtgcagttatcgggagaagaaagcggagcctcaggaacttctacaattggatggctacactgtggattacaccgacccccagccaggtttggagggtggccgagccttcttcaatgctgtcaaggagggagacaccgtgatatttgccagtgacgatgaacaagaccgcatcctgtgggtccaggccatgtatcgggccacggggcagtcacacaagcctgtgcccccgacccaagtccagaaactcaacgccaagggaggaaatgtacctcagctggatgcccctatctctcaattttacgcagatagagctcaaaaacatggcatggatgaatttatctcttccaacccctgtaactttgaccacgcttccctctttgagatggtacaacgccttactttggatcacagacttaatgattcctattcttgcctgggctggttcagtcctggccaggtgtttgtactagacgagtattgcgcccgaaatggagtccgggggtgtcaccgacatctctgctacctcagagacttgcttgaacgggcagaaaatggcgccatgatcgaccccacccttcttcactacagctttgccttctgtgcatcccatgtccatgggaacaggcctgatggaattggaactgtgactgttgaagaaaaggaacgttttgaagaaatcaaagagaggctccgagttctgctagaaaatcagattacacattttaggtattgctttccatttggtcgacctgaaggtgctttgaaagctactctctcactcttggaaagggttttgatgaaagatattgttaccccagtgccacaagaggaggtaaaaacagttatccgtaaatgtctggaacaggctgcgttagtcaactattctcggctctcagagtatgccaaaatcgaagggaaaaagagagaaatgtatgagcatcctgtcttctgcttggcctcccaagtgatggatttaaccattcaaaatgtaggccggttaatcactcctgccaaaaagcttgaagatacaatacgtcttgctgaactagtcattgaagttcttcagcaaaatgaggagcaccacgcagaggcctttgcgtggtggtcagatttaatggtggagcatgcggagacgttcctgtcactctttgcagtagacatggatgcagccttagaggtgcaacctccagacacatgggacagttttccactatttcagctgctgaatgattttctccgtactgactataatttgtgcaatggaaaatttcacaaacacctgcaagacctgtttgccccacttgttgttagatatgtggatctgatggagtcctcaattgcacaatccattcacaggggctttgagcgggagtcatgggaaccagtcaataatgggtcaggcacctcagaagatctgttttggaaacttgacgcccttcagaccttcattcgggacctgcactggcctgaagaagagtttggaaagcacctggaacaacggctgaagttgatggcaagtgacatgatcgaatcttgtgtcaaaagaaccaggattgcatttgaagttaagctgcaaaaaaccagtcgatcaacagattttcgagtcccacagtcaatatgcaccatgtttaatgttatggttgatgccaaagctcaatcaacaaaactttgcagcatggaaatgggccaagagcatcaataccattcaaaaatagacgaactaattgaagaaactgttaaagaaatgataacactcttggttgcaaagttcgttactatcttggaaggagtgctggcaaaattatccagatatgacgaagggactttgttttcttcttttctgtcatttaccgtgaaggcagcttccaaatatgtggatgtacctaaacccgggatggacgtggccgacgcctacgtgactttcgtccgccattctcaggatgtcctgcgtgataaggtcaatgaggagatgtacatagaaaggttatttgatcaatggtacaacagctccatgaacgtgatctgcacctggttgacggaccggatggacttacagcttcatatttatcagttgaaaacactaattaggatggtaaagaaaacctacagagatttccgattgcaaggggtcctggactccaccttaaacagcaagacctatgaaacgatccggaaccgtctcactgtggaggaagccacagcatcagtgagtgaaggtgggggactgcagggcatcagcatgaaggacagcgatgaggaagacgaagaagacgattagaccatttggtcctagagtctgctgggacagagtcctgtaatcagtgcatgtccttagtctgttagttaaacccattaggaattttctgtcaactaccatgcccatgagatgtttatcaatacaactgccattttagctatgtggtaccaagattagcaaatgaccttcatatccactgatttcctgatgtccatgtctatatgtttacaagcaatatggagcaccattctttaaatactgttcatggagaatacatagtctaaccactaggcgtgtccctgttatcagcaaagatcaatgatgcttcattcatgtactatgtatgcattggtggtaaatggatgtgagggcaagtacatcaagtacattcactctgtttcacgtatgtggatgccagttaattaaatgagtacgtaaataaattaattaaaaca

SEQ ID NO: 3977 - DNA, 5190 bp, Homo sapiens
  source 1..5190: mol_type = unassigned DNA
tcagcagccgcagatggcatccggctgcgggctcggggctcgcaattgattctcccccttgcccacctcgagtccacggacgcacctctcccttcccctcctcccttcgcgcttctgggtctgagcccagctcgcgaccgccgggcagaggatcagtcgcggcggccgaggctgagcagcagcgctctcgctccctgacctggggagaagcgcccacccgggagagctgatccccggctgcctccagcgccccccaccttttgcactccaagccgggggctccagagaccccgctccccaggcgccactatgctggacccttcgtccagcgaagaagaatcggatgagatcgtggaggaggagagcggcaaggaggtgctcggctcggccccgtccggcgcgcgcctgtctcccagccgtaccagcgagggctcggccggcagcgccgggctggggggcggcggcgccggcgccggagccggggtgggtgcaggcggcggcgggggcagcggcgcgagcagcggcggcggggccggggggctgcaacccagcagccgcgctggcggcggccggccctccagccccagcccgtcggtggtgagcgagaaggagaaggaagagttggagcggctgcagaaagaggaggaggagaggaagaagaggctgcagctgtatgtgttcgtgatgcgctgcatcgcctacccctttaatgccaagcagcccaccgacatggctcgccggcagcagaagatcagcaaacagcagctgcagacagtcaaggaccggtttcaggctttcctcaatggggaaacccagatcatggctgacgaagccttcatgaacgctgtgcagagttactatgaggtgttcctgaagagcgaccgtgtggcccgcatggttcagagtggaggctgttccgccaacgactcccgggaggtcttcaagaagcacattgagaagagagtgcgcagcctgcctgagattgacggcctcagcaaggagactgtgctgagctcctggatggccaaatttgatgccatctaccgtggagaagaggacccgcggaagcagcaggcccggatgacagccagcgcagcctccgagctgattctgagcaaggagcaactctatgagatgttccagaacattcttgggatcaagaagttcgaacatcagctcctttacaatgcctgccagctggacaatccagatgagcaagcagcccagatcagacgagagctggatggacgtctacaaatggcagaccaaatagccagggaacgcaaatttcccaagtttgtatccaaagaaatggaaaacatgtacattgaggagctgaagtcatctgtcaacctgctcatggccaacttggagagcatgccggtatccaaaggcggggagttcaagctccagaaactcaaacgcagccacaatgcttccatcatcgacatgggcgaggagagtgagaaccagctctccaagtcagatgtcgtgctgtctttctcattggaggtggtaattatggaagtccaaggcctcaaatctttggctccaaatcgcatcgtatattgcacaatggaggtggaaggaggagagaaactacagactgatcaggccgaggcttctaaaccaacctggggcacccagggtgacttctccacaacccatgcactgccagctgtgaaggtgaagctgttcacagagagcacaggcgtcctggcgttggaggacaaggagcttgggcgggttattctccatcccaccccgaacagccccaaacagtcagagtggcacaaaatgacagtctccaaaaactgccccgaccaagatctcaaaatcaaacttgctgtccgaatggataagcctcaaaacatgaagcattctgggtatttatgggccatcggtaagaatgtctggaagagatggaagaaaaggttttttgtattggtgcaggtcagtcagtacacgtttgccatgtgcagttatcgggagaagaaagcggagcctcaggaacttctacaattggatggctacactgtggattacaccgacccccagccaggtttggagggtggccgagccttcttcaatgctgtcaaggagggagacaccgtgatatttgccagtgacgatgaacaagaccgcatcctgtgggtccaggccatgtatcgggccacggggcagtcacacaagcctgtgcccccgacccaagtccagaaactcaacgccaagggaggaaatgtacctcagctggatgcccctatctctcaattttacgcagatagagctcaaaaacatggcatggatgaatttatctcttccaacccctgtaactttgaccacgcttccctctttgagatgggctggttcagtcctggccaggtgtttgtactagacgagtattgcgcccgaaatggagtccgggggtgtcaccgacatctctgctacctcagagacttgcttgaacgggcagaaaatggcgccatgatcgaccccacccttcttcactacagctttgccttctgtgcatcccatgtccatgggaacaggcctgatggaattggaactgtgactgttgaagaaaaggaacgttttgaagaaatcaaagagaggctccgagttctgctagaaaatcagattacacattttaggtattgctttccatttggtcgacctgaaggtgctttgaaagctactctctcactcttggaaagggttttgatgaaagatattgttaccccagtgccacaagaggaggtaaaaacagttatccgtaaatgtctggaacaggctgcgttagtcaactattctcggctctcagagtatgccaaaatcgaagaaaatgtaggccggttaatcactcctgccaaaaagcttgaagatacaatacgtcttgctgaactagtcattgaagttcttcagcaaaatgaggagcaccacgcagaggcctttgcgtggtggtcagatttaatggtggagcatgcggagacgttcctgtcactctttgcagtagacatggatgcagccttagaggtgcaacctccagacacatgggacagttttccactatttcagctgctgaatgattttctccgtactgactataatttgtgcaatggaaaatttcacaaacacctgcaagacctgtttgccccacttgttgttagatatgtggatctgatggagtcctcaattgcacaatccattcacaggggctttgagcgggagtcatgggaaccagtcaataatgggtcaggcacctcagaagatctgttttggaaacttgacgcccttcagaccttcattcgggacctgcactggcctgaagaagagtttggaaagcacctggaacaacggctgaagttgatggcaagtgacatgatcgaatcttgtgtcaaaagaaccaggattgcatttgaagttaagctgcaaaaaaccagtcgatcaacagattttcgagtcccacagtcaatatgcaccatgtttaatgttatggttgatgccaaagctcaatcaacaaaactttgcagcatggaaatgggccaagagcatcaataccattcaaaaatagacgaactaattgaagaaactgttaaagaaatgataacactcttggttgcaaagttcgttactatcttggaaggagtgctggcaaaattatccagatatgacgaagggactttgttttcttcttttctgtcatttaccgtgaaggcagcttccaaatatgtggatgtacctaaacccgggatggacgtggccgacgcctacgtgactttcgtccgccattctcaggatgtcctgcgtgataaggtcaatgaggagatgtacatagaaaggttatttgatcaatggtacaacagctccatgaacgtgatctgcacctggttgacggaccggatggacttacagcttcatatttatcagttgaaaacactaattaggatggtaaagaaaacctacagagatttccgattgcaaggggtcctggactccaccttaaacagcaagacctatgaaacgatccggaaccgtctcactgtggaggaagccacagcatcagtgagtgaaggtgggggactgcagggcatcagcatgaaggacagcgatgaggaagacgaagaagacgattagaccatttggtcctagagtctgctgggacagagtcctgtaatcagtgcatgtccttagtctgttagttaaacccattaggaattttctgtcaactaccatgcccatgagatgtttatcaatacaactgccattttagctatgtggtaccaagattagcaaatgaccttcatatccactgatttcctgatgtccatgtctatatgtttacaagcaatatggagcaccattctttaaatactgttcatggagaatacatagtctaaccactaggcgtgtccctgttatcagcaaagatcaatgatgcttcattcatgtactatgtatgcattggtggtaaatggatgtgagggcaagtacatcaagtacattcactctgtttcacgtatgtggatgccagttaattaaatgagtacgtaaataaattaattaaaacacatagatctgctttgtgtttttatttttattttttgaaaaacaaaaggcaagtctccaacaattaacttttgatgctttctgttcccctaaaaccaaaaaatgaaccccttgtgtcgttgttaacccatcctttcatttactcatataattagccaaaaaaaaaaggatggctacataccaatggattgattctcttaattgccacggcaagggggcgatcctatcatgacttaacatcaagcgcgcagttcaaaactactgtcttctgtcaaagttttctcctcttaaatgttattttgcttttacgtctcaactgtgtatgtaaaaaaaatgaatatttaaattacaaccctagactaaaaatgtgtttataataagatgtggatatttccttcagtagattgtaaccataatttaaattattttgttccacactgttttttatatctgtcatgtacattgcattttgatctgtaactgcacaaccctggggtttgctgcagagctatttctttccatgtaaagtagtggatccatcttgcttttgccttatataaagcctacagttatggaagtgtggaaaactgtggcttctcaataaatattcagatgtcctaagaa

SEQ ID NO: 3978 - DNA, 5500 bp, Homo sapiens
  source 1..5500: mol_type = unassigned DNA
ggctgcatcgacagcttgcaacactcggcatcttttctggaggcgcctccttcagcagccgcagatggcatccggctgcgggctcggggctcgcaattgattctcccccttgcccacctcgagtccacggacgcacctctcccttcccctcctcccttcgcgcttctgggtctgagcccagctcgcgaccgccgggcagaggatcagtcgcggcggccgaggctgagcagcagcgctctcgctccctgacctggggagaagcgcccacccgggagagctgatccccggctgcctccagcgccccccaccttttgcactccaagccgggggctccagagaccccgctccccaggcgccactatgctggacccttcgtccagcgaagaagaatcggatgagatcgtggaggaggagagcggcaaggaggtgctcggctcggccccgtccggcgcgcgcctgtctcccagccgtaccagcgagggctcggccggcagcgccgggctggggggcggcggcgccggcgccggagccggggtgggtgcaggcggcggcgggggcagcggcgcgagcagcggcggcggggccggggggctgcaacccagcagccgcgctggcggcggccggccctccagccccagcccgtcggtggtgagcgagaaggagaaggaagagttggagcggctgcagaaagaggaggaggagaggaagaagaggctgcagctgtatgtgttcgtgatgcgctgcatcgcctacccctttaatgccaagcagcccaccgacatggctcgccggcagcagaagatcagcaaacagcagctgcagacagtcaaggaccggtttcaggctttcctcaatggggaaacccagatcatggctgacgaagccttcatgaacgctgtgcagagttactatgaggtgttcctgaagagcgaccgtgtggcccgcatggttcagagtggaggctgttccgccaacgactcccgggaggtcttcaagaagcacattgagaagagagtgcgcagcctgcctgagattgacggcctcagcaaggagactgtgctgagctcctggatggccaaatttgatgccatctaccgtggagaagaggacccgcggaagcagcaggcccggatgacagccagcgcagcctccgagctgattctgagcaaggagcaactctatgagatgttccagaacattcttgggatcaagaagttcgaacatcagctcctttacaatgcctgccagctggacaatccagatgagcaagcagcccagatcagacgagagctggatggacgtctacaaatggcagaccaaatagccagggaacgcaaatttcccaagtttgtatccaaagaaatggaaaacatgtacattgaggagctgaagtcatctgtcaacctgctcatggccaacttggagagcatgccggtatccaaaggcggggagttcaagctccagaaactcaaacgcagccacaatgcttccatcatcgacatgggcgaggagagtgagaaccagctctccaagtcagatgtcgtgctgtctttctcattggaggtggtaattatggaagtccaaggcctcaaatctttggctccaaatcgcatcgtatattgcacaatggaggtggaaggaggagagaaactacagactgatcaggccgaggcttctaaaccaacctggggcacccagggtgacttctccacaacccatgcactgccagctgtgaaggtgaagctgttcacagagagcacaggcgtcctggcgttggaggacaaggagcttgggcgggttattctccatcccaccccgaacagccccaaacagtcagagtggcacaaaatgacagtctccaaaaactgccccgaccaagatctcaaaatcaaacttgctgtccgaatggataagcctcaaaacatgaagcattctgggtatttatgggccatcggtaagaatgtctggaagagatggaagaaaaggttttttgtattggtgcaggtcagtcagtacacgtttgccatgtgcagttatcgggagaagaaagcggagcctcaggaacttctacaattggatggctacactgtggattacaccgacccccagccaggtttggagggtggccgagccttcttcaatgctgtcaaggagggagacaccgtgatatttgccagtgacgatgaacaagaccgcatcctgtgggtccaggccatgtatcgggccacggggcagtcacacaagcctgtgcccccgacccaagtccagaaactcaacgccaagggaggaaatgtacctcagctggatgcccctatctctcaattttacgcagatagagctcaaaaacatggcatggatgaatttatctcttccaacccctgtaactttgaccacgcttccctctttgagatggtacaacgccttactttggatcacagacttaatgattcctattcttgcctgggctggttcagtcctggccaggtgtttgtactagacgagtattgcgcccgaaatggagtccgggggtgtcaccgacatctctgctacctcagagacttgcttgaacgggcagaaaatggcgccatgatcgaccccacccttcttcactacagctttgccttctgtgcatcccatgtccatgggaacaggcctgatggaattggaactgtgactgttgaagaaaaggaacgttttgaagaaatcaaagagaggctccgagttctgctagaaaatcagattacacattttaggtattgctttccatttggtcgacctgaaggtgctttgaaagctactctctcactcttggaaagggttttgatgaaagatattgttaccccagtgccacaagaggaggtaaaaacagttatccgtaaatgtctggaacaggctgcgttagtcaactattctcggctctcagagtatgccaaaatcgaagcaaactcttgtactacagaaaatgtaggccggttaatcactcctgccaaaaagcttgaagatacaatacgtcttgctgaactagtcattgaagttcttcagcaaaatgaggagcaccacgcagagccacatgttgataaaggagaagcctttgcgtggtggtcagatttaatggtggagcatgcggagacgttcctgtcactctttgcagtagacatggatgcagccttagaggtgcaacctccagacacatgggacagttttccactatttcagctgctgaatgattttctccgtactgactataatttgtgcaatggaaaatttcacaaacacctgcaagacctgtttgccccacttgttgttagatatgtggatctgatggagtcctcaattgcacaatccattcacaggggctttgagcgggagtcatgggaaccagtcaagagtttaaccagtaacctacccaatgtgaacctacccaatgtgaaccttcccaaagtaccaaatctaccagttaacatccctctaggcatcccacaaatgcctactttttcggcaccgtcatggatggctgctatatatgatgcggataatgggtcaggcacctcagaagatctgttttggaaacttgacgcccttcagaccttcattcgggacctgcactggcctgaagaagagtttggaaagcacctggaacaacggctgaagttgatggcaagtgacatgatcgaatcttgtgtcaaaagaaccaggattgcatttgaagttaagctgcaaaaaaccagtcgatcaacagattttcgagtcccacagtcaatatgcaccatgtttaatgttatggttgatgccaaagctcaatcaacaaaactttgcagcatggaaatgggccaagagaaatacaaaaaaatgagacatcaataccattcaaaaatagacgaactaattgaagaaactgttaaagaaatgataacactcttggttgcaaagttcgttactatcttggaaggagtgctggcaaaattatccagatatgacgaagggactttgttttcttcttttctgtcatttaccgtgaaggcagcttccaaatatgtggatgtacctaaacccgggatggacgtggccgacgcctacgtgactttcgtccgccattctcaggatgtcctgcgtgataaggtcaatgaggagatgtacatagaaaggttatttgatcaatggtacaacagctccatgaacgtgatctgcacctggttgacggaccggatggacttacagcttcatatttatcagttgaaaacactaattaggatggtaaagaaaacctacagagatttccgattgcaaggggtcctggactccaccttaaacagcaagacctatgaaacgatccggaaccgtctcactgtggaggaagccacagcatcagtgagtgaaggtgggggactgcagggcatcagcatgaaggacagcgatgaggaagacgaagaagacgattagaccatttggtcctagagtctgctgggacagagtcctgtaatcagtgcatgtccttagtctgttagttaaacccattaggaattttctgtcaactaccatgcccatgagatgtttatcaatacaactgccattttagctatgtggtaccaagattagcaaatgaccttcatatccactgatttcctgatgtccatgtctatatgtttacaagcaatatggagcaccattctttaaatactgttcatggagaatacatagtctaaccactaggcgtgtccctgttatcagcaaagatcaatgatgcttcattcatgtactatgtatgcattggtggtaaatggatgtgagggcaagtacatcaagtacattcactctgtttcacgtatgtggatgccagttaattaaatgagtacgtaaataaattaattaaaacacatagatctgctttgtgtttttatttttattttttgaaaaacaaaaggcaagtctccaacaattaacttttgatgctttctgttcccctaaaaccaaaaaatgaaccccttgtgtcgttgttaacccatcctttcatttactcatataattagccaaaaaaaaaaggatggctacataccaatggattgattctcttaattgccacggcaagggggcgatcctatcatgacttaacatcaagcgcgcagttcaaaactactgtcttctgtcaaagttttctcctcttaaatgttattttgcttttacgtctcaactgtgtatgtaaaaaaaatgaatatttaaattacaaccctagactaaaaatgtgtttataataagatgtggatatttccttcagtagattgtaaccataatttaaattattttgttccacactgttttttatatctgtcatgtacattgcattttgatctgtaactgcacaaccctggggtttgctgcagagctatttctttccatgtaaagtagtggatccatcttgcttttgccttatataaagcctacagttatggaagtgtggaaaactgtggcttctcaataaatattcagatgtcctaagaatata

SEQ ID NO: 3979 - DNA, 5471 bp, Homo sapiens
  source 1..5471: mol_type = unassigned DNA
acagcttgcaacactcggcatcttttctggaggcgcctccttcagcagccgcagatggcatccggctgcgggctcggggctcgcaattgattctcccccttgcccacctcgagtccacggacgcacctctcccttcccctcctcccttcgcgcttctgggtctgagcccagctcgcgaccgccgggcagaggatcagtcgcggcggccgaggctgagcagcagcgctctcgctccctgacctggggagaagcgcccacccgggagagctgatccccggctgcctccagcgccccccaccttttgcactccaagccgggggctccagagaccccgctccccaggcgccactatgctggacccttcgtccagcgaagaagaatcggatgagatcgtggaggaggagagcggcaaggaggtgctcggctcggccccgtccggcgcgcgcctgtctcccagccgtaccagcgagggctcggccggcagcgccgggctggggggcggcggcgccggcgccggagccggggtgggtgcaggcggcggcgggggcagcggcgcgagcagcggcggcggggccggggggctgcaacccagcagccgcgctggcggcggccggccctccagccccagcccgtcggtggtgagcgagaaggagaaggaagagttggagcggctgcagaaagaggaggaggagaggaagaagaggctgcagctgtatgtgttcgtgatgcgctgcatcgcctacccctttaatgccaagcagcccaccgacatggctcgccggcagcagaagatcagcaaacagcagctgcagacagtcaaggaccggtttcaggctttcctcaatggggaaacccagatcatggctgacgaagccttcatgaacgctgtgcagagttactatgaggtgttcctgaagagcgaccgtgtggcccgcatggttcagagtggaggctgttccgccaacgactcccgggaggtcttcaagaagcacattgagaagagagtgcgcagcctgcctgagattgacggcctcagcaaggagactgtgctgagctcctggatggccaaatttgatgccatctaccgtggagaagaggacccgcggaagcagcaggcccggatgacagccagcgcagcctccgagctgattctgagcaaggagcaactctatgagatgttccagaacattcttgggatcaagaagttcgaacatcagctcctttacaatgcctgccagctggacaatccagatgagcaagcagcccagatcagacgagagctggatggacgtctacaaatggcagaccaaatagccagggaacgcaaatttcccaagtttgtatccaaagaaatggaaaacatgtacattgaggagctgaagtcatctgtcaacctgctcatggccaacttggagagcatgccggtatccaaaggcggggagttcaagctccagaaactcaaacgcagccacaatgcttccatcatcgacatgggcgaggagagtgagaaccagctctccaagtcagatgtcgtgctgtctttctcattggaggtggtaattatggaagtccaaggcctcaaatctttggctccaaatcgcatcgtatattgcacaatggaggtggaaggaggagagaaactacagactgatcaggccgaggcttctaaaccaacctggggcacccagggtgacttctccacaacccatgcactgccagctgtgaaggtgaagctgttcacagagagcacaggcgtcctggcgttggaggacaaggagcttgggcgggttattctccatcccaccccgaacagccccaaacagtcagagtggcacaaaatgacagtctccaaaaactgccccgaccaagatctcaaaatcaaacttgctgtccgaatggataagcctcaaaacatgaagcattctgggtatttatgggccatcggtaagaatgtctggaagagatggaagaaaaggttttttgtattggtgcaggtcagtcagtacacgtttgccatgtgcagttatcgggagaagaaagcggagcctcaggaacttctacaattggatggctacactgtggattacaccgacccccagccaggtttggagggtggccgagccttcttcaatgctgtcaaggagggagacaccgtgatatttgccagtgacgatgaacaagaccgcatcctgtgggtccaggccatgtatcgggccacggggcagtcacacaagcctgtgcccccgacccaagtccagaaactcaacgccaagggaggaaatgtacctcagctggatgcccctatctctcaattttacgcagatagagctcaaaaacatggcatggatgaatttatctcttccaacccctgtaactttgaccacgcttccctctttgagatggtacaacgccttactttggatcacagacttaatgattcctattcttgcctgggctggttcagtcctggccaggtgtttgtactagacgagtattgcgcccgaaatggagtccgggggtgtcaccgacatctctgctacctcagagacttgcttgaacgggcagaaaatggcgccatgatcgaccccacccttcttcactacagctttgccttctgtgcatcccatgtccatgggaacaggcctgatggaattggaactgtgactgttgaagaaaaggaacgttttgaagaaatcaaagagaggctccgagttctgctagaaaatcagattacacattttaggtattgctttccatttggtcgacctgaaggtgctttgaaagctactctctcactcttggaaagggttttgatgaaagatattgttaccccagtgccacaagaggaggtaaaaacagttatccgtaaatgtctggaacaggctgcgttagtcaactattctcggctctcagagtatgccaaaatcgaagagaatcaaaaggatgcagaaaatgtaggccggttaatcactcctgccaaaaagcttgaagatacaatacgtcttgctgaactagtcattgaagttcttcagcaaaatgaggagcaccacgcagagccacatgttgataaaggagaagcctttgcgtggtggtcagatttaatggtggagcatgcggagacgttcctgtcactctttgcagtagacatggatgcagccttagaggtgcaacctccagacacatgggacagttttccactatttcagctgctgaatgattttctccgtactgactataatttgtgcaatggaaaatttcacaaacacctgcaagacctgtttgccccacttgttgttagatatgtggatctgatggagtcctcaattgcacaatccattcacaggggctttgagcgggagtcatgggaaccagtcaagagtttaaccagtaacctacccaatgtgaacctacccaatgtgaaccttcccaaagtaccaaatctaccagttaacatccctctaggcatcccacaaatgcctactttttcggcaccgtcatggatggctgctatatatgatgcggataatgggtcaggcacctcagaagatctgttttggaaacttgacgcccttcagaccttcattcgggacctgcactggcctgaagaagagtttggaaagcacctggaacaacggctgaagttgatggcaagtgacatgatcgaatcttgtgtcaaaagaaccaggattgcatttgaagttaagctgcaaaaaaccagtcgatcaacagattttcgagtcccacagtcaatatgcaccatgtttaatgttatggttgatgccaaagctcaatcaacaaaactttgcagcatggaaatgggccaagagcatcaataccattcaaaaatagacgaactaattgaagaaactgttaaagaaatgataacactcttggttgcaaagttcgttactatcttggaaggagtgctggcaaaattatccagatatgacgaagggactttgttttcttcttttctgtcatttaccgtgaaggcagcttccaaatatgtggatgtacctaaacccgggatggacgtggccgacgcctacgtgactttcgtccgccattctcaggatgtcctgcgtgataaggtcaatgaggagatgtacatagaaaggttatttgatcaatggtacaacagctccatgaacgtgatctgcacctggttgacggaccggatggacttacagcttcatatttatcagttgaaaacactaattaggatggtaaagaaaacctacagagatttccgattgcaaggggtcctggactccaccttaaacagcaagacctatgaaacgatccggaaccgtctcactgtggaggaagccacagcatcagtgagtgaaggtgggggactgcagggcatcagcatgaaggacagcgatgaggaagacgaagaagacgattagaccatttggtcctagagtctgctgggacagagtcctgtaatcagtgcatgtccttagtctgttagttaaacccattaggaattttctgtcaactaccatgcccatgagatgtttatcaatacaactgccattttagctatgtggtaccaagattagcaaatgaccttcatatccactgatttcctgatgtccatgtctatatgtttacaagcaatatggagcaccattctttaaatactgttcatggagaatacatagtctaaccactaggcgtgtccctgttatcagcaaagatcaatgatgcttcattcatgtactatgtatgcattggtggtaaatggatgtgagggcaagtacatcaagtacattcactctgtttcacgtatgtggatgccagttaattaaatgagtacgtaaataaattaattaaaacacatagatctgctttgtgtttttatttttattttttgaaaaacaaaaggcaagtctccaacaattaacttttgatgctttctgttcccctaaaaccaaaaaatgaaccccttgtgtcgttgttaacccatcctttcatttactcatataattagccaaaaaaaaaaggatggctacataccaatggattgattctcttaattgccacggcaagggggcgatcctatcatgacttaacatcaagcgcgcagttcaaaactactgtcttctgtcaaagttttctcctcttaaatgttattttgcttttacgtctcaactgtgtatgtaaaaaaaatgaatatttaaattacaaccctagactaaaaatgtgtttataataagatgtggatatttccttcagtagattgtaaccataatttaaattattttgttccacactgttttttatatctgtcatgtacattgcattttgatctgtaactgcacaaccctggggtttgctgcagagctatttctttccatgtaaagtagtggatccatcttgcttttgccttatataaagcctacagttatggaagtgtggaaaactgtggcttctcaataaatattcagatgtcctaagaatat

SEQ ID NO: 3980 - DNA, 2095 bp, Homo sapiens
  source 1..2095: mol_type = unassigned DNA
acctacccaatgtgaacctacccaatgtgaaccttcccaaagtaccaaatctaccagttaacatccctctaggcatcccacaaatgcctactttttcggcaccgtcatggatggctgctatatatgatgcggataatgggtcaggcacctcagaagatctgttttggaaacttgacgcccttcagaccttcattcgggacctgcactggcctgaagaagagtttggaaagcacctggaacaacggctgaagttgatggcaagtgacatgatcgaatcttgtgtcaaaagaaccaggattgcatttgaagttaagctgcaaaaaaccagtcgatcaacagattttcgagtcccacagtcaatatgcaccatgtttaatgttatggttgatgccaaagctcaatcaacaaaactttgcagcatggaaatgggccaagagtttgctaaaatgtggcatcaataccattcaaaaatagacgaactaattgaagaaactgttaaagaaatgataacactcttggttgcaaagttcgttactatcttggaaggagtgctggcaaaattatccagatatgacgaagggactttgttttcttcttttctgtcatttaccgtgaaggcagcttccaaatatgtggatgtacctaaacccgggatggacgtggccgacgcctacgtgactttcgtccgccattctcaggatgtcctgcgtgataaggtcaatgaggagatgtacatagaaaggttatttgatcaatggtacaacagctccatgaacgtgatctgcacctggttgacggaccggatggacttacagcttcatatttatcagttgaaaacactaattaggatggtaaagaaaacctacagagatttccgattgcaaggggtcctggactccaccttaaacagcaagacctatgaaacgatccggaaccgtctcactgtggaggaagccacagcatcagtgagtgaaggtgggggactgcagggcatcagcatgaaggacagcgatgaggaagacgaagaagacgattagaccatttggtcctagagtctgctgggacagagtcctgtaatcagtgcatgtccttagtctgttagttaaacccattaggaattttctgtcaactaccatgcccatgagatgtttatcaatacaactgccattttagctatgtggtaccaagattagcaaatgaccttcatatccactgatttcctgatgtccatgtctatatgtttacaagcaatatggagcaccattctttaaatactgttcatggagaatacatagtctaaccactaggcgtgtccctgttatcagcaaagatcaatgatgcttcattcatgtactatgtatgcattggtggtaaatggatgtgagggcaagtacatcaagtacattcactctgtttcacgtatgtggatgccagttaattaaatgagtacgtaaataaattaattaaaacacatagatctgctttgtgtttttatttttattttttgaaaaacaaaaggcaagtctccaacaattaacttttgatgctttctgttcccctaaaaccaaaaaatgaaccccttgtgtcgttgttaacccatcctttcatttactcatataattagccaaaaaaaaaaggatggctacataccaatggattgattctcttaattgccacggcaagggggcgatcctatcatgacttaacatcaagcgcgcagttcaaaactactgtcttctgtcaaagttttctcctcttaaatgttattttgcttttacgtctcaactgtgtatgtaaaaaaaatgaatatttaaattacaaccctagactaaaaatgtgtttataataagatgtggatatttccttcagtagattgtaaccataatttaaattattttgttccacactgttttttatatctgtcatgtacattgcattttgatctgtaactgcacaaccctggggtttgctgcagagctatttctttccatgtaaagtagtggatccatcttgcttttgccttatataaagcctacagttatggaagtgtggaaaactgtggcttctcaataaatattcagatgtcctaagaata

SEQ ID NO: 3981 - DNA, 5928 bp, Homo sapiens
  source 1..5928: mol_type = unassigned DNA
attcaattccacgtgttgcttgttgtaggcgccacaggttccccacctgcgtccgggcgctcgggcggctccgcctctgccggcgggctctggggaaccgctgggtcggcgcgcccggggctggcggagcaattcctgaggcgcccaagctcacccccaacgctaactccgcctattcagtcccggcggctccccctctcccccctcccaatcctcctcccggctcctgcccgcccctttcgccctggtggtaggaaacactcctgaatctaactcgacgtgtccggaaagccctggccagttttcctttcgttctgcggccgctgcagccagccccgcggctccctcagacccgcgggcgcagccgccgggggtgaggcgcttggggaccgcgggccgagcggcggggatccccgagcaccatgctggacccgtcttccagcgaagaggagtcggacgaggggctggaagaggaaagccgcgatgtgctggtggcagccggcagctcgcagcgagctcctccagccccgactcgggaagggcggcgggacgcgccggggcgcgcgggcggcggcggcgcggccagatctgtgagcccgagcccctctgtgctcagcgaggggcgagacgagccccagcggcagctggacgatgagcaggagcggaggatccgcctgcagctctacgtcttcgtcgtgaggtgcatcgcgtaccccttcaacgccaagcagcccaccgacatggcccggaggcagcagaagcttaacaaacaacagttgcagttactgaaagaacggttccaggccttcctcaatggggaaacccaaattgtagctgacgaagcattttgcaacgcagttcggagttattatgaggtttttctaaagagtgaccgagtggccagaatggtacagagtggagggtgttctgctaatgacttcagagaagtatttaagaaaaacatagaaaaacgtgtgcggagtttgccagaaatagatggcttgagcaaagagacagtgttgagctcatggatagccaaatatgatgccatttacagaggtgaagaggacttgtgcaaacagccaaatagaatggccctaagtgcagtgtctgaacttattctgagcaaggaacaactctatgaaatgtttcagcagattctgggtattaaaaaactggaacaccagctcctttataatgcatgtcagctggataacgcagatgaacaagcagcccagatcagaagggaacttgatggccggctgcaattggcagataaaatggcaaaggaaagaaaattccccaaatttatagcaaaagatatggagaatatgtatatagaagagttgcggtcttcagtgaatttgctaatggccaatttggaaagtcttccagtttcgaaaggtggtccggaatttaaattacaaaaattaaaacgttcacagaactctgcatttttggacataggagatgagaatgagattcagctgtcaaagtccgacgtggtactgtcattcaccttagagattgtcataatggaagtgcaaggcctgaagtcagttgctcccaatcgaattgtttactgtacaatggaagtggaaggagaaaaacttcagacagaccaggccgaagcctcaaggccacaatgggggactcaaggagatttcaccaccacccatcctcggcctgtggtcaaagtgaaactcttcacagaaagcactggagttctggccctggaagataaagaactgggaagggtgatattatacccaacttctaatagctccaaatcagctgaattacaccgaatggtagttccaaaaaatagccaggattctgacttaaaaatcaaactggcagtgcgaatggataaaccagcacatatgaagcatagtggatatctgtatgcccttggacagaaggtttggaaaagatggaaaaaacgttactttgttctagttcaggttagccaatatacctttgctatgtgcagttatagagaaaagaagtctgaaccacaagaattaatgcagcttgaaggctatactgtggattataccgatccccacccaggccttcagggtggttgtatgttctttaatgctgttaaagaaggagatactgtaatctttgccagtgatgatgaacaggacagaatattatgggttcaagccatgtatagggccacaggtcaatcatataaaccagttcctgcaattcaaacccagaaactgaatcctaaaggaggaactctccatgcagatgctcagctttatgcagatcgttttcagaaacatggtatggatgagtttatttctgcaaacccctgcaagcttgatcatgccttcctttttagaatactccagaggcagactttggatcacagactgaatgattcctattcttgcttgggatggtttagccctggccaagtctttgtgttagatgagtactgtgcccgttatggtgtgagaggctgtcacagacatctctgctaccttgcagaactgatggaacattcagaaaatggtgctgtcattgaccctaccctgctccattacagctttgcattctgtgcctctcatgtgcacggcaacaggcctgatggaattgggactgtttcagtggaagaaaaagaaagatttgaggagataaaagagagactctcttcccttttagaaaatcagataagccatttcagatactgttttccctttggacgacctgaaggtgctctaaaagctacactttcattacttgaaagggttttaatgaaagatattgccactcccataccagcagaagaggtgaagaaagtggtcagaaaatgtctcgagaaagctgccttgatcaattacactagactcacagaatatgccaaaatagaagagaccatgaaccaggcatctcctgctagaaagctggaagagattcttcatctggcagagctctgcatagaagtcttacagcagaatgaagagcatcatgcagaggcatttgcctggtggcctgatttattggctgaacatgcagagaaattttgggctttatttacagtggatatggacactgcactagaggctcaaccgcaagactcctgggatagttttcctcttttccaactgcttaataatttcctccgaaatgacacacttttgtgtaatggaaaatttcacaaacacttgcaagaaatctttgtacccttggttgtccgctatgtggatctcatggagtcttccatcgcccagtcaattcacagaggttttgagcaggagacatggcagcctgtcaacaatggctcagcaacatcagaagaccttttttggaagcttgatgcactgcaaatgtttgtctttgatctgcactggccagaacaggaatttgcccaccacttagagcaaagacttaaactaatggccagtgatatgctagaggcctgtgtcaaaagaacaagaactgcatttgaactcaagctacaaaaggcaagcaaaacaactgacttgcgcattccagcttccgtttgcactatgtttaatgtattagtcgatgccaaaaagcaaagcaccaaactctgtgccctggatggaggacaagaggtatgtagaatttttcaacagtaccattcaaaaatagatgatctgatcgacaacagtgtaaaagaaatcatttcactgttagtttcaaagtttgtttcagtgttggaaggcgtgttgtctaagctgtcaaggtatgatgaaggcactttcttttcatccattctgtcattcactgtgaaagcagctgcaaaatatgttgatgttccaaaaccaggaatggatctggcagacacctatattatgtttgttcggcaaaaccaagatattcttcgagaaaaggtcaatgaggaaatgtatatagaaaagttatttgatcaatggtacagcagttccatgaaagtcatttgcgtgtggttgactgatagattagacctccaactccatatttaccagctgaagacgctcatcaagattgtgaagaaaacctacagggactttcgattgcagggtgtgttggaaggaacactgaacagtaagacttatgatactgtgcacagacgtttaacagtagaggaggccacagcctctgtttcagaaggaggaggacttcagggcattactatgaaagacagtgacgaagaagaagaaggctgatatcacacagctttgcagaaggaaggaagaccttgatcgacattgttttttatttttttaaccttgtccttgtaattacattcattgtttgttttggccaaataaaaatgcttgtatttctttaaaaagtaagcctgaatgtagagtaaaaggggaaatgccaagattttggggtttttttgtttcctttttttgtttgtttgtttgtttgtttttttggagaagagcatcctcttttgtgtagtttgacctaaaaatgaaccttggctctgcttgtgatcagaacatgaacttttttttttaaagaagatttgagcatttttctgtaatcacatcaaaatgatgttttctgtgtaaagcgagatacatatttctcataatgcagcattgtgagaagtcagttcggaccactgcaccaacactgtcgtatccttgttaaaatggtgtgtaccttacaaattataatttatgtgccaggttcgttttgtacttaatttgctattattgtgatgtgtataaaatctttaatcttggttcttagtactttgaattggtctacaggtatattcctgggatgaaaggattgccaaacccaaatatagactagattatccaatgggtttgtgtctttgttccattctcaacatttcttctttcaactataagtaatccccaggtgtggggtagcaagtgtgcttccgtcaagataccatattctcctgctccagtataacagcttgcaggcaataaaaatctatttgctcataactacttctgtatttattagacttatatagagcaaatgcagtaaaagaggtttgcagtgtttcaaacatcccaactatctgactctgtgtttttgtttcttgagttttttgtttgttttgtttgtaatattttgtttttaatcaaatgagtaaaagatagtaacactgactgttctttgtacctaataggcacatacattgttaaaagaattactatgacagcatatttccatagcagaggaaatatatatttcatatattattagttaatattagtaatcaatgttaactaataattagtaatgttagtaatattaactagtaattcacattattagtggttctctcaaaatattttcttgctagggtttgagagataattgtattatgttgcgtaagttctctatgaattatttttgtgatatttcccaaaacatattggcagattgtgctactgcatttattaataagtaatttttaaatgaaggcagttaatgcagaataagtggaggtatccctgcatttatgaaaacgtttattctgaaactttagaaatgaaacaacttggacctccagattcgttctcccatggtgtaataagtggtcgttaggtacctagactagccttaaaaatctatttaatctacagttactatttagcattgttttggctcattttctgggccctagggctaagataacaaacaaggaaatttcttccttcttccgggattaaagactaactctaccaactcactatctttgaaaggcagtttgggaatgttctccctccttttcttctctattcacacaccaaatactattttctccaaaccctcaaatgtccagtcatgctatcccaaactctccaatggcaccatccccaagcttgctgttccacgacacattgctctgtacttagtaattacccacccttcttttcctttcaataaaatgtccatttccttgat

SEQ ID NO: 3982 - DNA, 6045 bp, Homo sapiens
  source 1..6045: mol_type = unassigned DNA
attcaattccacgtgttgcttgttgtaggcgccacaggttccccacctgcgtccgggcgctcgggcggctccgcctctgccggcgggctctggggaaccgctgggtcggcgcgcccggggctggcggagcaattcctgaggcgcccaagctcacccccaacgctaactccgcctattcagtcccggcggctccccctctcccccctcccaatcctcctcccggctcctgcccgcccctttcgccctggtggtaggaaacactcctgaatctaactcgacgtgtccggaaagccctggccagttttcctttcgttctgcggccgctgcagccagccccgcggctccctcagacccgcgggcgcagccgccgggggtgaggcgcttggggaccgcgggccgagcggcggggatccccgagcaccatgctggacccgtcttccagcgaagaggagtcggacgaggggctggaagaggaaagccgcgatgtgctggtggcagccggcagctcgcagcgagctcctccagccccgactcgggaagggcggcgggacgcgccggggcgcgcgggcggcggcggcgcggccagatctgtgagcccgagcccctctgtgctcagcgaggggcgagacgagccccagcggcagctggacgatgagcaggagcggaggatccgcctgcagctctacgtcttcgtcgtgaggtgcatcgcgtaccccttcaacgccaagcagcccaccgacatggcccggaggcagcagaagcttaacaaacaacagttgcagttactgaaagaacggttccaggccttcctcaatggggaaacccaaattgtagctgacgaagcattttgcaacgcagttcggagttattatgaggtttttctaaagagtgaccgagtggccagaatggtacagagtggagggtgttctgctaatgacttcagagaagtatttaagaaaaacatagaaaaacgtgtgcggagtttgccagaaatagatggcttgagcaaagagacagtgttgagctcatggatagccaaatatgatgccatttacagaggtgaagaggacttgtgcaaacagccaaatagaatggccctaagtgcagtgtctgaacttattctgagcaaggaacaactctatgaaatgtttcagcagattctgggtattaaaaaactggaacaccagctcctttataatgcatgtcagctggataacgcagatgaacaagcagcccagatcagaagggaacttgatggccggctgcaattggcagataaaatggcaaaggaaagaaaattccccaaatttatagcaaaagatatggagaatatgtatatagaagagttgcggtcttcagtgaatttgctaatggccaatttggaaagtcttccagtttcgaaaggtggtccggaatttaaattacaaaaattaaaacgttcacagaactctgcatttttggacataggagatgagaatgagattcagctgtcaaagtccgacgtggtactgtcattcaccttagagattgtcataatggaagtgcaaggcctgaagtcagttgctcccaatcgaattgtttactgtacaatggaagtggaaggagaaaaacttcagacagaccaggccgaagcctcaaggccacaatgggggactcaaggagatttcaccaccacccatcctcggcctgtggtcaaagtgaaactcttcacagaaagcactggagttctggccctggaagataaagaactgggaagggtgatattatacccaacttctaatagctccaaatcagctgaattacaccgaatggtagttccaaaaaatagccaggattctgacttaaaaatcaaactggcagtgcgaatggataaaccagcacatatgaagcatagtggatatctgtatgcccttggacagaaggtttggaaaagatggaaaaaacgttactttgttctagttcaggttagccaatatacctttgctatgtgcagttatagagaaaagaagtctgaaccacaagaattaatgcagcttgaaggctatactgtggattataccgatccccacccaggccttcagggtggttgtatgttctttaatgctgttaaagaaggagatactgtaatctttgccagtgatgatgaacaggacagaatattatgggttcaagccatgtatagggccacaggtcaatcatataaaccagttcctgcaattcaaacccagaaactgaatcctaaaggaggaactctccatgcagatgctcagctttctgaatttacagatgcagatcgttttcagaaacatggtatggatgagtttatttctgcaaacccctgcaagcttgatcatgccttcctttttagaatactccagaggcagactttggatcacagactgaatgattcctattcttgcttgggatggtttagccctggccaagtctttgtgttagatgagtactgtgcccgttatggtgtgagaggctgtcacagacatctctgctaccttgcagaactgatggaacattcagaaaatggtgctgtcattgaccctaccctgctccattacagctttgcattctgtgcctctcatgtgcacggcaacaggcctgatggaattgggactgtttcagtggaagaaaaagaaagatttgaggagataaaagagagactctcttcccttttagaaaatcagataagccatttcagatactgttttccctttggacgacctgaaggtgctctaaaagctacactttcattacttgaaagggttttaatgaaagatattgccactcccataccagcagaagaggtgaagaaagtggtcagaaaatgtctcgagaaagctgccttgatcaattacactagactcacagaatatgccaaaatagaagagaccatgaaccaggcatctcctgctagaaagctggaagagattcttcatctggcagagctctgcatagaagtcttacagcagaatgaagagcatcatgcagaggcatttgcctggtggcctgatttattggctgaacatgcagagaaattttgggctttatttacagtggatatggacactgcactagaggctcaaccgcaagactcctgggatagttttcctcttttccaactgcttaataatttcctccgaaatgacacacttttgtgtaatggaaaatttcacaaacacttgcaagaaatctttgtacccttggttgtccgctatgtggatctcatggagtcttccatcgcccagtcaattcacagaggttttgagcaggagacatggcagcctgtcaagaatatcgccaacagtcttcccaatgtagctcttccaaaagttccaagtctgcctcttaatcttccacagattcctaacatttctactgcttcgtggatgccttctttatatgagtccaccaatggctcagcaacatcagaagaccttttttggaagcttgatgcactgcaaatgtttgtctttgatctgcactggccagaacaggaatttgcccaccacttagagcaaagacttaaactaatggccagtgatatgctagaggcctgtgtcaaaagaacaagaactgcatttgaactcaagctacaaaaggcaagcaaaacaactgacttgcgcattccagcttccgtttgcactatgtttaatgtattagtcgatgccaaaaagcaaagcaccaaactctgtgccctggatggaggacaagagcaacagtaccattcaaaaatagatgatctgatcgacaacagtgtaaaagaaatcatttcactgttagtttcaaagtttgtttcagtgttggaaggcgtgttgtctaagctgtcaaggtatgatgaaggcactttcttttcatccattctgtcattcactgtgaaagcagctgcaaaatatgttgatgttccaaaaccaggaatggatctggcagacacctatattatgtttgttcggcaaaaccaagatattcttcgagaaaaggtcaatgaggaaatgtatatagaaaagttatttgatcaatggtacagcagttccatgaaagtcatttgcgtgtggttgactgatagattagacctccaactccatatttaccagctgaagacgctcatcaagattgtgaagaaaacctacagggactttcgattgcagggtgtgttggaaggaacactgaacagtaagacttatgatactgtgcacagacgtttaacagtagaggaggccacagcctctgtttcagaaggaggaggacttcagggcattactatgaaagacagtgacgaagaagaagaaggctgatatcacacagctttgcagaaggaaggaagaccttgatcgacattgttttttatttttttaaccttgtccttgtaattacattcattgtttgttttggccaaataaaaatgcttgtatttctttaaaaagtaagcctgaatgtagagtaaaaggggaaatgccaagattttggggtttttttgtttcctttttttgtttgtttgtttgtttgtttttttggagaagagcatcctcttttgtgtagtttgacctaaaaatgaaccttggctctgcttgtgatcagaacatgaacttttttttttaaagaagatttgagcatttttctgtaatcacatcaaaatgatgttttctgtgtaaagcgagatacatatttctcataatgcagcattgtgagaagtcagttcggaccactgcaccaacactgtcgtatccttgttaaaatggtgtgtaccttacaaattataatttatgtgccaggttcgttttgtacttaatttgctattattgtgatgtgtataaaatctttaatcttggttcttagtactttgaattggtctacaggtatattcctgggatgaaaggattgccaaacccaaatatagactagattatccaatgggtttgtgtctttgttccattctcaacatttcttctttcaactataagtaatccccaggtgtggggtagcaagtgtgcttccgtcaagataccatattctcctgctccagtataacagcttgcaggcaataaaaatctatttgctcataactacttctgtatttattagacttatatagagcaaatgcagtaaaagaggtttgcagtgtttcaaacatcccaactatctgactctgtgtttttgtttcttgagttttttgtttgttttgtttgtaatattttgtttttaatcaaatgagtaaaagatagtaacactgactgttctttgtacctaataggcacatacattgttaaaagaattactatgacagcatatttccatagcagaggaaatatatatttcatatattattagttaatattagtaatcaatgttaactaataattagtaatgttagtaatattaactagtaattcacattattagtggttctctcaaaatattttcttgctagggtttgagagataattgtattatgttgcgtaagttctctatgaattatttttgtgatatttcccaaaacatattggcagattgtgctactgcatttattaataagtaatttttaaatgaaggcagttaatgcagaataagtggaggtatccctgcatttatgaaaacgtttattctgaaactttagaaatgaaacaacttggacctccagattcgttctcccatggtgtaataagtggtcgttaggtacctagactagccttaaaaatctatttaatctacagttactatttagcattgttttggctcattttctgggccctagggctaagataacaaacaaggaaatttcttccttcttccgggattaaagactaactctaccaactcactatctttgaaaggcagtttgggaatgttctccctccttttcttctctattcacacaccaaatactattttctccaaaccctcaaatgtccagtcatgctatcccaaactctccaatggcaccatccccaagcttgctgttccacgacacattgctctgtacttagtaattacccacccttcttttcctttcaataaaatgtccatttccttgat

SEQ ID NO: 3983 - DNA, 6042 bp, Homo sapiens
  source 1..6042: mol_type = unassigned DNA
attcaattccacgtgttgcttgttgtaggcgccacaggttccccacctgcgtccgggcgctcgggcggctccgcctctgccggcgggctctggggaaccgctgggtcggcgcgcccggggctggcggagcaattcctgaggcgcccaagctcacccccaacgctaactccgcctattcagtcccggcggctccccctctcccccctcccaatcctcctcccggctcctgcccgcccctttcgccctggtggtaggaaacactcctgaatctaactcgacgtgtccggaaagccctggccagttttcctttcgttctgcggccgctgcagccagccccgcggctccctcagacccgcgggcgcagccgccgggggtgaggcgcttggggaccgcgggccgagcggcggggatccccgagcaccatgctggacccgtcttccagcgaagaggagtcggacgaggggctggaagaggaaagccgcgatgtgctggtggcagccggcagctcgcagcgagctcctccagccccgactcgggaagggcggcgggacgcgccggggcgcgcgggcggcggcggcgcggccagatctgtgagcccgagcccctctgtgctcagcgaggggcgagacgagccccagcggcagctggacgatgagcaggagcggaggatccgcctgcagctctacgtcttcgtcgtgaggtgcatcgcgtaccccttcaacgccaagcagcccaccgacatggcccggaggcagcagaagcttaacaaacaacagttgcagttactgaaagaacggttccaggccttcctcaatggggaaacccaaattgtagctgacgaagcattttgcaacgcagttcggagttattatgaggtttttctaaagagtgaccgagtggccagaatggtacagagtggagggtgttctgctaatgacttcagagaagtatttaagaaaaacatagaaaaacgtgtgcggagtttgccagaaatagatggcttgagcaaagagacagtgttgagctcatggatagccaaatatgatgccatttacagaggtgaagaggacttgtgcaaacagccaaatagaatggccctaagtgcagtgtctgaacttattctgagcaaggaacaactctatgaaatgtttcagcagattctgggtattaaaaaactggaacaccagctcctttataatgcatgtcagctggataacgcagatgaacaagcagcccagatcagaagggaacttgatggccggctgcaattggcagataaaatggcaaaggaaagaaaattccccaaatttatagcaaaagatatggagaatatgtatatagaagagttgcggtcttcagtgaatttgctaatggccaatttggaaagtcttccagtttcgaaaggtggtccggaatttaaattacaaaaattaaaacgttcacagaactctgcatttttggacataggagatgagaatgagattcagctgtcaaagtccgacgtggtactgtcattcaccttagagattgtcataatggaagtgcaaggcctgaagtcagttgctcccaatcgaattgtttactgtacaatggaagtggaaggagaaaaacttcagacagaccaggccgaagcctcaaggccacaatgggggactcaaggagatttcaccaccacccatcctcggcctgtggtcaaagtgaaactcttcacagaaagcactggagttctggccctggaagataaagaactgggaagggtgatattatacccaacttctaatagctccaaatcagctgaattacaccgaatggtagttccaaaaaatagccaggattctgacttaaaaatcaaactggcagtgcgaatggataaaccagcacatatgaagcatagtggatatctgtatgcccttggacagaaggtttggaaaagatggaaaaaacgttactttgttctagttcaggttagccaatatacctttgctatgtgcagttatagagaaaagaagtctgaaccacaagaattaatgcagcttgaaggctatactgtggattataccgatccccacccaggccttcagggtggttgtatgttctttaatgctgttaaagaaggagatactgtaatctttgccagtgatgatgaacaggacagaatattatgggttcaagccatgtatagggccacaggtcaatcatataaaccagttcctgcaattcaaacccagaaactgaatcctaaaggaggaactctccatgcagatgctcagctttatgcagatcgttttcagaaacatggtatggatgagtttatttctgcaaacccctgcaagcttgatcatgccttcctttttagaatactccagaggcagactttggatcacagactgaatgattcctattcttgcttgggatggtttagccctggccaagtctttgtgttagatgagtactgtgcccgttatggtgtgagaggctgtcacagacatctctgctaccttgcagaactgatggaacattcagaaaatggtgctgtcattgaccctaccctgctccattacagctttgcattctgtgcctctcatgtgcacggcaacaggcctgatggaattgggactgtttcagtggaagaaaaagaaagatttgaggagataaaagagagactctcttcccttttagaaaatcagataagccatttcagatactgttttccctttggacgacctgaaggtgctctaaaagctacactttcattacttgaaagggttttaatgaaagatattgccactcccataccagcagaagaggtgaagaaagtggtcagaaaatgtctcgagaaagctgccttgatcaattacactagactcacagaatatgccaaaatagaagagaccatgaaccaggcatctcctgctagaaagctggaagagattcttcatctggcagagctctgcatagaagtcttacagcagaatgaagagcatcatgcagagctaagacatgcatttgcctggtggcctgatttattggctgaacatgcagagaaattttgggctttatttacagtggatatggacactgcactagaggctcaaccgcaagactcctgggatagttttcctcttttccaactgcttaataatttcctccgaaatgacacacttttgtgtaatggaaaatttcacaaacacttgcaagaaatctttgtacccttggttgtccgctatgtggatctcatggagtcttccatcgcccagtcaattcacagaggttttgagcaggagacatggcagcctgtcaagaatatcgccaacagtcttcccaatgtagctcttccaaaagttccaagtctgcctcttaatcttccacagattcctaacatttctactgcttcgtggatgccttctttatatgagtccaccaatggctcagcaacatcagaagaccttttttggaagcttgatgcactgcaaatgtttgtctttgatctgcactggccagaacaggaatttgcccaccacttagagcaaagacttaaactaatggccagtgatatgctagaggcctgtgtcaaaagaacaagaactgcatttgaactcaagctacaaaaggcaagcaaaacaactgacttgcgcattccagcttccgtttgcactatgtttaatgtattagtcgatgccaaaaagcaaagcaccaaactctgtgccctggatggaggacaagagcaacagtaccattcaaaaatagatgatctgatcgacaacagtgtaaaagaaatcatttcactgttagtttcaaagtttgtttcagtgttggaaggcgtgttgtctaagctgtcaaggtatgatgaaggcactttcttttcatccattctgtcattcactgtgaaagcagctgcaaaatatgttgatgttccaaaaccaggaatggatctggcagacacctatattatgtttgttcggcaaaaccaagatattcttcgagaaaaggtcaatgaggaaatgtatatagaaaagttatttgatcaatggtacagcagttccatgaaagtcatttgcgtgtggttgactgatagattagacctccaactccatatttaccagctgaagacgctcatcaagattgtgaagaaaacctacagggactttcgattgcagggtgtgttggaaggaacactgaacagtaagacttatgatactgtgcacagacgtttaacagtagaggaggccacagcctctgtttcagaaggaggaggacttcagggcattactatgaaagacagtgacgaagaagaagaaggctgatatcacacagctttgcagaaggaaggaagaccttgatcgacattgttttttatttttttaaccttgtccttgtaattacattcattgtttgttttggccaaataaaaatgcttgtatttctttaaaaagtaagcctgaatgtagagtaaaaggggaaatgccaagattttggggtttttttgtttcctttttttgtttgtttgtttgtttgtttttttggagaagagcatcctcttttgtgtagtttgacctaaaaatgaaccttggctctgcttgtgatcagaacatgaacttttttttttaaagaagatttgagcatttttctgtaatcacatcaaaatgatgttttctgtgtaaagcgagatacatatttctcataatgcagcattgtgagaagtcagttcggaccactgcaccaacactgtcgtatccttgttaaaatggtgtgtaccttacaaattataatttatgtgccaggttcgttttgtacttaatttgctattattgtgatgtgtataaaatctttaatcttggttcttagtactttgaattggtctacaggtatattcctgggatgaaaggattgccaaacccaaatatagactagattatccaatgggtttgtgtctttgttccattctcaacatttcttctttcaactataagtaatccccaggtgtggggtagcaagtgtgcttccgtcaagataccatattctcctgctccagtataacagcttgcaggcaataaaaatctatttgctcataactacttctgtatttattagacttatatagagcaaatgcagtaaaagaggtttgcagtgtttcaaacatcccaactatctgactctgtgtttttgtttcttgagttttttgtttgttttgtttgtaatattttgtttttaatcaaatgagtaaaagatagtaacactgactgttctttgtacctaataggcacatacattgttaaaagaattactatgacagcatatttccatagcagaggaaatatatatttcatatattattagttaatattagtaatcaatgttaactaataattagtaatgttagtaatattaactagtaattcacattattagtggttctctcaaaatattttcttgctagggtttgagagataattgtattatgttgcgtaagttctctatgaattatttttgtgatatttcccaaaacatattggcagattgtgctactgcatttattaataagtaatttttaaatgaaggcagttaatgcagaataagtggaggtatccctgcatttatgaaaacgtttattctgaaactttagaaatgaaacaacttggacctccagattcgttctcccatggtgtaataagtggtcgttaggtacctagactagccttaaaaatctatttaatctacagttactatttagcattgttttggctcattttctgggccctagggctaagataacaaacaaggaaatttcttccttcttccgggattaaagactaactctaccaactcactatctttgaaaggcagtttgggaatgttctccctccttttcttctctattcacacaccaaatactattttctccaaaccctcaaatgtccagtcatgctatcccaaactctccaatggcaccatccccaagcttgctgttccacgacacattgctctgtacttagtaattacccacccttcttttcctttcaataaaatgtccatttccttgat

SEQ ID NO: 3984 - DNA, 2826 bp, Homo sapiens
  source 1..2826: mol_type = unassigned DNA
tgagattcagctgtcaaagtccgacgtggtactgtcattcaccttagagattgtcataatggaagtgcaaggcctgaagtcagttgctcccaatcgaattgtttactgtacaatggaagtggaaggagaaaaacttcagacagaccaggccgaagcctcaaggccacaatgggggactcaaggagatttcaccaccacccatcctcggcctgtggtcaaagtgaaactcttcacagaaagcactggagttctggccctggaagataaagaactgggaagggtgatattatacccaacttctaatagctccaaatcagctgaattacaccgaatggtagttccaaaaaatagccaggattctgacttaaaaatcaaactggcagtgcgaatggataaaccagcacatatgaagcatagtggatatctgtatgcccttggacagaaggtttggaaaagatggaaaaaacgttactttgttctagttcaggttagccaatatacctttgctatgtgcagttatagagaaaagaagtctgaaccacaagaattaatgcagcttgaaggctatactgtggattataccgatccccacccaggccttcagggtggttgtatgttctttaatgctgttaaagaaggagatactgtaatctttgccagtgatgatgaacaggacagaatattatgggttcaagccatgtatagggccacaggtcaatcatataaaccagttcctgcaattcaaacccagaaactgaatcctaaaggaggaactctccatgcagatgctcagctttatgcagatcgttttcagaaacatggtatggatgagtttatttctgcaaacccctgcaagcttgatcatgccttcctttttagaatactccagaggcagactttggatcacagactgaatgattcctattcttgcttgggatggtttagccctggccaagtctttgtgttagatgagtactgtgcccgttatggtgtgagaggctgtcacagacatctctgctaccttgcagaactgatggaacattcagaaaatggtgctgtcattgaccctaccctgctccattacagctttgcattctgtgcctctcatgtgcacggcaacaggcctgatggaattgggactgtttcagtggaagaaaaagaaagatttgaggagataaaagagagactctcttcccttttagaaaatcagataagccatttcagatactgttttccctttggacgacctgaaggtgctctaaaagctacactttcattacttgaaagggttttaatgaaagatattgccactcccataccagcagaagaggtgaagaaagtggtcagaaaatgtctcgagaaagctgccttgatcaattacactagactcacagaatatgccaaaatagaagagaccatgaaccaggcatctcctgctagaaagctggaagagattcttcatctggcagagctctgcatagaagtcttacagcagaatgaagagcatcatgcagaggcatttgcctggtggcctgatttattggctgaacatgcagagaaattttgggctttatttacagtggatatggacactgcactagaggctcaaccgcaagactcctgggatagttttcctcttttccaactgcttaataatttcctccgaaatgacacacttttgtgtaatggaaaatttcacaaacacttgcaagaaatctttgtacccttggttgtccgctatgtggatctcatggagtcttccatcgcccagtcaattcacagaggttttgagcaggagacatggcagcctgtcaacaatggctcagcaacatcagaagaccttttttggaagcttgatgcactgcaaatgtttgtctttgatctgcactggccagaacaggaatttgcccaccacttagagcaaagacttaaactaatggccagtgatatgctagaggcctgtgtcaaaagaacaagaactgcatttgaactcaagctacaaaaggcaagcaaaacaactgacttgcgcattccagcttccgtttgcactatgtttaatgtattagtcgatgccaaaaagcaaagcaccaaactctgtgccctggatggaggacaagagcaacagtaccattcaaaaatagatgatctgatcgacaacagtgtaaaagaaatcatttcactgttagtttcaaagtttgtttcagtgttggaaggcgtgttgtctaagctgtcaaggtatgatgaaggcactttcttttcatccattctgtcattcactgtgaaagcagctgcaaaatatgttgatgttccaaaaccaggaatggatctggcagacacctatattatgtttgttcggcaaaaccaagatattcttcgagaaaaggtcaatgaggaaatgtatatagaaaagttatttgatcaatggtacagcagttccatgaaagtcatttgcgtgtggttgactgatagattagacctccaactccatatttaccagctgaagacgctcatcaagattgtgaagaaaacctacagggactttcgattgcagggtgtgttggaaggaacactgaacagtaagacttatgatactgtgcacagacgtttaacagtagaggaggccacagcctctgtttcagaaggaggaggacttcagggcattactatgaaagacagtgacgaagaagaagaaggctgatatcacacagctttgcagaaggaaggaagaccttgatcgacattgttttttatttttttaaccttgtccttgtaattacattcattgtttgttttggccaaataaaaatgcttgtatttctttaaaaa

SEQ ID NO: 3985 - DNA, 4308 bp, Homo sapiens
  source 1..4308: mol_type = unassigned DNA
ttttcctttcgttctgcggccgctgcagccagccccgcggctccctcagacccgcgggcgcagccgccgggggtgaggcgcttggggaccgcgggccgagcggcggggatccccgagcaccatgctggacccgtcttccagcgaagaggagtcggacgaggggctggaagaggaaagccgcgatgtgctggtggcagccggcagctcgcagcgagctcctccagccccgactcgggaagggcggcgggacgcgccggggcgcgcgggcggcggcggcgcggccagatctgtgagcccgagcccctctgtgctcagcgaggggcgagacgagccccagcggcagctggacgatgagcaggagcggaggatccgcctgcagctctacgtcttcgtcgtgaggtgcatcgcgtaccccttcaacgccaagcagcccaccgacatggcccggaggcagcagaagcttaacaaacaacagttgcagttactgaaagaacggttccaggccttcctcaatggggaaacccaaattgtagctgacgaagcattttgcaacgcagttcggagttattatgaggtttttctaaagagtgaccgagtggccagaatggtacagagtggagggtgttctgctaatgacttcagagaagtatttaagaaaaacatagaaaaacgtgtgcggagtttgccagaaatagatggcttgagcaaagagacagtgttgagctcatggatagccaaatatgatgccatttacagaggtgaagaggacttgtgcaaacagccaaatagaatggccctaagtgcagtgtctgaacttattctgagcaaggaacaactctatgaaatgtttcagcagattctgggtattaaaaaactggaacaccagctcctttataatgcatgtcagctggataacgcagatgaacaagcagcccagatcagaagggaacttgatggccggctgcaattggcagataaaatggcaaaggaaagaaaattccccaaatttatagcaaaagatatggagaatatgtatatagaagagttgcggtcttcagtgaatttgctaatggccaatttggaaagtcttccagtttcgaaaggtggtccggaatttaaattacaaaaattaaaacgttcacagaactctgcatttttggacataggagatgagaatgagattcagctgtcaaagtccgacgtggtactgtcattcaccttagagattgtcataatggaagtgcaaggcctgaagtcagttgctcccaatcgaattgtttactgtacaatggaagtggaaggagaaaaacttcagacagaccaggccgaagcctcaaggccacaatgggggactcaaggagatttcaccaccacccatcctcggcctgtggtcaaagtgaaactcttcacagaaagcactggagttctggccctggaagataaagaactgggaagggtgatattatacccaacttctaatagctccaaatcagctgaattacaccgaatggtagttccaaaaaatagccaggattctgacttaaaaatcaaactggcagtgcgaatggataaaccagcacatatgaagcatagtggatatctgtatgcccttggacagaaggtttggaaaagatggaaaaaacgttactttgttctagttcaggttagccaatatacctttgctatgtgcagttatagagaaaagaagtctgaaccacaagaattaatgcagcttgaaggctatactgtggattataccgatccccacccaggccttcagggtggttgtatgttctttaatgctgttaaagaaggagatactgtaatctttgccagtgatgatgaacaggacagaatattatgggttcaagccatgtatagggccacaggtcaatcatataaaccagttcctgcaattcaaacccagaaactgaatcctaaaggaggaactctccatgcagatgctcagctttatgcagatcgttttcagaaacatggtatggatgagtttatttctgcaaacccctgcaagcttgatcatgccttcctttttagaatactccagaggcagactttggatcacagactgaatgattcctattcttgcttgggatggtttagccctggccaagtctttgtgttagatgagtactgtgcccgttatggtgtgagaggctgtcacagacatctctgctaccttgcagaactgatggaacattcagaaaatggtgctgtcattgaccctaccctgctccattacagctttgcattctgtgcctctcatgtgcacggcaacaggcctgatggaattgggactgtttcagtggaagaaaaagaaagatttgaggagataaaagagagactctcttcccttttagaaaatcagataagccatttcagatactgttttccctttggacgacctgaaggtgctctaaaagctacactttcattacttgaaagggttttaatgaaagatattgccactcccataccagcagaagaggtgaagaaagtggtcagaaaatgtctcgagaaagctgccttgatcaattacactagactcacagaatatgccaaaatagaagagaccatgaaccaggcatctcctgctagaaagctggaagagattcttcatctggcagagctctgcatagaagtcttacagcagaatgaagagcatcatgcagaggcatttgcctggtggcctgatttattggctgaacatgcagagaaattttgggctttatttacagtggatatggacactgcactagaggctcaaccgcaagactcctgggatagttttcctcttttccaactgcttaataatttcctccgaaatgacacacttttgtgtaatggaaaatttcacaaacacttgcaagaaatctttgtacccttggttgtccgctatgtggatctcatggagtcttccatcgcccagtcaattcacagaggttttgagcaggagacatggcagcctgtcaacaatggctcagcaacatcagaagaccttttttggaagcttgatgcactgcaaatgtttgtctttgatctgcactggccagaacaggaatttgcccaccacttagagcaaagacttaaactaatggccagtgatatgctagaggcctgtgtcaaaagaacaagaactgcatttgaactcaagctacaaaaggcaagcaaaacaactgacttgcgcattccagcttccgtttgcactatgtttaatgtattagtcgatgccaaaaagcaaagcaccaaactctgtgccctggatggaggacaagagtttggtagtcaatggcaacagtaccattcaaaaatagatgatctgatcgacaacagtgtaaaagaaatcatttcactgttagtttcaaagtttgtttcagtgttggaaggcgtgttgtctaagctgtcaaggtatgatgaaggcactttcttttcatccattctgtcattcactgtgaaagcagctgcaaaatatgttgatgttccaaaaccaggaatggatctggcagacacctatattatgtttgttcggcaaaaccaagatattcttcgagaaaaggtcaatgaggaaatgtatatagaaaagttatttgatcaatggtacagcagttccatgaaagtcatttgcgtgtggttgactgatagattagacctccaactccatatttaccagctgaagacgctcatcaagattgtgaagaaaacctacagggactttcgattgcagggtgtgttggaaggaacactgaacagtaagacttatgatactgtgcacagacgtttaacagtagaggaggccacagcctctgtttcagaaggaggaggacttcagggcattactatgaaagacagtgacgaagaagaagaaggctgatatcacacagctttgcagaaggaaggaagaccttgatcgacattgttttttatttttttaaccttgtccttgtaattacattcattgtttgttttggccaaataaaaatgcttgtatttctttaaaaagtaagcctgaatgtagagtaaaaggggaaatgccaagattttggggtttttttgtttcctttttttgtttgtttgtttgtttgtttttttggagaagagcatcctcttttgtgtagtttgacctaaaaatgaaccttggctctgcttgtgatcagaacatgaacttttttttttaaagaagatttgagcatttttctgtaatcacatcaaaatgatgttttctgtgtaaagcgagatacatatttctcataatgcagcattgtgagaagtcagttcggaccactgcaccaa

SEQ ID NO: 3986 - DNA, 6066 bp, Homo sapiens
  source 1..6066: mol_type = unassigned DNA
attcaattccacgtgttgcttgttgtaggcgccacaggttccccacctgcgtccgggcgctcgggcggctccgcctctgccggcgggctctggggaaccgctgggtcggcgcgcccggggctggcggagcaattcctgaggcgcccaagctcacccccaacgctaactccgcctattcagtcccggcggctccccctctcccccctcccaatcctcctcccggctcctgcccgcccctttcgccctggtggtaggaaacactcctgaatctaactcgacgtgtccggaaagccctggccagttttcctttcgttctgcggccgctgcagccagccccgcggctccctcagacccgcgggcgcagccgccgggggtgaggcgcttggggaccgcgggccgagcggcggggatccccgagcaccatgctggacccgtcttccagcgaagaggagtcggacgaggggctggaagaggaaagccgcgatgtgctggtggcagccggcagctcgcagcgagctcctccagccccgactcgggaagggcggcgggacgcgccggggcgcgcgggcggcggcggcgcggccagatctgtgagcccgagcccctctgtgctcagcgaggggcgagacgagccccagcggcagctggacgatgagcaggagcggaggatccgcctgcagctctacgtcttcgtcgtgaggtgcatcgcgtaccccttcaacgccaagcagcccaccgacatggcccggaggcagcagaagcttaacaaacaacagttgcagttactgaaagaacggttccaggccttcctcaatggggaaacccaaattgtagctgacgaagcattttgcaacgcagttcggagttattatgaggtttttctaaagagtgaccgagtggccagaatggtacagagtggagggtgttctgctaatgacttcagagaagtatttaagaaaaacatagaaaaacgtgtgcggagtttgccagaaatagatggcttgagcaaagagacagtgttgagctcatggatagccaaatatgatgccatttacagaggtgaagaggacttgtgcaaacagccaaatagaatggccctaagtgcagtgtctgaacttattctgagcaaggaacaactctatgaaatgtttcagcagattctgggtattaaaaaactggaacaccagctcctttataatgcatgtcagctggataacgcagatgaacaagcagcccagatcagaagggaacttgatggccggctgcaattggcagataaaatggcaaaggaaagaaaattccccaaatttatagcaaaagatatggagaatatgtatatagaagagttgcggtcttcagtgaatttgctaatggccaatttggaaagtcttccagtttcgaaaggtggtccggaatttaaattacaaaaattaaaacgttcacagaactctgcatttttggacataggagatgagaatgagattcagctgtcaaagtccgacgtggtactgtcattcaccttagagattgtcataatggaagtgcaaggcctgaagtcagttgctcccaatcgaattgtttactgtacaatggaagtggaaggagaaaaacttcagacagaccaggccgaagcctcaaggccacaatgggggactcaaggagatttcaccaccacccatcctcggcctgtggtcaaagtgaaactcttcacagaaagcactggagttctggccctggaagataaagaactgggaagggtgatattatacccaacttctaatagctccaaatcagctgaattacaccgaatggtagttccaaaaaatagccaggattctgacttaaaaatcaaactggcagtgcgaatggataaaccagcacatatgaagcatagtggatatctgtatgcccttggacagaaggtttggaaaagatggaaaaaacgttactttgttctagttcaggttagccaatatacctttgctatgtgcagttatagagaaaagaagtctgaaccacaagaattaatgcagcttgaaggctatactgtggattataccgatccccacccaggccttcagggtggttgtatgttctttaatgctgttaaagaaggagatactgtaatctttgccagtgatgatgaacaggacagaatattatgggttcaagccatgtatagggccacaggtcaatcatataaaccagttcctgcaattcaaacccagaaactgaatcctaaaggaggaactctccatgcagatgctcagctttctgaatttacagatgcagatcgttttcagaaacatggtatggatgagtttatttctgcaaacccctgcaagcttgatcatgccttcctttttagaatactccagaggcagactttggatcacagactgaatgattcctattcttgcttgggatggtttagccctggccaagtctttgtgttagatgagtactgtgcccgttatggtgtgagaggctgtcacagacatctctgctaccttgcagaactgatggaacattcagaaaatggtgctgtcattgaccctaccctgctccattacagctttgcattctgtgcctctcatgtgcacggcaacaggcctgatggaattgggactgtttcagtggaagaaaaagaaagatttgaggagataaaagagagactctcttcccttttagaaaatcagataagccatttcagatactgttttccctttggacgacctgaaggtgctctaaaagctacactttcattacttgaaagggttttaatgaaagatattgccactcccataccagcagaagaggtgaagaaagtggtcagaaaatgtctcgagaaagctgccttgatcaattacactagactcacagaatatgccaaaatagaaggcccagcagaaaaggaaacagagaccatgaaccaggcatctcctgctagaaagctggaagagattcttcatctggcagagctctgcatagaagtcttacagcagaatgaagagcatcatgcagaggcatttgcctggtggcctgatttattggctgaacatgcagagaaattttgggctttatttacagtggatatggacactgcactagaggctcaaccgcaagactcctgggatagttttcctcttttccaactgcttaataatttcctccgaaatgacacacttttgtgtaatggaaaatttcacaaacacttgcaagaaatctttgtacccttggttgtccgctatgtggatctcatggagtcttccatcgcccagtcaattcacagaggttttgagcaggagacatggcagcctgtcaagaatatcgccaacagtcttcccaatgtagctcttccaaaagttccaagtctgcctcttaatcttccacagattcctaacatttctactgcttcgtggatgccttctttatatgagtccaccaatggctcagcaacatcagaagaccttttttggaagcttgatgcactgcaaatgtttgtctttgatctgcactggccagaacaggaatttgcccaccacttagagcaaagacttaaactaatggccagtgatatgctagaggcctgtgtcaaaagaacaagaactgcatttgaactcaagctacaaaaggcaagcaaaacaactgacttgcgcattccagcttccgtttgcactatgtttaatgtattagtcgatgccaaaaagcaaagcaccaaactctgtgccctggatggaggacaagagcaacagtaccattcaaaaatagatgatctgatcgacaacagtgtaaaagaaatcatttcactgttagtttcaaagtttgtttcagtgttggaaggcgtgttgtctaagctgtcaaggtatgatgaaggcactttcttttcatccattctgtcattcactgtgaaagcagctgcaaaatatgttgatgttccaaaaccaggaatggatctggcagacacctatattatgtttgttcggcaaaaccaagatattcttcgagaaaaggtcaatgaggaaatgtatatagaaaagttatttgatcaatggtacagcagttccatgaaagtcatttgcgtgtggttgactgatagattagacctccaactccatatttaccagctgaagacgctcatcaagattgtgaagaaaacctacagggactttcgattgcagggtgtgttggaaggaacactgaacagtaagacttatgatactgtgcacagacgtttaacagtagaggaggccacagcctctgtttcagaaggaggaggacttcagggcattactatgaaagacagtgacgaagaagaagaaggctgatatcacacagctttgcagaaggaaggaagaccttgatcgacattgttttttatttttttaaccttgtccttgtaattacattcattgtttgttttggccaaataaaaatgcttgtatttctttaaaaagtaagcctgaatgtagagtaaaaggggaaatgccaagattttggggtttttttgtttcctttttttgtttgtttgtttgtttgtttttttggagaagagcatcctcttttgtgtagtttgacctaaaaatgaaccttggctctgcttgtgatcagaacatgaacttttttttttaaagaagatttgagcatttttctgtaatcacatcaaaatgatgttttctgtgtaaagcgagatacatatttctcataatgcagcattgtgagaagtcagttcggaccactgcaccaacactgtcgtatccttgttaaaatggtgtgtaccttacaaattataatttatgtgccaggttcgttttgtacttaatttgctattattgtgatgtgtataaaatctttaatcttggttcttagtactttgaattggtctacaggtatattcctgggatgaaaggattgccaaacccaaatatagactagattatccaatgggtttgtgtctttgttccattctcaacatttcttctttcaactataagtaatccccaggtgtggggtagcaagtgtgcttccgtcaagataccatattctcctgctccagtataacagcttgcaggcaataaaaatctatttgctcataactacttctgtatttattagacttatatagagcaaatgcagtaaaagaggtttgcagtgtttcaaacatcccaactatctgactctgtgtttttgtttcttgagttttttgtttgttttgtttgtaatattttgtttttaatcaaatgagtaaaagatagtaacactgactgttctttgtacctaataggcacatacattgttaaaagaattactatgacagcatatttccatagcagaggaaatatatatttcatatattattagttaatattagtaatcaatgttaactaataattagtaatgttagtaatattaactagtaattcacattattagtggttctctcaaaatattttcttgctagggtttgagagataattgtattatgttgcgtaagttctctatgaattatttttgtgatatttcccaaaacatattggcagattgtgctactgcatttattaataagtaatttttaaatgaaggcagttaatgcagaataagtggaggtatccctgcatttatgaaaacgtttattctgaaactttagaaatgaaacaacttggacctccagattcgttctcccatggtgtaataagtggtcgttaggtacctagactagccttaaaaatctatttaatctacagttactatttagcattgttttggctcattttctgggccctagggctaagataacaaacaaggaaatttcttccttcttccgggattaaagactaactctaccaactcactatctttgaaaggcagtttgggaatgttctccctccttttcttctctattcacacaccaaatactattttctccaaaccctcaaatgtccagtcatgctatcccaaactctccaatggcaccatccccaagcttgctgttccacgacacattgctctgtacttagtaattacccacccttcttttcctttcaataaaatgtccatttccttgat

SEQ ID NO: 3987 - DNA, 4073 bp, Homo sapiens
  source 1..4073: mol_type = unassigned DNA
ggcggggatccccgagcaccatgctggacccgtcttccagcgaagaggagtcggacgaggggctggaagaggaaagccgcgatgtgctggtggcagccggcagctcgcagcgagctcctccagccccgactcgggaagggcggcgggacgcgccggggcgcgcgggcggcggcggcgcggccagatctgtgagcccgagcccctctgtgctcagcgaggggcgagacgagccccagcggcagctggacgatgagcaggagcggaggatccgcctgcagctctacgtcttcgtcgtgaggtgcatcgcgtaccccttcaacgccaagcagcccaccgacatggcccggaggcagcagaagcttaacaaacaacagttgcagttactgaaagaacggttccaggccttcctcaatggggaaacccaaattgtagctgacgaagcattttgcaacgcagttcggagttattatgaggtttttctaaagagtgaccgagtggccagaatggtacagagtggagggtgttctgctaatgacttcagagaagtatttaagaaaaacatagaaaaacgtgtgcggagtttgccagaaatagatggcttgagcaaagagacagtgttgagctcatggatagccaaatatgatgccatttacagaggtgaagaggacttgtgcaaacagccaaatagaatggccctaagtgcagtgtctgaacttattctgagcaaggaacaactctatgaaatgtttcagcagattctgggtattaaaaaactggaacaccagctcctttataatgcatgtcagctggataacgcagatgaacaagcagcccagatcagaagggaacttgatggccggctgcaattggcagataaaatggcaaaggaaagaaaattccccaaatttatagcaaaagatatggagaatatgtatatagaagagttgcggtcttcagtgaatttgctaatggccaatttggaaagtcttccagtttcgaaaggtggtccggaatttaaattacaaaaattaaaacgttcacagaactctgcatttttggacataggagatgagaatgagattcagctgtcaaagtccgacgtggtactgtcattcaccttagagattgtcataatggaagtgcaaggcctgaagtcagttgctcccaatcgaattgtttactgtacaatggaagtggaaggagaaaaacttcagacagaccaggccgaagcctcaaggccacaatgggggactcaaggagatttcaccaccacccatcctcggcctgtggtcaaagtgaaactcttcacagaaagcactggagttctggccctggaagataaagaactgggaagggtgatattatacccaacttctaatagctccaaatcagctgaattacaccgaatggtagttccaaaaaatagccaggattctgacttaaaaatcaaactggcagtgcgaatggataaaccagcacatatgaagcatagtggatatctgtatgcccttggacagaaggtttggaaaagatggaaaaaacgttactttgttctagttcaggttagccaatatacctttgctatgtgcagttatagagaaaagaagtctgaaccacaagaattaatgcagcttgaaggctatactgtggattataccgatccccacccaggccttcagggtggttgtatgttctttaatgctgttaaagaaggagatactgtaatctttgccagtgatgatgaacaggacagaatattatgggttcaagccatgtatagggccacaggtcaatcatataaaccagttcctgcaattcaaacccagaaactgaatcctaaaggaggaactctccatgcagatgctcagctttctggtaaagatgcagatcgttttcagaaacatggtatggatgagtttatttctgcaaacccctgcaagcttgatcatgccttcctttttagaatactccagaggcagactttggatcacagactgaatgattcctattcttgcttgggatggtttagccctggccaagtctttgtgttagatgagtactgtgcccgttatggtgtgagaggctgtcacagacatctctgctaccttgcagaactgatggaacattcagaaaatggtgctgtcattgaccctaccctgctccattacagctttgcattctgtgcctctcatgtgcacggcaacaggcctgatggaattgggactgtttcagtggaagaaaaagaaagatttgaggagataaaagagagactctcttcccttttagaaaatcagataagccatttcagatactgttttccctttggacgacctgaaggtgctctaaaagctacactttcattacttgaaagggttttaatgaaagatattgccactcccataccagcagaagaggtgaagaaagtggtcagaaaatgtctcgagaaagctgccttgatcaattacactagactcacagaatatgccaaaatagaagagaccatgaaccaggcatctcctgctagaaagctggaagagattcttcatctggcagagctctgcatagaagtcttacagcagaatgaagagcatcatgcagagggaagagaggcatttgcctggtggcctgatttattggctgaacatgcagagaaattttgggctttatttacagtggatatggacactgcactagaggctcaaccgcaagactcctgggatagttttcctcttttccaactgcttaataatttcctccgaaatgacacacttttgtgtaatggaaaatttcacaaacacttgcaagaaatctttgtacccttggttgtccgctatgtggatctcatggagtcttccatcgcccagtcaattcacagaggttttgagcaggagacatggcagcctgtcaagaatatcgccaacagtcttcccaatgtagctcttccaaaagttccaagtctgcctcttaatcttccacagattcctaacatttctactgcttcgtggatgccttctttatatgagtccaccaatggctcagcaacatcagaagaccttttttggaagcttgatgcactgcaaatgtttgtctttgatctgcactggccagaacaggaatttgcccaccacttagagcaaagacttaaactaatggccagtgatatgctagaggcctgtgtcaaaagaacaagaactgcatttgaactcaagctacaaaaggcaagcaaaacaactgacttgcgcattccagcttccgtttgcactatgtttaatgtattagtcgatgccaaaaagcaaagcaccaaactctgtgccctggatggaggacaagagcaacagtaccattcaaaaatagatgatctgatcgacaacagtgtaaaagaaatcatttcactgttagtttcaaagtttgtttcagtgttggaaggcgtgttgtctaagctgtcaaggtatgatgaaggcactttcttttcatccattctgtcattcactgtgaaagcagctgcaaaatatgttgatgttccaaaaccaggaatggatctggcagacacctatattatgtttgttcggcaaaaccaagatattcttcgagaaaaggtcaatgaggaaatgtatatagaaaagttatttgatcaatggtacagcagttccatgaaagtcatttgcgtgtggttgactgatagattagacctccaactccatatttaccagctgaagacgctcatcaagattgtgaagaaaacctacagggactttcgattgcagggtgtgttggaaggaacactgaacagtaagacttatgatactgtgcacagacgtttaacagtagaggaggccacagcctctgtttcagaaggaggaggacttcagggcattactatgaaagacagtgacgaagaagaagaaggctgatatcacacagctttgcagaaggaaggaagaccttgatcgacattgttttttatttttttaaccttgtccttgtaattacattcattgtttgttttggccaaataaaaatgcttgtatttctttaaaaagtaagcctgaatgtagagtaaaaggggaaatgcc

SEQ ID NO: 3988 - DNA, 2238 bp, Homo sapiens
  source 1..2238: mol_type = unassigned DNA
attacactagactcacagaatatgccaaaatagaaggcccagcagaaaaggaaacagagaccatgaaccaggcatctcctgctagaaagctggaagagattcttcatctggcagagctctgcatagaagtcttacagcagaatgaagagcatcatgcagagggaagagaggcatttgcctggtggcctgatttattggctgaacatgcagagaaattttgggctttatttacagtggatatggacactgcactagaggctcaaccgcaagactcctgggatagttttcctcttttccaactgcttaataatttcctccgaaatgacacacttttgtgtaatggaaaatttcacaaacacttgcaagaaatctttgtacccttggttgtccgctatgtggatctcatggagtcttccatcgcccagtcaattcacagaggttttgagcaggagacatggcagcctgtcaagaatatcgccaacagtcttcccaatgtagctcttccaaaagttccaagtctgcctcttaatcttccacagattcctaacatttctactgcttcgtggatgccttctttatatgagtccaccaatggctcagcaacatcagaagaccttttttggaagcttgatgcactgcaaatgtttgtctttgatctgcactggccagaacaggaatttgcccaccacttagagcaaagacttaaactaatggccagtgatatgctagaggcctgtgtcaaaagaacaagaactgcatttgaactcaagctacaaaaggcaagcaaaacaactgacttgcgcattccagcttccgtttgcactatgtttaatgtattagtcgatgccaaaaagcaaagcaccaaactctgtgccctggatggaggacaagagcaacagtaccattcaaaaatagatgatctgatcgacaacagtgtaaaagaaatcatttcactgttagtttcaaagtttgtttcagtgttggaaggcgtgttgtctaagctgtcaaggtatgatgaaggcactttcttttcatccattctgtcattcactgtgaaagcagctgcaaaatatgttgatgttccaaaaccaggaatggatctggcagacacctatattatgtttgttcggcaaaaccaagatattcttcgagaaaaggtcaatgaggaaatgtatatagaaaagttatttgatcaatggtacagcagttccatgaaagtcatttgcgtgtggttgactgatagattagacctccaactccatatttaccagctgaagacgctcatcaagattgtgaagaaaacctacagggactttcgattgcagggtgtgttggaaggaacactgaacagtaagacttatgatactgtgcacagacgtttaacagtagaggaggccacagcctctgtttcagaaggaggaggacttcagggcattactatgaaagacagtgacgaagaagaagaaggctgatatcacacagctttgcagaaggaaggaagaccttgatcgacattgttttttatttttttaaccttgtccttgtaattacattcattgtttgttttggccaaataaaaatgcttgtatttctttaaaaagtaagcctgaatgtagagtaaaaggggaaatgccaagattttggggtttttttgtttcctttttttgtttgtttgtttgtttgtttttttggagaagagcatcctcttttgtgtagtttgacctaaaaatgaaccttggctctgcttgtgatcagaacatgaacttttttttttaaagaagatttgagcatttttctgtaatcacatcaaaatgatgttttctgtgtaaagcgagatacatatttctcataatgcagcattgtgagaagtcagttcggaccactgcaccaacactgtcgtatccttgttaaaatggtgtgtaccttacaaattataatttatgtgccaggttcgttttgtacttaatttgctattattgtgatgtgtataaaatctttaatcttggttcttagtactttgaattggtctacaggtatattcctgggatgaaaggattgccaaacccaaatatagactagattatccaatgggtttgtgtctttgttccattctcaacatttcttctttcaactataagtaatccccaggtgtggggtagcaagtgtgcttccgtcaagataccatattctcctgctccagtataacagcttgcaggcaataaaaatctatttgctcat

SEQ ID NO: 3989 - DNA, 4631 bp, Homo sapiens
  source 1..4631: mol_type = unassigned DNA
agttttcctttcgttctgcggccgctgcagccagccccgcggctccctcagacccgcgggcgcagccgccgggggtgaggcgcttggggaccgcgggccgagcggcggggatccccgagcaccatgctggacccgtcttccagcgaagaggagtcggacgaggggctggaagaggaaagccgcgatgtgctggtggcagccggcagctcgcagcgagctcctccagccccgactcgggaagggcagctggacgatgagcaggagcggaggatccgcctgcagctctacgtcttcgtcgtgaggtgcatcgcgtaccccttcaacgccaagcagcccaccgacatggcccggaggcagcagaagcttaacaaacaacagttgcagttactgaaagaacggttccaggccttcctcaatggggaaacccaaattgtagctgacgaagcattttgcaacgcagttcggagttattatgaggtttttctaaagagtgaccgagtggccagaatggtacagagtggagggtgttctgctaatgacttcagagaagtatttaagaaaaacatagaaaaacgtgtgcggagtttgccagaaatagatggcttgagcaaagagacagtgttgagctcatggatagccaaatatgatgccatttacagaggtgaagaggacttgtgcaaacagccaaatagaatggccctaagtgcagtgtctgaacttattctgagcaaggaacaactctatgaaatgtttcagcagattctgggtattaaaaaactggaacaccagctcctttataatgcatgtcagctggataacgcagatgaacaagcagcccagatcagaagggaacttgatggccggctgcaattggcagataaaatggcaaaggaaagaaaattccccaaatttatagcaaaagatatggagaatatgtatatagaagagttgcggtcttcagtgaatttgctaatggccaatttggaaagtcttccagtttcgaaaggtggtccggaatttaaattacaaaaattaaaacgttcacagaactctgcatttttggacataggagatgagaatgagattcagctgtcaaagtccgacgtggtactgtcattcaccttagagattgtcataatggaagtgcaaggcctgaagtcagttgctcccaatcgaattgtttactgtacaatggaagtggaaggagaaaaacttcagacagaccaggccgaagcctcaaggccacaatgggggactcaaggagatttcaccaccacccatcctcggcctgtggtcaaagtgaaactcttcacagaaagcactggagttctggccctggaagataaagaactgggaagggtgatattatacccaacttctaatagctccaaatcagctgaattacaccgaatggtagttccaaaaaatagccaggattctgacttaaaaatcaaactggcagtgcgaatggataaaccagcacatatgaagcatagtggatatctgtatgcccttggacagaaggtttggaaaagatggaaaaaacgttactttgttctagttcaggttagccaatatacctttgctatgtgcagttatagagaaaagaagtctgaaccacaagaattaatgcagcttgaaggctatactgtggattataccgatccccacccaggccttcagggtggttgtatgttctttaatgctgttaaagaaggagatactgtaatctttgccagtgatgatgaacaggacagaatattatgggttcaagccatgtatagggccacaggtcaatcatataaaccagttcctgcaattcaaacccagaaactgaatcctaaaggaggaactctccatgcagatgctcagctttatgcagatcgttttcagaaacatggtatggatgagtttatttctgcaaacccctgcaagcttgatcatgccttcctttttagaatactccagaggcagactttggatcacagactgaatgattcctattcttgcttgggatggtttagccctggccaagtctttgtgttagatgagtactgtgcccgttatggtgtgagaggctgtcacagacatctctgctaccttgcagaactgatggaacattcagaaaatggtgctgtcattgaccctaccctgctccattacagctttgcattctgtgcctctcatgtgcacggcaacaggcctgatggaattgggactgtttcagtggaagaaaaagaaagatttgaggagataaaagagagactctcttcccttttagaaaatcagataagccatttcagatactgttttccctttggacgacctgaaggtgctctaaaagctacactttcattacttgaaagggttttaatgaaagatattgccactcccataccagcagaagaggtgaagaaagtggtcagaaaatgtctcgagaaagctgccttgatcaattacactagactcacagaatatgccaaaatagaagagaccatgaaccaggcatctcctgctagaaagctggaagagattcttcatctggcagagctctgcatagaagtcttacagcagaatgaagagcatcatgcagaggcatttgcctggtggcctgatttattggctgaacatgcagagaaattttgggctttatttacagtggatatggacactgcactagaggctcaaccgcaagactcctgggatagttttcctcttttccaactgcttaataatttcctccgaaatgacacacttttgtgtaatggaaaatttcacaaacacttgcaagaaatctttgtacccttggttgtccgctatgtggatctcatggagtcttccatcgcccagtcaattcacagaggttttgagcaggagacatggcagcctgtcaacaatggctcagcaacatcagaagaccttttttggaagcttgatgcactgcaaatgtttgtctttgatctgcactggccagaacaggaatttgcccaccacttagagcaaagacttaaactaatggccagtgatatgctagaggcctgtgtcaaaagaacaagaactgcatttgaactcaagctacaaaaggcaagcaaaacaactgacttgcgcattccagcttccgtttgcactatgtttaatgtattagtcgatgccaaaaagcaaagcaccaaactctgtgccctggatggaggacaagagtttggtagtcaatggcaacagtaccattcaaaaatagatgatctgatcgacaacagtgtaaaagaaatcatttcactgttagtttcaaagtttgtttcagtgttggaaggcgtgttgtctaagctgtcaaggtatgatgaaggcactttcttttcatccattctgtcattcactgtgaaagcagctgcaaaatatgttgatgttccaaaaccaggaatggatctggcagacacctatattatgtttgttcggcaaaaccaagatattcttcgagaaaaggtcaatgaggaaatgtatatagaaaagttatttgatcaatggtacagcagttccatgaaagtcatttgcgtgtggttgactgatagattagacctccaactccatatttaccagctgaagacgctcatcaagattgtgaagaaaacctacagggactttcgattgcagggtgtgttggaaggaacactgaacagtaagacttatgatactgtgcacagacgtttaacagtagaggaggccacagcctctgtttcagaaggaggaggacttcagggcattactatgaaagacagtgacgaagaagaagaaggctgatatcacacagctttgcagaaggaaggaagaccttgatcgacattgttttttatttttttaaccttgtccttgtaattacattcattgtttgttttggccaaataaaaatgcttgtatttctttaaaaagtaagcctgaatgtagagtaaaaggggaaatgccaagattttggggtttttttgtttcctttttttgtttgtttgtttgtttgtttttttggagaagagcatcctcttttgtgtagtttgacctaaaaatgaaccttggctctgcttgtgatcagaacatgaacttttttttttaaagaagatttgagcatttttctgtaatcacatcaaaatgatgttttctgtgtaaagcgagatacatatttctcataatgcagcattgtgagaagtcagttcggaccactgcaccaacactgtcgtatccttgttaaaatggtgtgtaccttacaaattataatttatgtgccaggttcgttttgtacttaatttgctattattgtgatgtgtataaaatctttaatcttggttcttagtactttgaattggtctacaggtatattcctgggatgaaaggattgccaaacccaaatatagactagattatccaatgggtttgtgtctttgttccattctcaacatttcttctttcaactataagtaatccccaggtgtggggtagcaagtgtgcttccgtcaagataccatattctcctgctccagtataacagcttgcaggcaataaaaatctatttgctcataactacttctgtatttattagacttatatagagcaaatgcagtaaaagaggtttgcagtgtttcaaacatccc

SEQ ID NO: 3990 - DNA, 3438 bp, Homo sapiens
  source 1..3438: mol_type = unassigned DNA
acttgcaaatcgctgtgtgctcgcagaagccagcacttccacagtctctaaccttcccatggcgagtgctgcagctctatcagcagaacctttctctccgtgtgaggaagagcttttttcccccctttccttttttttttttttcctttccccttaatcagaagcactgaatgaaagccaatcagagagagctcgcccccgttttcttcggttccctgctgtccagagttaaaagtgatgctgagaaagagcttgagttagattgaagtagaatcagtgatagaaaataacagccgaaaacaaacaaaaaggggacatagtgacaatttctcctgggttattttggctggaaccaacttccattatccagaagctgataaaaaagctttgggaaacatgaacaaaacattgatgaaatgttggaaaccagttgaaacacagtaaaaccaactgggtaaaataggaccacttctcttcatctacactgggatttgtcaagaagtgaactatgacaatacatcaatttttgctactgtttctattctgggtatgcctgccacatttctgctctccagaaataatgttcagaaggacgcctgtgccacagcaaagaattttaagttcacgtgtaccaaggagtgatggcaaaattctccatcgtcaaaaacgtggttggatgtggaatcaatttttcttacttgaagaatatacaggatctgattatcagtacgtaggcaagctacattcagaccaagataaaggagatggatcactcaaatatatcttatctggagatggagctggtactctttttattattgatgaaaaaacaggtgatattcatgccacaaggcgaattgatagggaggaaaaggccttttatactctacgcgcacaagctattaacagaagaactctgaggccagtagagccagagtcagagtttgtgatcaaaattcatgatatcaatgacaatgagccaacgttcccagaagaaatctatacagctagtgttcccgaaatgtctgttgtaggtacttctgtggtgcaagtcacagctacagatgccgatgacccttcatatgggaacagcgccagagtcatttacagcatacttcaagggcagccctatttctctgtggagcctgaaacaggtatcatcaggactgctttaccgaacatgaacagagaaaacagagagcaataccaagtggtcatccaggccaaagacatgggcggccagatgggaggcttatcggggacaaccactgtgaacatcacgctgacagatgtcaatgacaacccaccacgtttcccccagaacactattcatcttcgagttcttgaatcctccccagttggcacagccattggaagtgtcaaagcaactgatgctgacactgggaaaaatgctgaagtagaataccgaattattgatggtgacggtactgatatgtttgacatcgtgactgagaaggacacacaggaaggcatcatcactgtgaaaaagccactcgactatgagagccgaagactttatactctgaaagtcgaagcagaaaacacccatgtagatccccgtttttattacctaggaccatttaaagatactaccatagtgaaaatctctatagaagatgtggatgaacctcctgtttttagtaggtcctcctatctgtttgaagttcatgaagatattgaagtgggcacaatcattggtactgtaatggcaagggacccagattctatttccagccccattagattttccttggatcgccatactgaccttgacagaatctttaacattcattcaggaaatggatctctttatacatcaaaacctcttgaccgtgaactatctcagtggcataatcttactgttattgctgctgaaatcaacaatcccaaagagacaacacgcgtggctgtttttgtgagaattttggatgttaatgacaatgccccacagtttgctgtgttctatgacacttttgtatgtgaaaatgccagaccagggcagctaatacagactataagtgcagtagacaaagatgaccctttaggtggacagaaattttttttcagtttagctgctgtcaatccaaacttcacagtacaggataatgaagataatactgccagaatcttaaccagaaaaaatggattcaatagacatgaaatcagtacctatctcttgcctgtggtgatatcagacaatgattacccaattcagagcagcacaggcacactgaccattcgagtgtgtgcttgtgacagccaaggcaacatgcaatcctgcagtgctgaagccctgctcctccctgccggcctcagcactggggccttgatcgccatcctcctctgcatcatcattctactggttatagtagtactgtttgcagctctgaaaagacagcgaaaaaaagagcctctgatcttgtcaaaagaagatatcagagacaacattgtgagctataacgatgagggtggtggagaggaggacacccaggcctttgatatcggcaccctgaggaatcctgcagccattgaggaaaaaaagctccggcgagatattattccagaaacgttatttattcctcggaggactcctacagctccagataacacggacgtccgggatttcattaatgaaaggctaaaagagcatgatcttgaccccaccgcacccccctacgactcacttgcaacctatgcctatgaaggaaatgattccattgctgaatctctgagttcattagaatcaggtactactgaaggagaccaaaactacgattacctccgagaatggggccctcggtttaataagctagcagaaatgtatggtggtggggaaagtgacaaagactcttaacgtaggatatatgttctgttcaaacaagagaaagtaactctacccatgctgtctccacttcacaatatttgatattcaggagcattttcctgccagtcagcacaattttttttctcatttacttcttaatttgttcattaattacattaattctttcctgtaggatgtctcatggaatatatatgacattttatttaatcacttccaagagccaaagctatggaaatacagtgttgtccatcttagtaaataaaagataatttcagaaacatgaacaggatagttctcccttaagcaacctcacaaacaagccgcttctgttaggtacatgtcctgcccttgcaaatgaagcttttaaaaaggtgaagaaaaattttacagtatatcctgttctgtacattaaattaaaaaaacaaaaatgtacatgtgatgttagtaggtgtgatatgcaacctggtatacagacatttgtgcaatttcatttcatcaaattctatctgctaatgttttatatttatatttttgtatttatttttaaaaaaataaaccagtttttacaacta

SEQ ID NO: 3991 - DNA, 4164 bp, Homo sapiens
  source 1..4164: mol_type = unassigned DNA
cgcctaatcttcacccgctgctaggctcgtttaatgagtcttctgagagctaaggagtcctcggattcattcaaagcattctacaatgaacgctaggggggaaaaagaacaaacaaaatacatttcaaatataggattcaattacttttcactactcaatgatgtgtcaaaggcacgctgtgttttgttttgagggcggggagatgacaggagggaatcctgggcccccattggctcgccgctcgccgctgcagttgagctccagccgctccgagagcattattgatctgaagggtaaatgtggagggagccacagagaggggtccaggcttttctgagaagagaggcagcctcttccaggaagaaagtggtgtctactggctgcccggcctggagaaccttctttgaatgaaaacggacaaaatgcaaagcagtgtgttggcacagtgatttggaaaggggaaacagaagagaagggtctcaccttccgcgcaaggctgagctgttggcaccctgctgcggccgtcggtgctgctgctcctgcagctgccttttctgccatcagctttgttacctaacagcttggctcttttgggaaatatagacaagctggaacccaggagcagttgggagttttaaagaatgccagcctttttaaagctttgatgtccagtgctatagaatcaagttactgtggaggtcaaaacaatttgagatacataagctggccttagaaaataaattgcctctaacttacagtgaggagctcaacataacagggaaaaggagcacaggatgcagctacttggagggtgttgattgaaaacttcgatctccccaccccattcacggttgatttgacggatttctcacctcgttcacagagaaaatttcaattaaggcccctttagatggaatataatacagcagaagccttttcatcaaaaggattaatgcctgcatcatcatttctgcaataaaacaagaagctaagtggtggaggccacagacacctcaaacctggattccacaattctacgttaagtgttggagtttttattactctgctgtaggaaagcctttgccaatgcttacaaggaactgtttatccctgcttctctgggttctgtttgatggaggtctcctaacaccactacaaccacagccacagcagactttagccacagagccaagagaaaatgttatccatctgccaggacaacggtcacatttccaacgtgttaaacgtggctgggtatggaatcaattttttgtgctggaagaatacgtgggctccgagcctcagtatgtgggaaagctccattccgacttagacaagggagagggcactgtgaaatacaccctctcaggagatggcgctggcaccgtttttaccattgatgaaaccacaggggacattcatgcaataaggagcctagatagagaagagaaacctttctacactcttcgtgctcaggctgtggacatagaaaccagaaagcccctggagcctgaatcagaattcatcatcaaagtgcaggatattaatgataatgagccaaagtttttggatggaccttatgttgctactgttccagaaatgtctcctgtgggtgcatatgtactccaggtcaaggccacagatgcagatgacccgacctatggaaacagtgccagagtcgtttacagcattcttcagggacaaccttatttctctattgatcccaagacaggtgttattagaacagctttgccaaacatggacagagaagtcaaagaacaatatcaagtactcatccaagccaaggatatgggaggacagcttggaggattagccggaacaacaatagtcaacatcactctcaccgatgtcaatgacaatccacctcgattccccaaaagcatcttccacttgaaagttcctgagtcttcccctattggttcagctattggaagaataagagctgtggatcctgattttggacaaaatgcagaaattgaatacaatattgttccaggagatgggggaaatttgtttgacatcgtcacagatgaggatacacaagagggagtcatcaaattgaaaaagcctttagattttgaaacaaagaaggcatacactttcaaagttgaggcttccaaccttcaccttgaccaccggtttcactcggcgggccctttcaaagacacagctacggtgaagatcagcgtgctggacgtagatgagccaccggttttcagcaagccgctctacaccatggaggtttatgaagacactccggtagggaccatcattggcgctgtcactgctcaagacctggatgtaggcagcagtgctgttaggtacttcatagattggaagagtgatggggacagctactttacaatagatggaaatgaaggaaccatcgccactaatgaattactagacagagaaagcactgcgcagtataatttctccataattgcgagtaaagttagtaaccctttattgaccagcaaagtcaatatactgattaatgtcttagatgtaaatgaatttcctccagaaatatctgtgccatatgagacagccgtgtgtgaaaatgccaagccaggacagataattcagatagtcagtgctgcagaccgagatctttcacctgctgggcaacaattctcctttagattatcacctgaggctgctatcaaaccaaattttacagttcgtgacttcagaaacaacacagcggggattgaaacccgaagaaatggatacagccgcaggcagcaagagttgtatttcctccctgttgtaatagaagacagcagctaccctgtccagagcagcacaaacacaatgactattcgagtctgtagatgtgactctgatggcaccatcctgtcttgtaatgtggaagcaatttttctacctgtaggacttagcactggggcgttgattgcaattctactatgcattgttatactcttagccatagttgtactgtatgtagcactgcgaaggcagaagaaaaaagacaccctgatgacctctaaagaagacatcagagacaacgtcatccattacgatgatgaaggaggtggggaggaagatacccaggctttcgacatcggggctctgagaaacccaaaagtgattgaggagaacaaaattcgcagggatataaaaccagactctctctgtttacctcgtcagagaccacccatggaagataacacagacataagggatttcattcatcaaaggctacaggaaaatgatgtggatccaactgccccaccatacgattcactggccacatatgcctacgaagggagtgggtccgtggcagagtccctcagctctatagactctctcaccacagaagccgaccaggactatgactatctgacagactggggaccccgctttaaagtcttggcagacatgtttggcgaagaagagagttataaccctgataaagtcacttaagggagtcgtggaggctaaaatacaaccgagaggggagatttttaaaaaagaaaaagaaacacaaatattaatagaaatctctctcacacacacacacacacacaaacacacacacacacacacacactctgggacaagattcctttgattacctggtttctagtaagttactaaattaatcatattgtcagttttggtttattctgccaacaagagatacatcctataatgtgtacttgctttgttttgttgttttgttttttcacaatcacactgagacaagctcaggcctattcaatacaatttactgacatgacaacctagaacgaagatagctatgtggcatcacggtggaagagtgttagatttttcttaattccactaaagtgcctattgaaactcttatcatttaaagtggtgtacagtacactctgctgtgatggtattgcgggattcagagataaagacataaaacaaagacaccgtctttatgtcaagaagcaatagcgacactctgactctcctcattccttttgagaacaaaagaagaacactttctgatctccaccttcttctaattcaaaaggttttctttttcttttttaaactgtatgctaaaacgtatttgtttatcctatcctttcagaaaattgaaataaatatgaaaatatcaagttcaatatgtaagtccc

SEQ ID NO: 3992 - DNA, 4163 bp, Homo sapiens
  source 1..4163: mol_type = unassigned DNA
attgatctgaagggtaaatgtggagggagccacagagaggggtccaggcttttctgagaagagaggcagcctcttccaggaagaaagtggtgtctactggctgcccggcctggagaaccttctttgaatgaaaacggacaaaatgcaaagcagtgtgttggcacagtgatttggaaaggggaaacagaagagaagggtctcaccttccgcgcaaggctgagctgttggcaccctgctgcggccgtcggtgctgctgctcctgcagctgccttttctgccatcagctttgttacctaacagcttggctcttttgggaaatatagacaagctggaacccaggagcagttgggagttttaaagaatgccagcctttttaaagacagtgaggagctcaacataacagggaaaaggagcacaggatgcagctacttggagggtgttgattgaaaacttcgatctccccaccccattcacggttgatttgacggatttctcacctcgttcacagagaaaatttcaattagcccctttagatggaatataatacagcagaagccttttcatcaaaaggattaatgcctgcatcatcatttctgcaataaaacaagaagctaagtggtggaggccacagacacctcaaacctggattccacaattctacgttaagtgttggagtttttattactctgctgtaggaaagcctttgccaatgcttacaaggaactgtttatccctgcttctctgggttctgtttgatggaggtctcctaacaccactacaaccacagccacagcagactttagccacagagccaagagaaaatgttatccatctgccaggacaacggtcacatttccaacgtgttaaacgtggctgggtatggaatcaattttttgtgctggaagaatacgtgggctccgagcctcagtatgtgggaaagctccattccgacttagacaagggagagggcactgtgaaatacaccctctcaggagatggcgctggcaccgtttttaccattgatgaaaccacaggggacattcatgcaataaggagcctagatagagaagagaaacctttctacactcttcgtgctcaggctgtggacatagaaaccagaaagcccctggagcctgaatcagaattcatcatcaaagtgcaggatattaatgataatgagccaaagtttttggatggaccttatgttgctactgttccagaaatgtctcctgtgggtgcatatgtactccaggtcaaggccacagatgcagatgacccgacctatggaaacagtgccagagtcgtttacagcattcttcagggacaaccttatttctctattgatcccaagacaggtgttattagaacagctttgccaaacatggacagagaagtcaaagaacaatatcaagtactcatccaagccaaggatatgggaggacagcttggaggattagccggaacaacaatagtcaacatcactctcaccgatgtcaatgacaatccacctcgattccccaaaagcatcttccacttgaaagttcctgagtcttcccctattggttcagctattggaagaataagagctgtggatcctgattttggacaaaatgcagaaattgaatacaatattgttccaggagatgggggaaatttgtttgacatcgtcacagatgaggatacacaagagggagtcatcaaattgaaaaagcctttagattttgaaacaaagaaggcatacactttcaaagttgaggcttccaaccttcaccttgaccaccggtttcactcggcgggccctttcaaagacacagctacggtgaagatcagcgtgctggacgtagatgagccaccggttttcagcaagccgctctacaccatggaggtttatgaagacactccggtagggaccatcattggcgctgtcactgctcaagacctggatgtaggcagcagtgctgttaggtacttcatagattggaagagtgatggggacagctactttacaatagatggaaatgaaggaaccatcgccactaatgaattactagacagagaaagcactgcgcagtataatttctccataattgcgagtaaagttagtaaccctttattgaccagcaaagtcaatatactgattaatgtcttagatgtaaatgaatttcctccagaaatatctgtgccatatgagacagccgtgtgtgaaaatgccaagccaggacagataattcagatagtcagtgctgcagaccgagatctttcacctgctgggcaacaattctcctttagattatcacctgaggctgctatcaaaccaaattttacagttcgtgacttcagaaacaacacagcggggattgaaacccgaagaaatggatacagccgcaggcagcaagagttgtatttcctccctgttgtaatagaagacagcagctaccctgtccagagcagcacaaacacaatgactattcgagtctgtagatgtgactctgatggcaccatcctgtcttgtaatgtggaagcaatttttctacctgtaggacttagcactggggcgttgattgcaattctactatgcattgttatactcttagccatagttgtactgtatgtagcactgcgaaggcagaagaaaaaagacaccctgatgacctctaaagaagacatcagagacaacgtcatccattacgatgatgaaggaggtggggaggaagatacccaggctttcgacatcggggctctgagaaacccaaaagtgattgaggagaacaaaattcgcagggatataaaaccagactctctctgtttacctcgtcagagaccacccatggaagataacacagacataagggatttcattcatcaaaggctacaggaaaatgatgtggatccaactgccccaccatacgattcactggccacatatgcctacgaagggagtgggtccgtggcagagtccctcagctctatagactctctcaccacagaagccgaccaggactatgactatctgacagactggggaccccgctttaaagtcttggcagacatgtttggcgaagaagagagttataaccctgataaagtcacttaagggagtcgtggaggctaaaatacaaccgagaggggagatttttaaaaaagaaaaagaaacacaaatattaatagaaatctctctcacacacacacacacacacaaacacacacacacacacacacactctgggacaagattcctttgattacctggtttctagtaagttactaaattaatcatattgtcagttttggtttattctgccaacaagagatacatcctataatgtgtacttgctttgttttgttgttttgttttttcacaatcacactgagacaagctcaggcctattcaatacaatttactgacatgacaacctagaacgaagatagctatgtggcatcacggtggaagagtgttagatttttcttaattccactaaagtgcctattgaaactcttatcatttaaagtggtgtacagtacactctgctgtgatggtattgcgggattcagagataaagacataaaacaaagacaccgtctttatgtcaagaagcaatagcgacactctgactctcctcattccttttgagaacaaaagaagaacactttctgatctccaccttcttctaattcaaaaggttttctttttcttttttaaactgtatgctaaaacgtatttgtttatcctatcctttcagaaaattgaaataaatatgaaaatatcaagttcaatatgtaagtcccaaattctagaaacaatgtttgatcttaacattagttcacattaaagctgttcattaaaatgttactttcttttccaaaaaaaaaagaaagaaaaaaaagaaaaaatattcctctttataaagagaggcctcagggctcaaattacacattaaaataaatattggttttgcttaatattgtactggtgtgtggaaaattggttttaacagtcaccagattcagcttttagtcatagatgtaatttcaagttgtgtttctatgaaaattcttagaagaaaaaagtgccattcatttaagcatggaaagagaaattcattatacagtttctcagagtttcttacaatctagtgattctttgatgagcagcaaaaataaaa

SEQ ID NO: 3993 - DNA, 3028 bp, Homo sapiens
  source 1..3028: mol_type = unassigned DNA
tctttttatgttatttgcataattttatcctgcaaaagtgagagctgtcaaaaattaaccatttggggctttggcattcagttatgtgaccttttccagagagttagatctcttcagggaactaggaacttgatgaggaagtgctgagaaggtggtcagtggcagaaagagcggatgacggatggggaccagcagtgaggagctcaacataacagggaaaaggagcacaggatgcagctacttggagggtgttgattgaaaacttcgatctccccaccccattcacggttgatttgacggatttctcacctcgttcacagagaaaatttcaattaaggcccctttagatggaatataatacagcagaagccttttcatcaaaaggattaatgcctgcatcatcatttctgcaataaaacaagaagctaagtggtggaggccacagacacctcaaacctggattccacaattctacgttaagtgttggagtttttattactctgctgtaggaaagcctttgccaatgcttacaaggaactgtttatccctgcttctctgggttctgtttgatggaggtctcctaacaccactacaaccacagccacagcagactttagccacagagccaagagaaaatgttatccatctgccaggacaacggtcacatttccaacgtgttaaacgtggctgggtatggaatcaattttttgtgctggaagaatacgtgggctccgagcctcagtatgtgggaaagctccattccgacttagacaagggagagggcactgtgaaatacaccctctcaggagatggcgctggcaccgtttttaccattgatgaaaccacaggggacattcatgcaataaggagcctagatagagaagagaaacctttctacactcttcgtgctcaggctgtggacatagaaaccagaaagcccctggagcctgaatcagaattcatcatcaaagtgcaggatattaatgataatgagccaaagtttttggatggaccttatgttgctactgttccagaaatgtctcctgtgggtgttattagaacagctttgccaaacatggacagagaagtcaaagaacaatatcaagtactcatccaagccaaggatatgggaggacagcttggaggattagccggaacaacaatagtcaacatcactctcaccgatgtcaatgacaatccacctcgattccccaaaagcatcttccacttgaaagttcctgagtcttcccctattggttcagctattggaagaataagagctgtggatcctgattttggacaaaatgcagaaattgaatacaatattgttccaggagatgggggaaatttgtttgacatcgtcacagatgaggatacacaagagggagtcatcaaattgaaaaagcctttagattttgaaacaaagaaggcatacactttcaaagttgaggcttccaaccttcaccttgaccaccggtttcactcggcgggccctttcaaagacacagctacggtgaagatcagcgtgctggacgtagatgagccaccggttttcagcaagccgctctacaccatggaggtttatgaagacactccggtagggaccatcattggcgctgtcactgctcaagacctggatgtaggcagcagtgctgttaggtacttcatagattggaagagtgatggggacagctactttacaatagatggaaatgaaggaaccatcgccactaatgaattactagacagagaaagcactgcgcagtataatttctccataattgcgagtaaagttagtaaccctttattgaccagcaaagtcaatatactgattaatgtcttagatgtaaatgaatttcctccagaaatatctgtgccatatgagacagccgtgtgtgaaaatgccaagccaggacagataattcagatagtcagtgctgcagaccgagatctttcacctgctgggcaacaattctcctttagattatcacctgaggctgctatcaaaccaaattttacagttcgtgacttcagaaacaacacagcggggattgaaacccgaagaaatggatacagccgcaggcagcaagagttgtatttcctccctgttgtaatagaagacagcagctaccctgtccagagcagcacaaacacaatgactattcgagtctgtagatgtgactctgatggcaccatcctgtcttgtaatgtggaagcaatttttctacctgtaggacttagcactggggcgttgattgcaattctactatgcattgttatactcttagccatagttgtactgtatgtagcactgcgaaggcagaagaaaaaagacaccctgatgacctctaaagaagacatcagagacaacgtcatccattacgatgatgaaggaggtggggaggaagatacccaggctttcgacatcggggctctgagaaacccaaaagtgattgaggagaacaaaattcgcagggatataaaaccagactctctctgtttacctcgtcagagaccacccatggaagataacacagacataagggatttcattcatcaaaggctacaggaaaatgatgtggatccaactgccccaccatacgattcactggccacatatgcctacgaagggagtgggtccgtggcagagtccctcagctctatagactctctcaccacagaagccgaccaggactatgactatctgacagactggggaccccgctttaaagtcttggcagacatgtttggcgaagaagagagttataaccctgataaagtcacttaagggagtcgtggaggctaaaatacaaccgagaggggagatttttaaaaaagaaaaagaaacacaaatattaatagaaatctctctcacacacacacacacacacaaacacacacacacacacacacactctgggacaagattcctttgattacctggtttctagtaagttactaaattaatcatattgtcagttttggtttattctgccaacaagagatacatcctataatgtgtacttgc

SEQ ID NO: 3994 - DNA, 2847 bp, Homo sapiens
  source 1..2847: mol_type = unassigned DNA
actcagcctggacgcgcttcttcgggtcgcgggtgcactccggcccggctcccgcctcggccccgatggacgccgcgttcctcctcgtcctcgggctgttggcccagagcctctgcctgtctttgggggttcctggatggaggaggcccaccaccctgtacccctggcgccgggcgcctgccctgagccgcgtgcggagggcctgggtcatccccccgatcagcgtatccgagaaccacaagcgtctcccctaccccctggttcagatcaagtcggacaagcagcagctgggcagcgtcatctacagcatccagggacccggcgtggatgaggagccccggggcgtcttctctatcgacaagttcacagggaaggtcttcctcaatgccatgctggaccgcgagaagactgatcgcttcaggctaagagcgtttgccctggacctgggaggatccaccctggaggaccccacggacctggagattgtagttgtggatcagaatgacaaccggccagccttcctgcaggaggcgttcactggccgcgtgctggagggtgcagtcccaggcacctatgtgaccagggcagaggccacagatgccgacgaccccgagacggacaacgcagcgctgcggttctccatcctgcagcagggcagccccgagctcttcagcatcgacgagctcacaggagagatccgcacagtgcaagtggggctggaccgcgaggtggtcgcggtgtacaatctgaccctgcaggtggcggacatgtctggagacggcctcacagccactgcctcagccatcatcacccttgatgacatcaatgacaatgcccccgagttcaccagggatgagttcttcatggaggccatagaggccgtcagcggagtggatgtgggacgcctggaagtggaggacagggacctgccaggctccccaaactgggtggccaggttcaccatcctggaaggcgaccccgatgggcagttcaccatccgcacggaccccaagaccaacgagggtgttctgtccattgtgaaggccctggactatgagagctgtgaacactacgaactcaaagtgtcggtgcagaatgaggccccgctgcaggcggctgcccttagggctgagcggggccaggccaaggtccgcgtgcatgtgcaggacaccaacgagccccccgtgttccaggagaacccacttcggaccagcctagcagagggggcacccccaggcactctggtggccaccttctctgcccgggaccctgacacagagcagctgcagaggctcagctactccaaggactacgacccggaagactggctgcaagtggacgcagccactggccggatccagacccagcacgtgctcagcccggcgtcccccttcctcaagggcggctggtacagagccatcgtcctggcccaggatgacgcctcccagccccgcaccgccaccggcaccctgtccatcgagatcctggaggtgaacgaccatgcacctgtgctggccccgccgccgccgggcagcctgtgcagcgagccacaccaaggcccaggcctcctcctgggcgccacggatgaggacctgcccccccacggggcccccttccacttccagctgagccccaggctcccagagctcggccggaactggagcctcagccaggtcaacgtgagccacgcgcgcctgcggccgcgacaccaggtccccgaaggcctgcaccgcctcagcctgctgctccgggactcggggcagccgccccagcagcgcgagcagcctctgaacgtgaccgtgtgccgctgcggcaaggacggcgtctgcctgccgggggccgcagcgctgctggcggggggcacaggcctcagcctgggcgcactggtcatcgtgctggccagcgccctcctgctgctggtgctggtcctgctcgtggcactccgggcgcggttctggaagcagtctcggggcaaggggctgctgcacggcccccaggacgaccttcgagacaatgtcctcaactacgatgagcaaggaggcggggaggaggaccaggacgcctacgacatcagccagctgcgtcacccgacagcgctgagcctgcctctgggaccgccgccacttcgcagagatgccccgcagggccgcctgcacccccagccaccccgagtgctgcccaccagccccctggacatcgccgacttcatcaatgatggcttggaggctgcagatagtgaccccagtgtgccgccttacgacacagccctcatctatgactacgagggtgacggctcggtggcggggacgctgagctccatcctgtccagccagggcgatgaggaccaggactacgactacctcagagactgggggccccgcttcgcccggctggcagacatgtatgggcacccgtgcgggttggagtacggggccagatgggaccaccaggccagggagggtctttctcctggggcactgctacccagacacagaggccggacagcctgaccctggggcgcaactggacatgccactccccggcctcgtggcagtgatggcccctgcagaggcagcctgaggtcaccgggcccgacccccctgggcctggggcagcctccttcctgtaggcgagggcccaagtctgggggcagaacctgagtgtggatggggcggccaggaagaggccccttcctgccggggtgggaagagtttctctccatcggccccatgcgggtcacctccctagtcccacctttgcctcctaccagtgaacctcatctttgtatgaaagacagcaacctcctgggtaaatctgaatgaaaaacgtgctagtctctttcatgca

SEQ ID NO: 3995 - DNA, 2694 bp, Homo sapiens
  source 1..2694: mol_type = unassigned DNA
ttgcttggcagctggaccaagggagccagtcttgggcgctggagggcctgtcctgaccatggtccctgcctggctgtggctgctttgtgtctccgtcccccaggctctccccaaggcccagcctgcagagctgtctgtggaagttccagaaaactatggtggaaatttccctttatacctgaccaagttgccgctgccccgtgagggggctgaaggccagatcgtgctgtcaggggactcaggcaaggcaactgagggcccatttgctatggatccagattctggcttcctgctggtgaccagggccctggaccgagaggagcaggcagagtaccagctacaggtcaccctggagatgcaggatggacatgtcttgtggggtccacagcctgtgcttgtgcacgtgaaggatgagaatgaccaggtgccccatttctctcaagccatctacagagctcggctgagccggggtaccaggcctggcatccccttcctcttccttgaggcttcagaccgggatgagccaggcacagccaactcggatcttcgattccacatcctgagccaggctccagcccagccttccccagacatgttccagctggagcctcggctgggggctctggccctcagccccaaggggagcaccagccttgaccacgccctggagaggacctaccagctgttggtacaggtcaaggacatgggtgaccaggcctcaggccaccaggccactgccaccgtggaagtctccatcatagagagcacctgggtgtccctagagcctatccacctggcagagaatctcaaagtcctatacccgcaccacatggcccaggtacactggagtgggggtgatgtgcactatcacctggagagccatcccccgggaccctttgaagtgaatgcagagggaaacctctacgtgaccagagagctggacagagaagcccaggctgagtacctgctccaggtgcgggctcagaattcccatggcgaggactatgcggcccctctggagctgcacgtgctggtgatggatgagaatgacaacgtgcctatctgccctccccgtgaccccacagtcagcatccctgagctcagtccaccaggtactgaagtgactagactgtcagcagaggatgcagatgcccccggctcccccaattcccacgttgtgtatcagctcctgagccctgagcctgaggatggggtagaggggagagccttccaggtggaccccacttcaggcagtgtgacgctgggggtgctcccactccgagcaggccagaacatcctgcttctggtgctggccatggacctggcaggcgcagagggtggcttcagcagcacgtgtgaagtcgaagtcgcagtcacagatatcaatgatcacgcccctgagttcatcacttcccagattgggcctataagcctccctgaggatgtggagcccgggactctggtggccatgctaacagccattgatgctgacctcgagcccgccttccgcctcatggattttgccattgagaggggagacacagaagggacttttggcctggattgggagccagactctgggcatgttagactcagactctgcaagaacctcagttatgaggcagctccaagtcatgaggtggtggtggtggtgcagagtgtggcgaagctggtggggccaggcccaggccctggagccaccgccacggtgactgtgctagtggagagagtgatgccaccccccaagttggaccaggagagctacgaggccagtgtccccatcagtgccccagccggctctttcctgctgaccatccagccctccgaccccatcagccgaaccctcaggttctccctagtcaatgactcagagggctggctctgcattgagaaattctccggggaggtgcacaccgcccagtccctgcagggcgcccagcctggggacacctacacggtgcttgtggaggcccaggatacagaccatggcttgatcgtgagtggacccagcaaggaccccgatctggccagtgggcacggtccctacagcttcacccttggtcccaaccccacggtgcaacgggattggcgcctccagactctcaatggttcccatgcctacctcaccttggccctgcattgggtggagccacgtgaacacataatccccgtggtggtcagccacaatgcccagatgtggcagctcctggttcgagtgatcgtgtgtcgctgcaacgtggaggggcagtgcatgcgcaaggtgggccgcatgaagggcatgcccacgaagctgtcggcagtgggcatccttgtaggcaccctggtagcaataggaatcttcctcatcctcattttcacccactggaccatgtcaaggaagaaggacccggatcaaccagcagacagcgtgcccctgaaggcgactgtctgaatggcccaggcagctctagctgggagcttggcctctggctccatctgagtcccctgggagagagcccagcacccaagatccagcaggggacaggacagagtagaagcccctccatctgccctggggtggaggcaccatcaccatcaccaggcatgtctgcagagcctggacaccaactttatggactgcccatgggagtgctccaaatgtcagggtgtttgcccaataataaagccccagagaactgggctgggccctatggg

SEQ ID NO: 3996 - DNA, 2526 bp, Homo sapiens
  source 1..2526: mol_type = unassigned DNA
ttgcttggcagctggaccaagggagccagtcttgggcgctggagggcctgtcctgaccatggtccctgcctggctgtggctgctttgtgtctccgtcccccaggctctccccaaggcccagcctgcagagctgtctgtggaagttccagaaaactatggtggaaatttccctttatacctgaccaagttgccgctgccccgtgagggggctgaaggccagatcgtgctgtcaggggactcaggcaaggcaactgagggcccatttgctatggatccagattctggcttcctgctggtgaccagggccctggaccgagaggagcaggcagagtaccagctacaggtcaccctggagatgcaggatggacatgtcttgtggggtccacagcctgtgcttgtgcacgtgaaggatgagaatgaccaggcctcaggccaccaggccactgccaccgtggaagtctccatcatagagagcacctgggtgtccctagagcctatccacctggcagagaatctcaaagtcctatacccgcaccacatggcccaggtacactggagtgggggtgatgtgcactatcacctggagagccatcccccgggaccctttgaagtgaatgcagagggaaacctctacgtgaccagagagctggacagagaagcccaggctgagtacctgctccaggtgcgggctcagaattcccatggcgaggactatgcggcccctctggagctgcacgtgctggtgatggatgagaatgacaacgtgcctatctgccctccccgtgaccccacagtcagcatccctgagctcagtccaccaggtactgaagtgactagactgtcagcagaggatgcagatgcccccggctcccccaattcccacgttgtgtatcagctcctgagccctgagcctgaggatggggtagaggggagagccttccaggtggaccccacttcaggcagtgtgacgctgggggtgctcccactccgagcaggccagaacatcctgcttctggtgctggccatggacctggcaggcgcagagggtggcttcagcagcacgtgtgaagtcgaagtcgcagtcacagatatcaatgatcacgcccctgagttcatcacttcccagattgggcctataagcctccctgaggatgtggagcccgggactctggtggccatgctaacagccattgatgctgacctcgagcccgccttccgcctcatggattttgccattgagaggggagacacagaagggacttttggcctggattgggagccagactctgggcatgttagactcagactctgcaagaacctcagttatgaggcagctccaagtcatgaggtggtggtggtggtgcagagtgtggcgaagctggtggggccaggcccaggccctggagccaccgccacggtgactgtgctagtggagagagtgatgccaccccccaagttggaccaggagagctacgaggccagtgtccccatcagtgccccagccggctctttcctgctgaccatccagccctccgaccccatcagccgaaccctcaggttctccctagtcaatgactcagagggctggctctgcattgagaaattctccggggaggtgcacaccgcccagtccctgcagggcgcccagcctggggacacctacacggtgcttgtggaggcccaggatacagatgagccgagactgagcgcttctgcacccctggtgatccacttcctaaaggcccctcctgccccagccctgactcttgcccctgtgccctcccaatacctctgcacaccccgccaagaccatggcttgatcgtgagtggacccagcaaggaccccgatctggccagtgggcacggtccctacagcttcacccttggtcccaaccccacggtgcaacgggattggcgcctccagactctcaatggttcccatgcctacctcaccttggccctgcattgggtggagccacgtgaacacataatccccgtggtggtcagccacaatgcccagatgtggcagctcctggttcgagtgatcgtgtgtcgctgcaacgtggaggggcagtgcatgcgcaaggtgggccgcatgaagggcatgcccacgaagctgtcggcagtgggcatccttgtaggcaccctggtagcaataggaatcttcctcatcctcattttcacccactggaccatgtcaaggaagaaggacccggatcaaccagcagacagcgtgcccctgaaggcgactgtctgaatggcccaggcagctctagctgggagcttggcctctggctccatctgagtcccctgggagagagcccagcacccaagatccagcaggggacaggacagagtagaagcccctccatctgccctggggtggaggcaccatcaccatcaccaggcatgtctgcagagcctggacaccaactttatggactgcccatgggagtgctccaaatgtcagggtgtttgcccaataataaagccccagagaactgggctgggccctatgggattggt

SEQ ID NO: 3997 - DNA, 2927 bp, Homo sapiens
  source 1..2927: mol_type = unassigned DNA
ttttccactcctgagcaagcgtggctgaaccctcctacctgctcaagtgccctgccttgccccacccagcccagcctggccagagccccctggagaaggagctctcttcttgcttggcagctggaccaagggagccagtcttgggcgctggagggcctgtcctgaccatggtccctgcctggctgtggctgctttgtgtctccgtcccccaggctctccccaaggcccagcctgcagagctgtctgtggaagttccagaaaactatggtggaaatttccctttatacctgaccaagttgccgctgccccgtgagggggctgaaggccagatcgtgctgtcaggggactcaggcaaggcaactgagggcccatttgctatggatccagattctggcttcctgctggtgaccagggccctggaccgagaggagcaggcagagtaccagctacaggtcaccctggagatgcaggatggacatgtcttgtggggtccacagcctgtgcttgtgcacgtgaaggatgagaatgaccaggtgccccatttctctcaagccatctacagagctcggctgagccggggtaccaggcctggcatccccttcctcttccttgaggcttcagaccgggatgagccaggcacagccaactcggatcttcgattccacatcctgagccaggctccagcccagccttccccagacatgttccagctggagcctcggctgggggctctggccctcagccccaaggggagcaccagccttgaccacgccctggagaggacctaccagctgttggtacaggtcaaggacatgggtgaccaggcctcaggccaccaggccactgccaccgtggaagtctccatcatagagagcacctgggtgtccctagagcctatccacctggcagagaatctcaaagtcctatacccgcaccacatggcccaggtacactggagtgggggtgatgtgcactatcacctggagagccatcccccgggaccctttgaagtgaatgcagagggaaacctctacgtgaccagagagctggacagagaagcccaggctgagtacctgctccaggtgcgggctcagaattcccatggcgaggactatgcggcccctctggagctgcacgtgctggtgatggatgagaatgacaacgtgcctatctgccctccccgtgaccccacagtcagcatccctgagctcagtccaccaggtactgaagtgactagactgtcagcagaggatgcagatgcccccggctcccccaattcccacgttgtgtatcagctcctgagccctgagcctgaggatggggtagaggggagagccttccaggtggaccccacttcaggcagtgtgacgctgggggtgctcccactccgagcaggccagaacatcctgcttctggtgctggccatggacctggcaggcgcagagggtggcttcagcagcacgtgtgaagtcgaagtcgcagtcacagatatcaatgatcacgcccctgagttcatcacttcccagattgggcctataagcctccctgaggatgtggagcccgggactctggtggccatgctaacagccattgatgctgacctcgagcccgccttccgcctcatggattttgccattgagaggggagacacagaagggacttttggcctggattgggagccagactctgggcatgttagactcagactctgcaagaacctcagttatgaggcagctccaagtcatgaggtggtggtggtggtgcagagtgtggcgaagctggtggggccaggcccaggccctggagccaccgccacggtgactgtgctagtggagagagtgatgccaccccccaagttggaccaggagagctacgaggccagtgtccccatcagtgccccagccggctctttcctgctgaccatccagccctccgaccccatcagccgaaccctcaggttctccctagtcaatgactcagagggctggctctgcattgagaaattctccggggaggtgcacaccgcccagtccctgcagggcgcccagcctggggacacctacacggtgcttgtggaggcccaggatacagatgagccgagactgagcgcttctgcacccctggtgatccacttcctaaaggcccctcctgccccagccctgactcttgcccctgtgccctcccaatacctctgcacaccccgccaagaccatggcttgatcgtgagtggacccagcaaggaccccgatctggccagtgggcacggtccctacagcttcacccttggtcccaaccccacggtgcaacgggattggcgcctccagactctcaatggttcccatgcctacctcaccttggccctgcattgggtggagccacgtgaacacataatccccgtggtggtcagccacaatgcccagatgtggcagctcctggttcgagtgatcgtgtgtcgctgcaacgtggaggggcagtgcatgcgcaaggtgggccgcatgaagggcatgcccacgaagctgtcggcagtgggcatccttgtaggcaccctggtagcaataggaatcttcctcatcctcattttcacccactggaccatgtcaaggaagaaggacccggatcaaccagcagacagcgtgcccctgaaggcgactgtctgaatggcccaggcagctctagctgggagcttggcctctggctccatctgagtcccctgggagagagcccagcacccaagatccagcaggggacaggacagagtagaagcccctccatctgccctggggtggaggcaccatcaccatcaccaggcatgtctgcagagcctggacaccaactttatggactgcccatgggagtgctccaaatgtcagggtgtttgcccaataataaagccccagagaactgggctgggccctatgggattggta

SEQ ID NO: 3998 - DNA, 2821 bp, Homo sapiens
  source 1..2821: mol_type = unassigned DNA
gctcaagtgccctgccttgccccacccagcccagcctggccagagccccctggagaaggagctctcttcttgcttggcagctggaccaagggagccagtcttgggcgctggagggcctgtcctgaccatggtccctgcctggctgtggctgctttgtgtctccgtcccccaggctctccccaaggcccagcctgcagagctgtctgtggaagttccagaaaactatggtggaaatttccctttatacctgaccaagttgccgctgccccgtgagggggctgaaggccagatcgtgctgtcaggggactcaggcaaggcaactgagggcccatttgctatggatccagattctggcttcctgctggtgaccagggccctggaccgagaggagcaggcagagtaccagctacaggtcaccctggagatgcaggatggacatgtcttgtggggtccacagcctgtgcttgtgcacgtgaaggatgagaatgaccaggtgccccatttctctcaagccatctacagagctcggctgagccggggtaccaggcctggcatccccttcctcttccttgaggcttcagaccgggatgagccaggcacagccaactcggatcttcgattccacatcctgagccaggctccagcccagccttccccagacatgttccagctggagcctcggctgggggctctggccctcagccccaaggggagcaccagccttgaccacgccctggagaggacctaccagctgttggtacaggtcaaggacatgggtgaccaggcctcaggccaccaggccactgccaccgtggaagtctccatcatagagagcacctgggtgtccctagagcctatccacctggcagagaatctcaaagtcctatacccgcaccacatggcccaggtacactggagtgggggtgatgtgcactatcacctggagagccatcccccgggaccctttgaagtgaatgcagagggaaacctctacgtgaccagagagctggacagagaagcccaggctgagtacctgctccaggtgcgggctcagaattcccatggcgaggactatgcggcccctctggagctgcacgtgctggtgatggatgagaatgacaacgtgcctatctgccctccccgtgaccccacagtcagcatccctgagctcagtccaccaggtactgaagtgactagactgtcagcagaggatgcagatgcccccggctcccccaattcccacgttgtgtatcagctcctgagccctgagcctgaggatggggtagaggggagagccttccaggtggaccccacttcaggcagtgtgacgctgggggtgctcccactccgagcaggccagaacatcctgcttctggtgctggccatggacctggcaggcgcagagggtggcttcagcagcacgtgtgaagtcgaagtcgcagtcacagatatcaatgatcacgcccctgagttcatcacttcccagattgggcctataagcctccctgaggatgtggagcccgggactctggtggccatgctaacagccattgatgctgacctcgagcccgccttccgcctcatggattttgccattgagaggggagacacagaagggacttttggcctggattgggagccagactctgggcatgttagactcagactctgcaagaacctcagttatgaggcagctccaagtcatgaggtggtggtggtggtgcagagtgtggcgaagctggtggggccaggcccaggccctggagccaccgccacggtgactgtgctagtggagagagtgatgccaccccccaagttggaccaggagagctacgaggccagtgtccccatcagtgccccagccggctctttcctgctgaccatccagccctccgaccccatcagccgaaccctcaggttctccctagtcaatgactcagagggctggctctgcattgagaaattctccggggaggtgcacaccgcccagtccctgcagggcgcccagcctggggacacctacacggtgcttgtggaggcccaggatacagccctgactcttgcccctgtgccctcccaatacctctgcacaccccgccaagaccatggcttgatcgtgagtggacccagcaaggaccccgatctggccagtgggcacggtccctacagcttcacccttggtcccaaccccacggtgcaacgggattggcgcctccagactctcaatggttcccatgcctacctcaccttggccctgcattgggtggagccacgtgaacacataatccccgtggtggtcagccacaatgcccagatgtggcagctcctggttcgagtgatcgtgtgtcgctgcaacgtggaggggcagtgcatgcgcaaggtgggccgcatgaagggcatgcccacgaagctgtcggcagtgggcatccttgtaggcaccctggtagcaataggaatcttcctcatcctcattttcacccactggaccatgtcaaggaagaaggacccggatcaaccagcagacagcgtgcccctgaaggcgactgtctgaatggcccaggcagctctagctgggagcttggcctctggctccatctgagtcccctgggagagagcccagcacccaagatccagcaggggacaggacagagtagaagcccctccatctgccctggggtggaggcaccatcaccatcaccaggcatgtctgcagagcctggacaccaactttatggactgcccatgggagtgctccaaatgtcagggtgtttgcccaataataaagccccagagaactgggctgggccctatgggattggta

SEQ ID NO: 3999 - DNA, 2473 bp, Homo sapiens
  source 1..2473: mol_type = unassigned DNA
cttcttgcttggcagctggaccaagggagccagtcttgggcgctggagggcctgtcctgaccatggtccctgcctggctgtggctgctttgtgtctccgtcccccaggctctccccaaggcccagcctgcagagctgtctgtggaagttccagaaaactatggtggaaatttccctttatacctgaccaagttgccgctgccccgtgagggggctgaaggccagatcgtgctgtcaggggagcaggcagagatgcaggatggacatgtcttgtggggtccacagcctgtgcttgtgcacgtgaaggatgagaatgaccaggtgccccatttctctcaagccatctacagagctcggctgagccggggtaccaggcctggcatccccttcctcttccttgaggcttcagaccgggatgagccaggcacagccaactcggatcttcgattccacatcctgagccaggctccagcccagccttccccagacatgttccagctggagcctcggctgggggctctggccctcagccccaaggggagcaccagccttgaccacgccctggagaggacctaccagctgttggtacaggtcaaggacatgggtgaccaggcctcaggccaccaggccactgccaccgtggaagtctccatcatagagagcacctgggtgtccctagagcctatccacctggcagagaatctcaaagtcctatacccgcaccacatggcccaggtacactggagtgggggtgatgtgcactatcacctggagagccatcccccgggaccctttgaagtgaatgcagagggaaacctctacgtgaccagagagctggacagagaagcccaggctgagtacctgctccaggtgcgggctcagaattcccatggcgaggactatgcggcccctctggagctgcacgtgctggtgatggatgagaatgacaacgtgcctatctgccctccccgtgaccccacagtcagcatccctgagctcagtccaccaggtactgaagtgactagactgtcagcagaggatgcagatgcccccggctcccccaattcccacgttgtgtatcagctcctgagccctgagcctgaggatggggtagaggggagagccttccaggtggaccccacttcaggcagtgtgacgctgggggtgctcccactccgagcaggccagaacatcctgcttctggtgctggccatggacctggcaggcgcagagggtggcttcagcagcacgtgtgaagtcgaagtcgcagtcacagatatcaatgatcacgcccctgagttcatcacttcccagattgggcctataagcctccctgaggatgtggagcccgggactctggtggccatgctaacagccattgatgctgacctcgagcccgccttccgcctcatggattttgccattgagaggggagacacagaagggacttttggcctggattgggagccagactctgggcatgttagactcagactctgcaagaacctcagttatgaggcagctccaagtcatgaggtggtggtggtggtgcagagtgtggcgaagctggtggggccaggcccaggccctggagccaccgccacggtgactgtgctagtggagagagtgatgccaccccccaagttggaccaggagagctacgaggccagtgtccccatcagtgccccagccggctctttcctgctgaccatccagccctccgaccccatcagccgaaccctcaggttctccctagtcaatgactcagagggctggctctgcattgagaaattctccggggaggtgcacaccgcccagtccctgcagggcgcccagcctggggacacctacacggtgcttgtggaggcccaggatacagatgagccgagactgagcgcttctgcacccctggtgatccacttcctaaaggcccctcctgccccagccctgactcttgcccctgtgccctcccaatacctctgcacaccccgccaagaccatggcttgatcgtgagtggacccagcaaggaccccgatctggccagtgggcacggtccctacagcttcacccttggtcccaaccccacggtgcaacgggattggcgcctccagactctcaatggttcccatgcctacctcaccttggccctgcattgggtggagccacgtgaacacataatccccgtggtggtcagccacaatgcccagatgtggcagctcctggttcgagtgatcgtgtgtcgctgcaacgtggaggggcagtgcatgcgcaaggtgggccgcatgaagggcatgcccacgaagctgtcggcagtgggcatccttgtaggcaccctggtagcaataggaatcttcctcatcctcattttcacccactggaccatgtcaaggaagaaggacccggatcaaccagcagacagcgtgcccctgaaggcgactgtctgaatggcccaggcagctctagctgggagctt

SEQ ID NO: 4000 - DNA, 3693 bp, Homo sapiens
  source 1..3693: mol_type = unassigned DNA
ggaagagggagtgttcccgggggagatactccagtcgtagcaagagtctcgaccactgaatggaagaaaaggacttttaaccaccattttgtgacttacagaaaggaatttgaataaagaaaactatgatacttcaggcccatcttcactccctgtgtcttcttatgctttatttggcaactggatatggccaagaggggaagtttagtggacccctgaaacccatgacattttctatttatgaaggccaagaaccgagtcaaattatattccagtttaaggccaatcctcctgctgtgacttttgaactaactggggagacagacaacatatttgtgatagaacgggagggacttctgtattacaacagagccttggacagggaaacaagatctactcacaatctccaggttgcagccctggacgctaatggaattatagtggagggtccagtccctatcaccataaaagtgaaggacatcaacgacaatcgacccacgtttctccagtcaaagtacgaaggctcagtaaggcagaactctcgcccaggaaagcccttcttgtatgtcaatgccacagacctggatgatccggccactcccaatggccagctttattaccagattgtcatccagcttcccatgatcaacaatgtcatgtactttcagatcaacaacaaaacgggagccatctctcttacccgagagggatctcaggaattgaatcctgctaagaatccttcctataatctggtgatctcagtgaaggacatgggaggccagagtgagaattccttcagtgataccacatctgtggatatcatagtgacagagaatatttggaaagcaccaaaacctgtggagatggtggaaaactcaactgatcctcaccccatcaaaatcactcaggtgcggtggaatgatcccggtgcacaatattccttagttgacaaagagaagctgccaagattcccattttcaattgaccaggaaggagatatttacgtgactcagcccttggaccgagaagaaaaggatgcatatgttttttatgcagttgcaaaggatgagtacggaaaaccactttcatatccgctggaaattcatgtaaaagttaaagatattaatgataatccacctacatgtccgtcaccagtaaccgtatttgaggtccaggagaatgaacgactgggtaacagtatcgggacccttactgcacatgacagggatgaagaaaatactgccaacagttttctaaactacaggattgtggagcaaactcccaaacttcccatggatggactcttcctaatccaaacctatgctggaatgttacagttagctaaacagtccttgaagaagcaagatactcctcagtacaacttaacgatagaggtgtctgacaaagatttcaagaccctttgttttgtgcaaatcaacgttattgatatcaatgatcagatccccatctttgaaaaatcagattatggaaacctgactcttgctgaagacacaaacattgggtccaccatcttaaccatccaggccactgatgctgatgagccatttactgggagttctaaaattctgtatcatatcataaagggagacagtgagggacgcctgggggttgacacagatccccataccaacaccggatatgtcataattaaaaagcctcttgattttgaaacagcagctgtttccaacattgtgttcaaagcagaaaatcctgagcctctagtgtttggtgtgaagtacaatgcaagttcttttgccaagttcacgcttattgtgacagatgtgaatgaagcacctcaattttcccaacacgtattccaagcgaaagtcagtgaggatgtagctataggcactaaagtgggcaatgtgactgccaaggatccagaaggtctggacataagctattcactgaggggagacacaagaggttggcttaaaattgaccacgtgactggtgagatctttagtgtggctccattggacagagaagccggaagtccatatcgggtacaagtggtggccacagaagtaggggggtcttccttgagctctgtgtcagagttccacctgatccttatggatgtgaatgacaaccctcccaggctagccaaggactacacgggcttgttcttctgccatcccctcagtgcacctggaagtctcattttcgaggctactgatgatgatcagcacttatttcggggtccccattttacattttccctcggcagtggaagcttacaaaacgactgggaagtttccaaaatcaatggtactcatgcccgactgtctaccaggcacacagagtttgaggagagggagtatgtcgtcttgatccgcatcaatgatgggggtcggccacccttggaaggcattgtttctttaccagttacattctgcagttgtgtggaaggaagttgtttccggccagcaggtcaccagactgggatacccactgtgggcatggcagttggtatactgctgaccacccttctggtgattggtataattttagcagttgtgtttatccgcataaagaaggataaaggcaaagataatgttgaaagtgctcaagcatctgaagtcaaacctctgagaagctgaatttgaaaaggaatgtttgaatttatatagcaagtgctatttcagcaacaaccatctcatcctattacttttcatctaacgtgcattataattttttaaacagatattccctcttgtcctttaatatttgctaaatatttcttttttgaggtggagtcttgctctgtcgcccaggctggagtacagtggtgtgatcccagctcactgcaacctccgcctcctgggttcacatgattctcctgcctcagcttcctaagtagctgggtttacaggcacccaccaccatgcccagctaatttttgtatttttaatagagacggggtttcgccatttggccaggctggtcttgaactcctgacgtcaagtgatctgcctgccttggtctcccaatacaggcatgaaccactgcacccacctacttagatatttcatgtgctatagacattagagagatttttcatttttccatgacatttttcctctctgcaaatggcttagctacttgtgtttttcccttttggggcaagacagactcattaaatattctgtacattttttctttatcaaggagatatatcagtgttgtctcatagaactgcctggattccatttatgttttttctgattccatcctgtgtccccttcatccttgactcctttggtatttcactgaatttcaaacatttgtcagagaagaaaaacgtgaggactcaggaaaaataaataaataaaagaacagccttttcccttagtattaacagaaatgtttctgtgtcattaaccatctttaatcaatgtgacatgttgctctttggctgaaattcttcaacttggaaatgacacagacccacagaaggtgttcaaacacaacctactctgcaaaccttggtaaaggaaccagtcagctggccagatttcctcactacctgccatgcatacatgctgcgcatgttttcttcattcgtatgttagtaaagttttggttattatatatttaacatgtggaagaaaacaagacatgaaaagagtggtgacaaatcaagaataaacactggttgtagtcagtttt

SEQ ID NO: 4001 - DNA, 2625 bp, Homo sapiens
  source 1..2625: mol_type = unassigned DNA
aatcacggtggaagtatgatattttggctgtggatctgagttgatcaatctgcttagtggacttgagtccccccacccccgcttgtctgattggggctcctgggaggaatttgaataaagaaaactatgatacttcaggcccatcttcactccctgtgtcttcttatgctttatttggcaactggatatggccaagaggggaagtttagtggacccctgaaacccatgacattttctatttatgaaggccaagaaccgagtcaaattatattccagtttaaggccaatcctcctgctgtgacttttgaactaactggggagacagacaacatatttgtgatagaacgggagggacttctgtattacaacagagccttggacagggaaacaagatctactcacaatctccaggttgcagccctggacgctaatggaattatagtggagggtccagtccctatcaccataaaagtgaaggacatcaacgacaatcgacccacgtttctccagtcaaagtacgaaggctcagtaaggcagaactctcgcccaggaaagcccttcttgtatgtcaatgccacagacctggatgatccggccactcccaatggccagctttattaccagattgtcatccagcttcccatgatcaacaatgtcatgtactttcagatcaacaacaaaacgggagccatctctcttacccgagagggatctcaggaattgaatcctgctaagaatccttcctataatctggtgatctcagtgaaggacatgggaggccagagtgagaattccttcagtgataccacatctgtggatatcatagtgacagagaatatttggaaagcaccaaaacctgtggagatggtggaaaactcaactgatcctcaccccatcaaaatcactcaggtgcggtggaatgatcccggtgcacaatattccttagttgacaaagagaagctgccaagattcccattttcaattgaccaggaaggagatatttacgtgactcagcccttggaccgagaagaaaaggatgcatatgttttttatgcagttgcaaaggatgagtacggaaaaccactttcatatccgctggaaattcatgtaaaagttaaagatattaatgataatccacctacatgtccgtcaccagtaaccgtatttgaggtccaggagaatgaacgactgggtaacagtatcgggacccttactgcacatgacagggatgaagaaaatactgccaacagttttctaaactacaggattgtggagcaaactcccaaacttcccatggatggactcttcctaatccaaacctatgctggaatgttacagttagctaaacagtccttgaagaagcaagatactcctcagtacaacttaacgatagaggtgtctgacaaagatttcaagaccctttgttttgtgcaaatcaacgttattgatatcaatgatcagatccccatctttgaaaaatcagattatggaaacctgactcttgctgaagacacaaacattgggtccaccatcttaaccatccaggccactgatgctgatgagccatttactgggagttctaaaattctgtatcatatcataaagggagacagtgagggacgcctgggggttgacacagatccccataccaacaccggatatgtcataattaaaaagcctcttgattttgaaacagcagctgtttccaacattgtgttcaaagcagaaaatcctgagcctctagtgtttggtgtgaagtacaatgcaagttcttttgccaagttcacgcttattgtgacagatgtgaatgaagcacctcaattttcccaacacgtattccaagcgaaagtcagtgaggatgtagctataggcactaaagtgggcaatgtgactgccaaggatccagaaggtctggacataagctattcactgaggggagacacaagaggttggcttaaaattgaccacgtgactggtgagatctttagtgtggctccattggacagagaagccggaagtccatatcgggtacaagtggtggccacagaagtaggggggtcttccttgagctctgtgtcagagttccacctgatccttatggatgtgaatgacaaccctcccaggctagccaaggactacacgggcttgttcttctgccatcccctcagtgcacctggaagtctcattttcgaggctactgatgatgatcagcacttatttcggggtccccattttacattttccctcggcagtggaagcttacaaaacgactgggaagtttccaaaatcaatggtactcatgcccgactgtctaccaggcacacagagtttgaggagagggagtatgtcgtcttgatccgcatcaatgatgggggtcggccacccttggaaggcattgtttctttaccagttacattctgcagttgtgtggaaggaagttgtttccggccagcaggtcaccagactgggatacccactgtgggcatggcagttggtatactgctgaccacccttctggtgattggtataattttagcagttgtgtttatccgcataaagaaggataaaggcaaagataatgttgaaagtgctcaagcatctgaagtcaaacctctgagaagctga

SEQ ID NO: 4002 - DNA, 637 bp, Homo sapiens
  source 1..637: mol_type = unassigned DNA
agtcgtagcaagagtctcgaccactgaatggaagaaaaggacttttaaccaccattttgtgacttacagaaagggtctcgctctgtcacccaggctgcagtgcagtggcgcaatcatggctggctgcaacctctgcctcctgggctcaagtgatcctcccacctcagcctcccaggaatttgaataaagaaaactatgatacttcaggcccatcttcactccctgtgtcttcttatgctttatttggcaactggatatggccaagaggggaagtttagtggacccctgaaacccatgacattttctatttatgaaggccaagaaccgagtcaaattatattccagtttaaggccaatcctcctgctgtgacttttgaactaactggggagacagacaacatatttgtgatagaacgggagggacttctgtattacaacagagccttggacagggaaacaagatctactcacaatctccaggttgcagccctggacgctaatggaattatagtggagggtccagtccctatcaccataaaagtgaaggacatcaacgacaatcgacccacgtttctccagtcaaagtacgaaggctcagtaaggcagaactctcgcccaggaaagcccttcttgtatg

SEQ ID NO: 4003 - DNA, 2885 bp, Homo sapiens
  source 1..2885: mol_type = unassigned DNA
tttaagtactgcagtcatctaatgtacttcaccagcagaatctaaattctagatccaagaaagattattgtcagctggctttattcagggtccaattctgagcccagtatcaagtaataaagattgagtggtgtgataattagagatgcttcaaccaaagttttcaaaaatgggaacatattgaacccttggttctacaactaccttcttacaacgaagttagtatgcagtgctctccaagtcaataaggaaagtggttgaaaatggttgcttgtgttcaactactgtgaagagttggaatcagacaactacggctttgattttccaagtggttcagaatgtaaatatgatctgacctttccctgatggacagttaaatcatggacacgctaaacaatttactttggactgtccttcctaaagatgctctggcttctctcttgaatgctcactaagctttcgtagctgacaaggaaaggaaggaaaactgtgaactggaaagttatcttacaatgaaaattactagcacatcttgcatctgtccagtcctagtgtgtctctgttttgtgcagaggtgttatggaactgctcaccacagctccatcaaggtgatgagaaaccaaaccaaacacattgaaggtgaaaccgaagtccatcatcgtcccaaaaggggatgggtatggaatcagttctttgttttagaagaacatatgggaccagatcctcagtatgttggaaagctgcactccaattctgacaaaggtgatggatctgtcaagtacatccttactggagagggtgctgggactatatttatcattgacgataccacgggtgatatccactcaacaaaaagcctagacagagagcagaagacccactatgtgcttcatgctcaagctattgatagacgtacaaacaaacctcttgagcctgaatccgagttcatcatcaaagtgcaagacatcaatgacaacgctccaaaattcacagatggaccatacattgttactgtgcctgaaatgtcagatatgggtacctctgttctacaggtgacagctactgatgcagatgaccctacctatggaaacagcgctcgggtggtttacagcattctccaaggacaaccctacttctccgtcgaccctaaaacaggagttattagaacggccttacataacatggacagagaagccagagaacattactccgtagtcattcaagccaaagacatggctgggcaagttggagggctttcaggatctacaacagtcaacatcaccttaaccgatgtcaatgacaacccaccacgctttcctcaaaaacactatcagctatatgttcctgagtcagctcaagttggttcagctgttgggaaaatcaaggcaaatgatgctgacactggctcaaatgctgacatgacctactccatcataaatggtgatggcatgggaatattctcaatctccactgacaaagagaccagagaaggaatcctttctttaaagaagccactgaactatgagaaaaagaagtcatataccctcaacatagaaggagcaaatacacatcttgattttcgcttttctcacttgggtccttttaaagatgctactatgctgaagatcattgttggggatgtagatgaaccaccactattttccatgccttcctacctcatggaagtctacgaaaatgccaagattgggaccgtcgttggtacagttttggcacaagatcctgacagtactaacagcttagtaagatacttcatcaactacaatgttgaagacgacagatttttcaacattgatgccaatactgggaccattaggactacaaaggttctcgacagagaagaaactccatggtacaacatcacagtcactgcttcagaaattgataatcctgatttgctgagccatgtcacagtgggtattagagttctggatgtcaatgacaatccacccgaacttgccagggaatatgatattattgtatgtgaaaattctaagcctggccaggttattcataccatcagtgccactgataaagatgattttgccaatggaccaaggtttaacttctttcttgatgaacgcctgcctgtaaatccaaacttcactctgaaggacaatgaagataacacagccagcattctgacaaggcggaggagatttagtcgaactgttcaggatgtgtattatctgcccattatgatctctgatggtggaatcccctctctcagcagcagcagcaccctcaccatcagggtttgtgcatgcgagagagatgggcgtgtgcggacctgccatgcagaagccttcctgtcctcggctggtttgagtacaggagccttaatcgctattcttctctgtgttctcattctcctggcaattgtggtactttttatcaccctgaggcgcagcaaaaaagagcccttgatcatttcagaagaggatgtacgggagaacgtggtcacctatgatgatgaaggaggcggagaggaagacacagaggcctttgacatcacagccttgaggaatccttctgctgctgaggagctcaagtaccggagggatatcagacctgaagtgaagctcactcccagacaccagacatcatccaccctggaaagcatagatgttcaggaatttattaagcaaagactggcagaagcagacctagaccctagcgttcccccttatgactctcttcagacttatgcctatgagggtcagagatcagaagctgggtctatcagctcgctggattcagcaacgacacaatcagaccaggattatcactaccttggagactggggacccgagtttaaaaagttagctgaactctatggagaaatagaatctgaaagaacaacttag

SEQ ID NO: 4004 - DNA, 3087 bp, Homo sapiens
  source 1..3087: mol_type = unassigned DNA
ggagcccagggctcgaggtgcgcggagcctgagtctgggctttccgaggacggcgagcagctgtgcccagagctctgggaaagtcccctctctttgcttcttataaattaagttcctttccaccagttagggcaagtccgccaagatagactgaagaggagcaagaacagaaacagggagccagttacagatctatcccaagaattctggggagagatgatggtgtctgcagcagagtgacagcagtggagattgagagaaaaggttgaaaatggttgcttgtgttcaactactgtgaagagttggaatcagacaactacggctttgattttccaagtggttcagaatgtaaatatgatctgacctttccctgatggacagttaaatcatggacacgctaaacaatttactttggactgtccttcctaaagatgctctggcttctctcttgaatgctcactaagctttcgtagctgacaaggaaaggaaggaaaactgtgaactggaaagttatcttacaatgaaaattactagcacatcttgcatctgtccagtcctagtgtgtctctgttttgtgcagaggtgttatggaactgctcaccacagctccatcaaggtgatgagaaaccaaaccaaacacattgaaggtgaaaccgaagtccatcatcgtcccaaaaggggatgggtatggaatcagttctttgttttagaagaacatatgggaccagatcctcagtatgttggaaagctgcactccaattctgacaaaggtgatggatctgtcaagtacatccttactggagagggtgctgggactatatttatcattgacgataccacgggtgatatccactcaacaaaaagcctagacagagagcagaagacccactatgtgcttcatgctcaagctattgatagacgtacaaacaaacctcttgagcctgaatccgagttcatcatcaaagtgcaagacatcaatgacaacgctccaaaattcacagatggaccatacattgttactgtgcctgaaatgtcagatatgggtacctctgttctacaggtgacagctactgatgcagatgaccctacctatggaaacagcgctcgggtggtttacagcattctccaaggacaaccctacttctccgtcgaccctaaaacaggagttattagaacggccttacataacatggacagagaagccagagaacattactccgtagtcattcaagccaaagacatggctgggcaagttggagggctttcaggatctacaacagtcaacatcaccttaaccgatgtcaatgacaacccaccacgctttcctcaaaaacactatcagctatatgttcctgagtcagctcaagttggttcagctgttgggaaaatcaaggcaaatgatgctgacactggctcaaatgctgacatgacctactccatcataaatggtgatggcatgggaatattctcaatctccactgacaaagagaccagagaaggaatcctttctttaaagaagccactgaactatgagaaaaagaagtcatataccctcaacatagaaggagcaaatacacatcttgattttcgcttttctcacttgggtccttttaaagatgctactatgctgaagatcattgttggggatgtagatgaaccaccactattttccatgccttcctacctcatggaagtctacgaaaatgccaagattgggaccgtcgttggtacagttttggcacaagatcctgacagtactaacagcttagtaagatacttcatcaactacaatgttgaagacgacagatttttcaacattgatgccaatactgggaccattaggactacaaaggttctcgacagagaagaaactccatggtacaacatcacagtcactgcttcagaaattgataatcctgatttgctgagccatgtcacagtgggtattagagttctggatgtcaatgacaatccacccgaacttgccagggaatatgatattattgtatgtgaaaattctaagcctggccaggttattcataccatcagtgccactgataaagatgattttgccaatggaccaaggtttaacttctttcttgatgaacgcctgcctgtaaatccaaacttcactctgaaggacaatgaagataacacagccagcattctgacaaggcggaggagatttagtcgaactgttcaggatgtgtattatctgcccattatgatctctgatggtggaatcccctctctcagcagcagcagcaccctcaccatcagggtttgtgcatgcgagagagatgggcgtgtgcggacctgccatgcagaagccttcctgtcctcggctggtttgagtacaggagccttaatcgctattcttctctgtgttctcattctcctggcaattgtggtactttttatcaccctgaggcgcagcaaaaaagagcccttgatcatttcagaagaggatgtacgggagaacgtggtcacctatgatgatgaaggaggcggagaggaagacacagaggcctttgacatcacagccttgaggaatccttctgctgctgaggagctcaagtaccggagggatatcagacctgaagtgaagctcactcccagacaccagacatcatccaccctggaaagcatagatgttcaggaatttattaagcaaagactggcagaagcagacctagaccctagcgttcccccttatgactctcttcagacttatgcctatgagggtcagagatcagaagctgggtctatcagctcgctggattcagcaacgacacaatcagaccaggattatcactaccttggagactggggacccgagtttaaaaagttagctgaactctatggagaaatagaatctgaaagaacaacttagggggtcagttcttgcaaccttgtggaatttgcttcctgagtaagtggatatacaacctcagcaatgacaaggaagaagtgtggaaacagtacttggaactgaggaagctggacacagctcctgtagaaacaagtgcccttttcatgatcgaaactgggttatttaattggaagaaagtaaaaaaaaaaaaaaaa

SEQ ID NO: 4005 - DNA, 2386 bp, Homo sapiens
  source 1..2386: mol_type = unassigned DNA
gaggacggcgagcagctgtgcccagagctctgggaaagtcccctctctttgcttcttataaattaagttcctttccaccagttagggcaagtccgccaagatagactgaagaggagcaagaacagaaacagggagccagttacagatctatcccaagaattctggggagagatgatggtgtctgcagcagagtgacagcagtggagattgagagaaaaggttgaaaatggttgcttgtgttcaactactgtgaagagttggaatcagacaactacggctttgattttccaagtggttcagaatgtaaatatgatctgacctttccctgatggacagttaaatcatggacacgctaaacaatttactttggactgtccttcctaaagatgctctggcttctctcttgaatgctcactaagctttcgtagctgacaaggaaaggaaggaaaactgtgaactggaaagttatcttacaatgaaaattactagcacatcttgcatctgtccagtcctagtgtgtctctgttttgtgcagaggtgttatggaactgctcaccacagctccatcaaggtgatgagaaaccaaaccaaacacattgaaggtgaaaccgaagtccatcatcgtcccaaaaggggatgggtatggaatcagttctttgttttagaagaacatatgggaccagatcctcagtatgttggaaagctgcactccaattctgacaaaggtgatggatctgtcaagtacatccttactggagagggtgctgggactatatttatcattgacgataccacgggtgatatccactcaacaaaaagcctagacagagagcagaagacccactatgtgcttcatgctcaagctattgatagacgtacaaacaaacctcttgagcctgaatccgagttcatcatcaaagtgcaagacatcaatgacaacgctccaaaattcacagatggaccatacattgttactgtgcctgaaatgtcagatatgggtacctctgttctacaggtgacagctactgatgcagatgaccctacctatggaaacagcgctcgggtggtttacagcattctccaaggacaaccctacttctccgtcgaccctaaaacaggagttattagaacggccttacataacatggacagagaagccagagaacattactccgtagtcattcaagccaaagacatggctgggcaagttggagggctttcaggatctacaacagtcaacatcaccttaaccgatgtcaatgacaacccaccacgctttcctcaaaaacactatcagctatatgttcctgagtcagctcaagttggttcagctgttgggaaaatcaaggcaaatgatgctgacactggctcaaatgctgacatgacctactccatcataaatggtgatggcatgggaatattctcaatctccactgacaaagagaccagagaaggaatcctttctttaaagaagccactgaactatgagaaaaagaagtcatataccctcaacatagaaggagcaaatacacatcttgattttcgcttttctcacttgggtccttttaaagatgctactatgctgaagatcattgttggggatgtagatgaaccaccactattttccatgccttcctacctcatggaagtctacgaaaatgccaagattgggaccgtcgttggtacagttttggcacaagatcctgacagtactaacagcttagtaagatacttcatcaactacaatgttgaagacgacagatttttcaacattgatgccaatactgggaccattaggactacaaaggttctcgacagagaagaaactccatggtacaacatcacagtcactgcttcagaaattgataatcctgatttgctgagccatgtcacagtgggtattagagttctggatgtcaatgacaatccacccgaacttgccagggaatatgatattattgtatgtgaaaattctaagcctggccaggttattcataccatcagtgccactgataaagatgattttgccaatggaccaaggtttaacttctttcttgatgaacgcctgcctgtaaatccaaacttcactctgaaggacaatgaagcagcagcaccctcaccatcagggtttgtgcatgcgagagagatgggcgtgtgcggacctgccatgcagaagccttcctgtcctcggctggtttgagtacaggagccttaatcgctattcttctctgtgttctcattctcctggcaattgtggtactttttatcaccctgaggcgcagcaaaaaagagcccttgatcatttcagaagaggatgtacgggagaacgtggtcacctatgatgatgaaggaggcggagaggaagacacagaggcctttgacatca

SEQ ID NO: 4006 - DNA, 3542 bp, Homo sapiens
  source 1..3542: mol_type = unassigned DNA
tagattgattatacagcagcagcatgagctgagtctcagagctgagcgagcgtcagggtgaaaaggaaagagagaaagagagagagagagaaaaaaaagcggggagagagagagagagaggaacacaaggtggggaggaagccagtgcacgttccatagcatcactactgtgactgcttgtacccgataatcttgctctgcagctccctcagtgaacaacttactgaggtgcctttctttttacaagaggatgtcagctctgagctccagcaagaaataacagacttcaccttggaatagctcatcttactcctgcatcattaaagcggattttcaaaagaaaacaaaaatcaagtcccctttccagttccactttcttccagcattgaacaggaacagtttcacgctccaggactcaaccacagcaatatgtaagaagaacacacaccaaacattcctgaagtgatttaaaagatggaatctcgctctgtctcccaggctggagtgcagtggcgcaatctcagctcattgcaacctccacctcctgggttcacgccattctcctgcctcagcctcctgagtagctgggactacaggcgcccgccaccacgccaggatagactgaagaggagcaagaacagaaacagggagccagttacagatctatcccaagaattctggggagagatgatggtgtctgcagcagagtgacagcagtggagattgagagaaaaggttgaaaatggttgcttgtgttcaactactgtgaagagttggaatcagacaactacggctttgattttccaagtggttcagaatgtaaatatgatctgacctttccctgatggacagttaaatcatggacacgctaaacaatttactttggactgtccttcctaaagatgctctggcttctctcttgaatgctcactaagctttcgtagctgacaaggaaaggaaggaaaactgtgaactggaaagttatcttacaatgaaaattactagcacatcttgcatctgtccagtcctagtgtgtctctgttttgtgcagaggtgttatggaactgctcaccacagctccatcaaggtgatgagaaaccaaaccaaacacattgaaggtgaaaccgaagtccatcatcgtcccaaaaggggatgggtatggaatcagttctttgttttagaagaacatatgggaccagatcctcagtatgttggaaagctgcactccaattctgacaaaggtgatggatctgtcaagtacatccttactggagagggtgctgggactatatttatcattgacgataccacgggtgatatccactcaacaaaaagcctagacagagagcagaagacccactatgtgcttcatgctcaagctattgatagacgtacaaacaaacctcttgagcctgaatccgagttcatcatcaaagtgcaagacatcaatgacaacgctccaaaattcacagatggaccatacattgttactgtgcctgaaatgtcagatatgggtacctctgttctacaggtgacagctactgatgcagatgaccctacctatggaaacagcgctcgggtggtttacagcattctccaaggacaaccctacttctccgtcgaccctaaaacaggagttattagaacggccttacataacatggacagagaagccagagaacattactccgtagtcattcaagccaaagacatggctgggcaagttggagggctttcaggatctacaacagtcaacatcaccttaaccgatgtcaatgacaacccaccacgctttcctcaaaaacactatcagctatatgttcctgagtcagctcaagttggttcagctgttgggaaaatcaaggcaaatgatgctgacactggctcaaatgctgacatgacctactccatcataaatggtgatggcatgggaatattctcaatctccactgacaaagagaccagagaaggaatcctttctttaaagaagccactgaactatgagaaaaagaagtcatataccctcaacatagaaggagcaaatacacatcttgattttcgcttttctcacttgggtccttttaaagatgctactatgctgaagatcattgttggggatgtagatgaaccaccactattttccatgccttcctacctcatggaagtctacgaaaatgccaagattgggaccgtcgttggtacagttttggcacaagatcctgacagtactaacagcttagtaagatacttcatcaactacaatgttgaagacgacagatttttcaacattgatgccaatactgggaccattaggactacaaaggttctcgacagagaagaaactccatggtacaacatcacagtcactgcttcagaaattgataatcctgatttgctgagccatgtcacagtgggtattagagttctggatgtcaatgacaatccacccgaacttgccagggaatatgatattattgtatgtgaaaattctaagcctggccaggttattcataccatcagtgccactgataaagatgattttgccaatggaccaaggtttaacttctttcttgatgaacgcctgcctgtaaatccaaacttcactctgaaggacaatgaagataacacagccagcattctgacaaggcggaggagatttagtcgaactgttcaggatgtgtattatctgcccattatgatctctgatggtggaatcccctctctcagcagcagcagcaccctcaccatcagggtttgtgcatgcgagagagatgggcgtgtgcggacctgccatgcagaagccttcctgtcctcggctggtttgagtacaggagccttaatcgctattcttctctgtgttctcattctcctggcaattgtggtactttttatcaccctgaggcgcagcaaaaaagagcccttgatcatttcagaagaggatgtacgggagaacgtggtcacctatgatgatgaaggaggcggagaggaagacacagaggcctttgacatcacagccttgaggaatccttctgctgctgaggagctcaagtaccggagggatatcagacctgaagtgaagctcactcccagacaccagacatcatccaccctggaaagcatagatgttcaggaatttattaagcaaagactggcagaagcagacctagaccctagcgttcccccttatgactctcttcagacttatgcctatgagggtcagagatcagaagctgggtctatcagctcgctggattcagcaacgacacaatcagaccaggattatcactaccttggagactggggacccgagtttaaaaagttagctgaactctatggagaaatagaatctgaaagaacaacttagggggtcagttcttgcaaccttgtggaatttgcttcctgagtaagtggatatacaacctcagcaatgacaaggaagaagtgtggaaacagtacttggaactgaggaagctggacacagctcctgtagaaacaagtgcccttttcatgatcgaaactgggttatttaattggaagaaagt

SEQ ID NO: 4007 - DNA, 3544 bp, Homo sapiens
  source 1..3544: mol_type = unassigned DNA
tagattgattatacagcagcagcatgagctgagtctcagagctgagcgagcgtcagggtgaaaaggaaagagagaaagagagagagagagaaaaaaaagcggggagagagagagagagaggaacacaaggtggggaggaagccagtgcacgttccatagcatcactactgtgactgcttgtacccgataatcttgctctgcagctccctcagtgaacaacttactgaggtgcctttctttttacaagaggatgtcagctctgagctccagcaagaaataacagacttcaccttggaatagctcatcttactcctgcatcattaaagcggattttcaaaagaaaacaaaaatcaagtcccctttccagttccactttcttccagcattgaacaggaacagtttcacgctccaggagctcaagaccataaataattttgtagcagcaaacaatacacttttatgtatttattgagaaggtggagtctcgctctgtctcccaggctggagtgcagtggcgcaatctcagctcattgcaacctccacctcctgggttcacgccattctcctgcctcagcctcctgagtagctgggactacaggcgcccgccaccacgccaggatagactgaagaggagcaagaacagaaacagggagccagttacagatctatcccaagaattctggggagagatgatggtgtctgcagcagagtgacagcagtggagattgagagaaaaggttgaaaatggttgcttgtgttcaactactgtgaagagttggaatcagacaactacggctttgattttccaagtggttcagaatgtaaatatgatctgacctttccctgatggacagttaaatcatggacacgctaaacaatttactttggactgtccttcctaaagatgctctggcttctctcttgaatgctcactaagctttcgtagctgacaaggaaaggaaggaaaactgtgaactggaaagttatcttacaatgaaaattactagcacatcttgcatctgtccagtcctagtgtgtctctgttttgtgcagaggtgttatggaactgctcaccacagctccatcaaggtgatgagaaaccaaaccaaacacattgaaggtgaaaccgaagtccatcatcgtcccaaaaggggatgggtatggaatcagttctttgttttagaagaacatatgggaccagatcctcagtatgttggaaagctgcactccaattctgacaaaggtgatggatctgtcaagtacatccttactggagagggtgctgggactatatttatcattgacgataccacgggtgatatccactcaacaaaaagcctagacagagagcagaagacccactatgtgcttcatgctcaagctattgatagacgtacaaacaaacctcttgagcctgaatccgagttcatcatcaaagtgcaagacatcaatgacaacgctccaaaattcacagatggaccatacattgttactgtgcctgaaatgtcagatatgggtacctctgttctacaggtgacagctactgatgcagatgaccctacctatggaaacagcgctcgggtggtttacagcattctccaaggacaaccctacttctccgtcgaccctaaaacaggagttattagaacggccttacataacatggacagagaagccagagaacattactccgtagtcattcaagccaaagacatggctgggcaagttggagggctttcaggatctacaacagtcaacatcaccttaaccgatgtcaatgacaacccaccacgctttcctcaaaaacactatcagctatatgttcctgagtcagctcaagttggttcagctgttgggaaaatcaaggcaaatgatgctgacactggctcaaatgctgacatgacctactccatcataaatggtgatggcatgggaatattctcaatctccactgacaaagagaccagagaaggaatcctttctttaaagaagccactgaactatgagaaaaagaagtcatataccctcaacatagaaggagcaaatacacatcttgattttcgcttttctcacttgggtccttttaaagatgctactatgctgaagatcattgttggggatgtagatgaaccaccactattttccatgccttcctacctcatggaagtctacgaaaatgccaagattgggaccgtcgttggtacagttttggcacaagatcctgacagtactaacagcttagtaagatacttcatcaactacaatgttgaagacgacagatttttcaacattgatgccaatactgggaccattaggactacaaaggttctcgacagagaagaaactccatggtacaacatcacagtcactgcttcagaaattgataatcctgatttgctgagccatgtcacagtgggtattagagttctggatgtcaatgacaatccacccgaacttgccagggaatatgatattattgtatgtgaaaattctaagcctggccaggttattcataccatcagtgccactgataaagatgattttgccaatggaccaaggtttaacttctttcttgatgaacgcctgcctgtaaatccaaacttcactctgaaggacaatgaagataacacagccagcattctgacaaggcggaggagatttagtcgaactgttcaggatgtgtattatctgcccattatgatctctgatggtggaatcccctctctcagcagcagcagcaccctcaccatcagggtttgtgcatgcgagagagatgggcgtgtgcggacctgccatgcagaagccttcctgtcctcggctggtttgagtacaggagccttaatcgctattcttctctgtgttctcattctcctggcaattgtggtactttttatcaccctgaggcgcagcaaaaaagagcccttgatcatttcagaagaggatgtacgggagaacgtggtcacctatgatgatgaaggaggcggagaggaagacacagaggcctttgacatcacagccttgaggaatccttctgctgctgaggagctcaagtaccggagggatatcagacctgaagtgaagctcactcccagacaccagacatcatccaccctggaaagcatagatgttcaggaatttattaagcaaagactggcagaagcagacctagaccctagcgttcccccttatgactctcttcagacttatgcctatgagggtcagagatcagaagctgggtctatcagctcgctggattcagcaacgacacaatcagaccaggattatcactaccttggagactggggacccgagtttaaaaagttagctgaactctatggagaaatagaatctgaaagaacaacttagggggtcagttcttgcaaccttgtggaatttgcttcctgagtaagtggatatacaacctcagcaatgacaaggaagaagtgtggaaacagtacttggaactgaggaagctggacacagctcctgtagaaacaagtgcccttttcatgatcgaaactgggttatttaattggaagaaagt

SEQ ID NO: 4008 - DNA, 6341 bp, Homo sapiens
  source 1..6341: mol_type = unassigned DNA
tgacagtgttgtggtactaaaagcacaagcgtctgtaactctgggcaatggggcacatcgagagtttgctgagaagactgtgaagcaaaaagaagaaagtttttcctactcttccttatgtgtccaacacgaagtttgctgttcagttttcacagaacttctagaagttgaagttacaaaggtatatagaaggtacacagaatcagaaaagattataaaagaaagcaagatttttgttagtgacgtcctgtttcctctgaagagtaatagttggaatcaaaagagtcaacgcaatgaactgttatttactgctgcgttttatgttgggaattcctctcctatggccttgtcttggagcaacagaaaactctcaaacaaagaaagtcaagcagccagtgcgatctcatttgagagtgaagcgtggctgggtgtggaaccaattttttgtaccagaggaaatgaatacgactagtcatcacatcggccagctaagatctgatttagacaatggaaacaattctttccagtacaagcttttgggagctggagctggaagtacttttatcattgatgaaagaacaggtgacatatatgccatacagaagcttgatagagaggagcgatccctctacatcttaagagcccaggtaatagacatcgctactggaagggctgtggaacctgagtctgagtttgtcatcaaagtttcggatatcaatgacaatgaaccaaaattcctagatgaaccttatgaggccattgtaccagagatgtctccagaaggaacattagttatccaggtgacagcaagtgatgctgacgatccctcaagtggtaataatgctcgtctcctctacagcttacttcaaggccagccatatttttctgttgaaccaacaacaggagtcataagaatatcttctaaaatggatagagaactgcaagatgagtattgggtaatcattcaagccaaggacatgattggtcagccaggagcgttgtctggaacaacaagtgtattaattaaactttcagatgttaatgacaataagcctatatttaaagaaagtttataccgcttgactgtctctgaatctgcacccactgggacttctataggaacaatcatggcatatgataatgacataggagagaatgcagaaatggattacagcattgaagaggatgattcgcaaacatttgacattattactaatcatgaaactcaagaaggaatagttatattaaaaaagaaagtggattttgagcaccagaaccactacggtattagagcaaaagttaaaaaccatcatgttcctgagcagctcatgaagtaccacactgaggcttccaccactttcattaagatccaggtggaagatgttgatgagcctcctcttttcctccttccatattatgtatttgaagtttttgaagaaaccccacagggatcatttgtaggcgtggtgtctgccacagacccagacaataggaaatctcctatcaggtattctattactaggagcaaagtgttcaatatcaatgataatggtacaatcactacaagtaactcactggatcgtgaaatcagtgcttggtacaacctaagtattacagccacagaaaaatacaatatagaacagatctcttcgatcccactgtatgtgcaagttcttaacatcaatgatcatgctcctgagttctctcaatactatgagacttatgtttgtgaaaatgcaggctctggtcaggtaattcagactatcagtgcagtggatagagatgaatccatagaagagcaccatttttactttaatctatctgtagaagacactaacaattcaagttttacaatcatagataatcaagataacacagctgtcattttgactaatagaactggttttaaccttcaagaagaacctgtcttctacatctccatcttaattgccgacaatggaatcccgtcacttacaagtacaaacacccttaccatccatgtctgtgactgtggtgacagtgggagcacacagacctgccagtaccaggagcttgtgctttccatgggattcaagacagaagtcatcattgctattctcatttgcattatgatcatatttgggtttatttttttgactttgggtttaaaacaacggagaaaacagattctatttcctgagaaaagtgaagatttcagagagaatatattccaatatgatgatgaagggggtggagaagaagatacagaggcctttgatatagcagagctgaggagtagtaccataatgcgggaacgcaagactcggaaaaccacaagcgctgagatcaggagcctatacaggcagtctttgcaagttggccccgacagtgccatattcaggaaattcattctggaaaagctcgaagaagctaatactgatccgtgtgcccctccttttgattccctccagacctacgcttttgagggaacagggtcattagctggatccctgagctccttagaatcagcagtctctgatcaggatgaaagctatgattaccttaatgagttgggacctcgctttaaaagattagcatgcatgtttggttctgcagtgcagtcaaataattagggctttttaccatcaaaatttttaaaagtgctaatgtgtattcgaacccaatggtagtcttaaagagttttgtgccctggctctatggcggggaaagccctagtctatggagttttctgatttccctggagtaaatactccatggttattttaagctacctacatgctgtcattgaacagagatgtggggagaaatgtaaacaatcagctcacaggcatcaatacaaccagatttgaagtaaaataatttaggaagatattaaaagtagatgagaggacacaagatgtagtcgatccttatgcgattatatcattatttacttaggaaagagtaaaaataccaaacgagaaaatttaaaggagcaaaaatttgcaagtcaaatagaaatgtacaaatcgagataacatttacatttctatcatattgacatgaaaattgaaaatgtatagtcagagaaattttcatgaattattccatgaagtattgtttcctttatttaaaaaaaaaaaaaaaaaaaaagaatgctaggtaatcttcgtagaaaactagaaagtatgataaacaacagttggaggaatccatggaaaatagacgagaaaatgtaaataaggctttctggggatcacagaacttttgtatgaataaaagccttataaaaccagctctggcatatgactaaaatattcctctactatttttcaatgtcatctaatgcaaacgctcaacctttttaaatggttaatgtgagaaaggcactgaattaagatatcttagtgttattttatttactcaattttcatctttcacactgtaagaataaaatgtttttgtggttaagttcctgatactatatagagataaactttaaaactttaacacctaggataatgtgggtgattacataaatgtttaaaaacatttaccttatatggaaagcagatttctgactaagatgccatgattcattctagtttgatattttaaaactttgccaagagcactctttaaaactgatttcaaatttgaacagatacttggtgtatacaaattaatcagagttatatagtataaatttgtattatttttgatattacaactttgtattaaaaaggaaaatatatttaggtgtttgtcatagattttttttcatatgcaactcaaaacacattcttatgtcaaaatacaatagcaaaatacaagtcaatatttactcataattaaatgcaaactttatgaaactggtggaaagtgtggaaaaatttaagtaaatttttacctctactaaaaattatttagacaacttaaaggaatactggattcaaacttcagttactattcactgtaaatattatgatcaactgaactgacttaccattcatgggataaaacatgatacaattctcagtatttgcttttctgttaagagcttggaatatgactgatgcttcagtgtcatttttttattattgaatataaaattaggtgcaatagatacatttattgtagccttaagaaggaaatcaatgctaagctgttgggcataaaactttacagtaacattagataacaagataataaaacactttaattttaatcgaccttttaagaatgatctttattattctatccaaatcaaggtagacttcaaaatttatggtttgaacaggaagaaagtagtgaatacaaaattcttaaaattggttcatatgatcatttttttattaatagcatgtgagactaagctgaaccaaactggccatatatgttaaatcaaataatttgagtaattttgaaatattgatgaagtagttaaatggttataatatattttattggtactttgaaatttaaacatctatatcacataataaagaaagtttttcatcaatctgaaacaggcaccattaaattggtgacacaaatattatcatttcacaaaagcttgagaaaaccagatttgaagtgaaataatttaggaagatattaaaagtggatgagaggacataagatgtagtcaatccttaacgcaatgataccattattaggaaagaggaaaaataccaaacaagagaaaatttaaaggagcaaaaatttgcaagtcaaatagaaatgcacaaatcgagagaacatttacatttctatcacattgacatgaaaattgaaaatgtatagtcagagaaattttcatgaattattccatgaagtgttgtttcctttatttaaaaagaatgctaggtaatcttagtagaaaactaaaaagtatgataaacaacagatggaagaattcatggaaaatagacgagaaaaagtaaataaggctttctggagatgacggaaattttgtatgaataaaagccttataaacaatgaatacatttggataaacaactcattaaaatgcacattaatggaatacctgtacaaatagttttaatacttgtgtccagtggcactaaagagatatattaaaatagattctggttgagttgattataagattgtcaatcataggatacacagggaaagcacagacacgattgctcatctctttggtagtctaaaatatgttccttttaaccacatcaaaagatactatctgattctaatacagaaggtgcaacttcctaggaattatactttgtattatattcaataattattttatgttttgcatcacatgggtgttgcaagaacacagctcttaaactaaaaaggcattacattaagaatttatttttgtaaattttaataaactctaaattaatgcaaaatatttatgaaaatagcacagcttcacattaatacccacagtacttaaatatctcccttagttgactcacagctttgtatgtaagcttcaaatttttaatggtaaaaataagaaaattaggactagcgaactgctagttgttccctcagtgcatgtgcttgagcctaacagatctttgtttgaattagttactttcaattaagcgaacatataatatttgttaaactgcttaatctttccagatctcactttgtaaaatgacgtccaatcaacctatttcacatggttgttatgaagaattaataataagatatgtaaaaccagcagcaccaatagtgcctgacaaaatataactgctcaataaataacagtgaattattataacaacagctaatggtattctattggaacacatggtctgtttcttttccaattctgagtgatctcaacagcctcacggcacattgaaaataaaagtcaacttcctcaccttccccataggccatggactttcccatctctacccacttgtgcagtttctcctctttcctctctcctcctcagttactaaagcaatcttccttcaaacacttctattttccattacatcacttcattcaggttggtgatcagctgcaacttcctcagaaagaccactgctgcttccagtgaccctggctttgtcttgctttgtattagattactcagctccctggtattattgttgtctttatcgcttattagaatgtaacccttaatgggcaagaaattgtcagtcttgttcatttatcatcgtataaaaaatgtttctagcacacagaaagtgaccaataaatatttctggaattaatgtagtaatgaatccaatctattttacttagtgacttgtagaaattcttttggtttccattgactatttttatagaatattaatatggaattaaagtatttttcaaaa

SEQ ID NO: 4009 - DNA, 1892 bp, Homo sapiens
  source 1..1892: mol_type = unassigned DNA
agagaacccaaaatagcattgagtaagcagtgacatactgacagtgttgtggtactaaaagcacaagcgtctgtaactctgggcaatggggcacatcgagagtttgctgagaagactgtgaagcaaaaagaagaaagtttttcctactcttccttatgtgtccaacacgaagtttgctgttcagttttcacagaacttctagaagttgaagttacaaaggaattcctctcctatggccttgtcttggagcaacagaaaactctcaaacaaagaaagtcaagcagccagtgcgatctcatttgagagtgaagcgtggctgggtgtggaaccaattttttgtaccagaggaaatgaatacgactagtcatcacatcggccagctaagatctgatttagacaatggaaacaattctttccagtacaagcttttgggagctggagctggaagtacttttatcattgatgaaagaacaggtgacatatatgccatacagaagcttgatagagaggagcgatccctctacatcttaagagcccaggtaatagacatcgctactggaagggctgtggaacctgagtctgagtttgtcatcaaagtttcggatatcaatgacaatgaaccaaaattcctagatgaaccttatgaggccattgtaccagagatgtctccagaaggaacattagttatccaggtgacagcaagtgatgctgacgatccctcaagtggtaataatgctcgtctcctctacagcttacttcaaggccagccatatttttctgttgaaccaacaacaggagtcataagaatatcttctaaaatggatagagaactgcaagatgagtattgggtaatcattcaagccaaggacatgattggtcagccaggagcgttgtctggaacaacaagtgtattaattaaactttcagatgttaatgacaataagcctatatttaaagaaagtttataccgcttgactgtctctgaatctgcacccactgggacttctataggaacaatcatggcatatgataatgacataggagagaatgcagaaatggattacagcattgaagaggatgattcgcaaacatttgacattattactaatcatgaaactcaagaaggaatagttatattaaaaaagaaagtggattttgagcaccagaaccactacggtattagagcaaaagttaaaaaccatcatgttcctgagcagctcatgaagtaccacactgaggcttccaccactttcattaagatccaggtggaagatgttgatgagcctcctcttttcctccttccatattatgtatttgaagtttttgaagaaaccccacagggatcatttgtaggcgtggtgtctgccacagacccagacaataggaaatctcctatcaggtattctattactaggagcaaagtgttcaatatcaatgataatggtacaatcactacaagtaactcactggatcgtgaaatcagtgcttggtacaacctaagtattacagccacagaaaaatgatatagggatgctgtattccttgaagattacatttcaaagagatggtcaccattacttgataaatacaatcctggatcctaaagcttccaagaaacttgttgaacttttgaaagatttccatacgcttcaaagggacaaagaaaaaacttacatacaaagctttttttttccctctctctctctctttctctgtgtgtgtgtgtgtgtgtgtgtgtgtgtgtatgaatgctctgagaaaaggaaggaaagaaaaaatattttcccttgctttcaacaagtacaaggcctctaatttttaatttgttttgttctttcaaattatcattgcaaatagtacatatattttaaataaaaacactaaaacaaact

SEQ ID NO: 4010 - DNA, 1963 bp, Homo sapiens
  source 1..1963: mol_type = unassigned DNA
aatggggcacatcgagagtttgctgagaagactgtgaagcaaaaagaagaaagtttttcctactcttccttatgtgtccaacacgaagtttgctgttcagttttcacagaacttctagaagttgaagttacaaaggtatatagaaggtacacagaatcagaaaagattataaaagaaagcaagatttttgttagtgacgtcctgtttcctctgaagagtaatagttggaatcaaaagagtcaacgcaatgaactgttatttactgctgcgttttatgttgggaattcctctcctatggccttgtcttggagcaacagaaaactctcaaacaaagaaagtcaagcagccagtgcgatctcatttgagagtgaagcgtggctgggtgtggaaccaattttttgtaccagaggaaatgaatacgactagtcatcacatcggccagctaagatctgatttagacaatggaaacaattctttccagtacaagcttttgggagctggagctggaagtacttttatcattgatgaaagaacaggtgacatatatgccatacagaagcttgatagagaggagcgatccctctacatcttaagagcccaggtaatagacatcgctactggaagggctgtggaacctgagtctgagtttgtcatcaaagtttcggatatcaatgacaatgaaccaaaattcctagatgaaccttatgaggccattgtaccagagatgtctccagaaggaacattagttatccaggtgacagcaagtgatgctgacgatccctcaagtggtaataatgctcgtctcctctacagcttacttcaaggccagccatatttttctgttgaaccaacaacaggagtcataagaatatcttctaaaatggatagagaactgcaagatgagtattgggtaatcattcaagccaaggacatgattggtcagccaggagcgttgtctggaacaacaagtgtattaattaaactttcagatgttaatgacaataagcctatatttaaagaaagtttataccgcttgactgtctctgaatctgcacccactgggacttctataggaacaatcatggcatatgataatgacataggagagaatgcagaaatggattacagcattgaagaggatgattcgcaaacatttgacattattactaatcatgaaactcaagaaggaatagttatattaaaaaagaaagtggattttgagcaccagaaccactacggtattagagcaaaagttaaaaaccatcatgttcctgagcagctcatgaagtaccacactgaggcttccaccactttcattaagatccaggtggaagatgttgatgagcctcctcttttcctccttccatattatgtatttgaagtttttgaagaaaccccacagggatcatttgtaggcgtggtgtctgccacagacccagacaataggaaatctcctatcaggtattctattactaggagcaaagtgttcaatatcaatgataatggtacaatcactacaagtaactcactggatcgtgaaatcagtgcttggtacaacctaagtattacagccacagaaaaatacaatatagaacagatctcttcgatcccactgtatgtgcaagttcttaacatcaatgatcatgctcctgagttctctcaatactatgagacttatgtttgtgaaaatgcaggctctggtcagggtttatttttttgactttgggtttaaaacaacggagaaaacagattctatttcctgagaaaagtgaagatttcagagagaatatattccaatatgatgatgaagggggtggagaagaagatacagaggcctttgatatagcagagctgaggagtagtaccataatgcgggaacgcaagactcggaaaaccacaagcgctgagatcaggagcctatacaggcagtctttgcaagttggccccgacagtgccatattca

SEQ ID NO: 4011 - DNA, 3496 bp, Homo sapiens
  source 1..3496: mol_type = unassigned DNA
cctggcaatcccatgtggacttctggtagaatgagcaatgcaaagaactggcttggacttggcatgtccttgtacttctgggggctgatggaccttacgaccaccgttctctcggacaccccaacaccacaaggtgaattagaagcactcctgtcagacaagccacagtcacatcagcggaccaagaggagctgggtttggaaccagtttttcgttctggaagagtacactgggaccgaccctttgtatgtcggcaagcttcattcagatatggacaggggagacggatccatcaaatacatcctctcgggagaaggtgctggcatcgtgtttaccatcgacgacaccactggagacatccacgccattcagaggctcgaccgagaggaaagagcccagtatactctaagggctcaagccctagacaggcggacgggcaggccaatggagcccgagtcagagttcatcatcaaaattcaagacatcaatgacaatgagcccaagttcctggacggaccttatgtggccactgtgccagaaatgtcccctgtgggtacctccgtcatccaagtgacagccacagatgcagatgacccgacctacggcaacagtgccagggtggtgtacagcattcttcagggccagccatatttttctgtggactctaaaacaggtgtaattaggacagcgctcatgaacatggacagagaagccaaagaatactacgaagtgattatccaagccaaggacatgggagggcagcttggaggattagctgggaccacaacagtcaacatcaccctctcagatgtcaatgataacccaccccgctttccccagaaacattaccagatgagtgtgttggaatcagctccaattagctccactgtcgggagagtgtttgccaaggacttggatgaaggcatcaatgcagagatgaaatatactattgtggatggagatggtgcagatgcctttgacattagcacagatcccaatttccaagttggtatcataactgtgaagaagcccctgagttttgaaagcaagaaaagctacaccttaaaggtggagggagccaatcctcacctagagatgcgttttctgaacttgggcccatttcaggacacaacaacagtgcacatcagtgtggaagacgtggacgagccccctgtgtttgaacctggcttttactttgtggaggtgcctgaggatgtggcgattggaacaaccatacagatcatttctgccaaggacccagatgtgaccaacaactcaatcagatactccattgatagaagcagtgaccctggaagatttttctatgttgacattacaacaggtgccctaatgacagcaagacccctagaccgggaagaattttcttggcataatatcactgtccttgctatggaaatgaacaatccctcccaggttggaagtgttcctgtcacaatcaaagtcttagatgtgaatgacaatgctccagagttccccagattctatgaagcttttgtctgtgagaacgccaaggcaggacagctgatccagacagtgagtgcggtggaccaagatgacccacgcaatggtcagcatttctactacagcttggctcctgaggctgctaacaaccccaactttaccataagggacaaccaagataacacagcacggattctaaccaggaggtctggtttccggcagcaggagcagagtgtctttcacctgcctatcctgatagcagatagcgggcagcccgtgctgagcagcacaggcacactgaccatccaagtgtgcagctgtgatgacgacggccacgtcatgtcctgcagcccagaggcctacatgctcccagtcagtttgagccggggcgccctcattgccatcctcgcctgcatctttgtcctcttagtgctggtgttgctcattttgtccatgaggcggcaccggaaacaaccatacatcatcgacgacgaggaaaacatccacgagaacatcgtccgctacgacgacgagggcggcggcgaggaggacaccgaggccttcgacatcgcggccatgtggaacccccgggaggcgcaggcgggggccgcccccaagacgcggcaggacatgctgcccgagatcgagagcctctcccgctacgtgcctcagacgtgcgcagtgaacagcactgtccacagctacgtgctggccaagctctacgaggccgacatggacctgtgggcaccgcccttcgactccctccagacgtatatgttcgagggggacggctctgtggcggggtcgctgagctccctgcagtcggccacgtcggactcggaacagagcttcgacttcctgacggactgggggccccgcttccggaagctggccgagctctacggggcgtcggagggacccgcgccgctgtggtgacggaagccaggaggcaggcgcgcgtccaaatccagacgttctccgcgggtgcttcgcggacaaggtgcagccaaccacacgagcaatactgtgctggagagtgagaatgggggtgagcaggcgaacagagctctctctggatcagctttacttgggtagattaagttaaataagcaaaaggaaacccagaaggaagagggcagaatctttaattacctttttttcttttctttttgatttttctgacactgtgtgcgaaggcttggagtccaaggtgttctgacaagggtggcttttctctgccattcgctaaggcctttgtcacttttccaccacagaaaggctctggccttggatacagagatgccaattgaaagcagaaagttctactctcgtatctgttttttatcttatcttattctccatttaagagttttgctggctcaaaccacagaaaccaacccacaagaaagaacaaaaaacttgttactcagtgaaattaacctacttgttctgggatggatggaatttcccgtaacccttttgagacaaggttaagactgaatcagccttgcatgggggtggatgggtgggagggtgggtgaaggaagagacattgactttatgctcaagtttagtggctgaaccaagagatgttggcattacagctcatccaacgccatcaagttagagtgctcgtgtctcctctcagctatttaactgtgcccctgcaaaattgttcagaatgaaaccagaaaaatctgcctcttttgcactgtagatgtctcttccatgtgccaaatgtggagattagatgctacaaatgaaagccaaataaaaaagaagtatctgacaaaagcatgggttagagggctttcctaatctgtgtgaggtcaatccaagggatgtttacatactgtagataacctacttgaacaaaaatcagtattatagagaataaatggatgtaagaaaattacatgtacaagttttgtatatttgttaataattttggtaataaatatgatgtactgcatctcagtaccttagcacttcttttaataaaagttaaatagaa

SEQ ID NO: 4012 - DNA, 2904 bp, Homo sapiens
  source 1..2904: mol_type = unassigned DNA
agctacgtgagcagaacgcccgccctggagcagttaggaccgaaggtctccggagagtcgccggcggtgccaggaagtcaacttcaagcagattgacttgaaacgggatctcatttaggaagcataagtgtccaatcaaaaactgtgtatttttttaaatttggaaaatactcaagttccagttgcttatcattctccttcattttctgaaaacctggcaatcccatgtggacttctggtagaatgagcaatgcaaagaactggcttggacttggcatgtccttgtacttctgggggctgatggaccttacgaccaccgttctctcggacaccccaacaccacaaggtgaattagaagcactcctgtcagacaagccacagtcacatcagcggaccaagaggagctgggtttggaaccagtttttcgttctggaagagtacactgggaccgaccctttgtatgtcggcaagcttcattcagatatggacaggggagacggatccatcaaatacatcctctcgggagaaggtgctggcatcgtgtttaccatcgacgacaccactggagacatccacgccattcagaggctcgaccgagaggaaagagcccagtatactctaagggctcaagccctagacaggcggacgggcaggccaatggagcccgagtcagagttcatcatcaaaattcaagacatcaatgacaatgagcccaagttcctggacggaccttatgtggccactgtgccagaaatgtcccctgtgggtacctccgtcatccaagtgacagccacagatgcagatgacccgacctacggcaacagtgccagggtggtgtacagcattcttcagggccagccatatttttctgtggactctaaaacaggtgtaattaggacagcgctcatgaacatggacagagaagccaaagaatactacgaagtgattatccaagccaaggacatgggagggcagcttggaggattagctgggaccacaacagtcaacatcaccctctcagatgtcaatgataacccaccccgctttccccagaaacattaccagatgagtgtgttggaatcagctccaattagctccactgtcgggagagtgtttgccaaggacttggatgaaggcatcaatgcagagatgaaatatactattgtggatggagatggtgcagatgcctttgacattagcacagatcccaatttccaagttggtatcataactgtgaagaagcccctgagttttgaaagcaagaaaagctacaccttaaaggtggagggagccaatcctcacctagagatgcgttttctgaacttgggcccatttcaggacacaacaacagtgcacatcagtgtggaagacgtggacgagccccctgtgtttgaacctggcttttactttgtggaggtgcctgaggatgtggcgattggaacaaccatacagatcatttctgccaaggacccagatgtgaccaacaactcaatcagatactccattgatagaagcagtgaccctggaagatttttctatgttgacattacaacaggtgccctaatgacagcaagacccctagaccgggaagaattttcttggcataatatcactgtccttgctatggaaatgaacaatccctcccaggttggaagtgttcctgtcacaatcaaagtcttagatgtgaatgacaatgctccagagttccccagattctatgaagcttttgtctgtgagaacgccaaggcaggacagctgatccagacagtgagtgcggtggaccaagatgacccacgcaatggtcagcatttctactacagcttggctcctgaggctgctaacaaccccaactttaccataagggacaaccaagataacacagcacggattctaaccaggaggtctggtttccggcagcaggagcagagtgtctttcacctgcctatcctgatagcagatagcgggcagcccgtgctgagcagcacaggcacactgaccatccaagtgtgcagctgtgatgacgacggccacgtcatgtcctgcagcccagaggcctacatgctcccagtcagtttgagccggggcgccctcattgccatcctcgcctgcatctttgtcctcttagtgctggtgttgctcattttgtccatgaggcggcaccggaaacaaccatacatcatcgacgacgaggaaaacatccacgagaacatcgtccgctacgacgacgagggcggcggcgaggaggacaccgaggccttcgacatcgcggccatgtggaacccccgggaggcgcaggcgggggccgcccccaagacgcggcaggacatgctgcccgagatcgagagcctctcccgctacgtgcctcagacgtgcgcagtgaacagcactgtccacagctacgtgctggccaagctctacgaggccgacatggacctgtgggcaccgcccttcgactccctccagacgtatatgttcgagggggacggctctgtggcggggtcgctgagctccctgcagtcggccacgtcggactcggaacagagcttcgacttcctgacggactgggggccccgcttccggaagctggccgagctctacggggcgtcggagggacccgcgccgctgtggtgacggaagccaggaggcaggcgcgcgtccaaatccagacgttctccgcgggtgcttcgcggacaaggtgcagccaaccacacgagcaatactgtgctggagagtgagaatgggggtgagcaggcgaacagagctctctctggatcagctttacttgggtagattaagttaaataagcaaaaggaaacccagaaggaagagggcagaatctttaattacctttttttcttttctttttgatttttctgacactgtgtgcgaaggcttggagtccaa

SEQ ID NO: 4013 - DNA, 2683 bp, Homo sapiens
  source 1..2683: mol_type = unassigned DNA
gatgtgcgccgggaaggggaccagagagccaggctccggggaggcgcaggcacctacggggccgatccctggtccgtgcctcgcgccgcgcccccgccggagctcggctgtgggaggagaatgtggaagtcaacttcaagcagattgacttgaaacgggatctcatttaggaagcataagtgtccaatcaaaaactgtgtatttttttaaatttggaaaatactcaagttccagttgcttatcattctccttcattttctgaaaacctggcaatcccatgtggacttctggtagaatgagcaatgcaaagaactggcttggacttggcatgtccttgtacttctgggggctgatggaccttacgaccaccgttctctcggacaccccaacaccacaaggtgaattagaagcactcctgtcagacaagccacagtcacatcagcggaccaagaggagctgggtttggaaccagtttttcgttctggaagagtacactgggaccgaccctttgtatgtcggcaagcttcattcagatatggacaggggagacggatccatcaaatacatcctctcgggagaaggtgctggcatcgtgtttaccatcgacgacaccactggagacatccacgccattcagaggctcgaccgagaggaaagagcccagtatactctaagggctcaagccctagacaggcggacgggcaggccaatggagcccgagtcagagttcatcatcaaaattcaagacatcaatgacaatgagcccaagttcctggacggaccttatgtggccactgtgccagaaatgtcccctgtgggtacctccgtcatccaagtgacagccacagatgcagatgacccgacctacggcaacagtgccagggtggtgtacagcattcttcagggccagccatatttttctgtggactctaaaacaggtgtaattaggacagcgctcatgaacatggacagagaagccaaagaatactacgaagtgattatccaagccaaggacatgggagggcagcttggaggattagctgggaccacaacagtcaacatcaccctctcagatgtcaatgataacccaccccgctttccccagaaacattaccagatgagtgtgttggaatcagctccaattagctccactgtcgggagagtgtttgccaaggacttggatgaaggcatcaatgcagagatgaaatatactattgtggatggagatggtgcagatgcctttgacattagcacagatcccaatttccaagttggtatcataactgtgaagaagcccctgagttttgaaagcaagaaaagctacaccttaaaggtggagggagccaatcctcacctagagatgcgttttctgaacttgggcccatttcaggacacaacaacagtgcacatcagtgtggaagacgtggacgagccccctgtgtttgaacctggcttttactttgtggaggtgcctgaggatgtggcgattggaacaaccatacagatcatttctgccaaggacccagatgtgaccaacaactcaatcagatactccattgatagaagcagtgaccctggaagatttttctatgttgacattacaacaggtgccctaatgacagcaagacccctagaccgggaagaattttcttggcataatatcactgtccttgctatggaaatgaacaatccctcccaggttggaagtgttcctgtcacaatcaaagtcttagatgtgaatgacaatgctccagagttccccagattctatgaagcttttgtctgtgagaacgccaaggcaggacagctgatccagacagtgagtgcggtggaccaagatgacccacgcaatggtcagcatttctactacagcttggctcctgaggctgctaacaaccccaactttaccataagggacaaccaagataacacagcacggattctaaccaggaggtctggtttccggcagcaggagcagagtgtctttcacctgcctatcctgatagcagatagcgggcagcccgtgctgagcagcacaggcacactgaccatccaagtgtgcagctgtgatgacgacggccacgtcatgtcctgcagcccagaggcctacatgctcccagtcagtttgagccggggcgccctcattgccatcctcgcctgcatctttgtcctcttagtgctggtgttgctcattttgtccatgaggcggcaccggaaacaaccatacatcatcgacgacgaggaaaacatccacgagaacatcgtccgctacgacgacgagggcggcggcgaggaggacaccgaggccttcgacatcgcggccatgtggaacccccgggaggcgcaggcgggggccgcccccaagacgcggcaggacatgctgcccgagatcgagagcctctcccgctacgtgcctcagacgtgcgcagtgaacagcactgtccacagctacgtgctggccaagctctacgaggccgacatggacctgtgggcaccgcccttcgactccctccagacgtatatgttcgagggggacggctctgtggcggggtcgctgagctccctgcagtcggccacgtcggactcggaacagagcttcgacttcctgacggactgggggccccgcttccggaagctggccgagctctacggggcgtcggagggacccgcgccgctgtggtga

SEQ ID NO: 4014 - DNA, 3661 bp, Homo sapiens
  source 1..3661: mol_type = unassigned DNA
aggctcctgatggaaagggaaggcccctagtcctggcaggatctgccggccccaacccgcatcctttctgcgcaggaaccatggcgcttccccgactctggagctgtccaggtgctgcctggtgatccgcacgcgacgcggcgacgggggcgcgggcgggcaccccgggggctgtccatgccccggatgcggccgcgccccctccccctccagccgggtacccccgcggctgggcggcgttcagggccgcgggcccgtccgggtgccccgtcgggggcgacatcccggcggccgcgctgaggccaccatgtgacacggcgccgcatcgttgtgcgaccaagcagcggcgccctggtgcctctcgtccatgctcctgggccccagccccgcgcaggccaaggatgaggccgaggcccgaaggtagggggctccgggcgggagtcgcgctgtcccccgcgctactgctgctgctgctgctgccgccgccgccgacgctgctggggcgcctgtgggcagcgggcacaccctcgccgtcggcgcccggagctcggcaggacggcgcgctgggagccggccgcgtcaaacgcggctgggtgtggaaccagttcttcgtggtagaggagtacacgggcacggagcccctgtatgtgggcaagatccactccgactcagacgagggtgacggggccatcaagtacaccatctcaggcgagggtgctgggaccatcttcctgatcgacgagctgacaggcgacattcatgccatggagcgcctggaccgcgagcagaaaaccttctacacgctgcgggcccaggctcgggatcgcgccaccaaccgcctactggagcccgagtcggagttcatcatcaaggtgcaggacatcaatgacagtgagccccgcttcctgcacggcccctatattggcagcgtggccgagctctcacctacaggcacgtcggtgatgcaggtgatggcctcggatgcggatgaccccacgtacggcagcagcgctcggctggtgtacagcgtgctggacggcgagcaccacttcaccgtggaccccaagaccggcgtaatccggacggctgtgcctgaccttgaccgcgagagccaggagcgctacgaggtggtgatccaggccacagacatggcgggtcagctgggtggcctctcgggctccactaccgtcaccatcgtagtcaccgacgtcaatgacaacccgccccgtttcccgcagaagatgtaccagttcagcatccaggagtcagcccccattggaacggctgtgggacgtgtgaaggctgaggactcagacgtgggagagaacacagacatgacttaccaccttaaggacgagagcagcagcggcggcgatgtgttcaaggtcaccacagacagcgacactcaggaggccatcatcgtagtgcagaagcgcctggacttcgaatcccagcccgtgcacaccgtgatcctggaggccctcaacaagttcgtggacccccgcttcgccgacctgggcacgttccgcgaccaggcgatcgtgcgcgtggccgtgaccgacgtggacgagccccccgagttccggccgccctccggcctcctggaggtgcaggaggacgcgcaggtgggctccctggtcggcgtggtgacggcgcgggaccccgacgccgccaaccggcccgtccggtacgccattgaccgcgaatcagatttggaccagatcttcgatatcgatgcggacacaggcgccatcgtgactggcaaggggctggaccgcgagacggccggctggcacaacatcacagtgctggccatggaggcggacaatcatgcacagctatcccgggcatccctaaggatccgaatcctggatgtgaacgacaatcccccagaactggccacaccctacgaggcagctgtatgcgaggatgccaagccaggccagctcatccagaccatcagcgtggtggacagagacgagccccaaggcgggcaccgcttctatttccgcctggtgcctgaagctcccagcaaccctcatttctctctgcttgacatccaagacaacaccgctgcagtgcacacgcagcacgtgggcttcaaccggcaggagcaggacgtgttcttcctgcccatcctggtggtagacagtgggccgcccacactgagcagcacaggcacgctcaccatccgcatctgtggctgcgacagctccggcaccatccagtcctgcaacaccacggcctttgtcatggccgcctccctcagccccggcgccctcatcgccctcttggtctgcgttctcatcctggttgtgctggtgctgctgatcctcaccctcaggcgccaccacaagagccacctgagctcggacgaggatgaagacatgcgggacaacgtcatcaaatacaacgacgaaggcggcggcgagcaggacaccgaagcctacgacatgtcggcgctgcggagcctctacgacttcggcgagctcaagggcggcgacgggggcggcagcgcgggcgggggagcgggcgggggctcgggcgggggcgcgggcagccccccgcaggcccacctgccctccgagcgccactcgctgccgcaggggccgccgagccccgagccagacttctcagtgttcagggacttcatcagccgcaaggtggcactggcggacggggacctgtcggtgccgccctacgacgccttccagacctacgccttcgagggcgcggactcgccggccgcctcgctcagctccctgcacagcggctcgtcgggctccgagcaggacttcgcctatctcagcagctggggtccgcgcttccggcccctggccgcgctctacgccggccaccgcggggacgacgaggcccaggcctcctagcccctcgccctgccgtcggggcgcggctgctcacccgcccagcacacgccggggccccaggacaacgcgtttcccccgcggaccccctttcctgccctcccccaaccctcccttggcggctggacggaggggggacttgctaggagcggactcttccattcctcctcctctaggggtgcagctttggagcccagaggtgcgggattctgaccaacggcattaaaactgaggcgagaccgggcacggtgtggctctggggttagaatgggagatgggggtggcgttgcagagtcgggaaggggcgggtcactcaatcctggcctgggggagaatgctggagggagcacgccgctgagatgcccccaccccaggtttcccccatcagagttaagaggaaagaaggctgttcacttactaagcacctactgtgtgctgggacgctgtacagagaccagctcagtcgtcagagaaaccatgaggtggtgtcctgcacggaatagaaggggaaaggaccccagagaagtggctgtgacccgtccaagggcacctggccagtgaatggcagagcctctggcactgaccagctgcctggcctcgggcaagtcacttcacttctctggtcctcagtttcctcatctgtcaaatggggttaataacagaacctacctcgaagagttgtgaggctaaaaagggttcatatgtgtcaagtggttaggacagtgcctggcacatagtaggtgttcaataaatgctagcctttgttactattctta

SEQ ID NO: 4015 - DNA, 3249 bp, Homo sapiens
  source 1..3249: mol_type = unassigned DNA
agacacgcacactccctcgctcccgctcgctcgctcactccctcgctctctcgctctctcgctctctcgctcacacacacgcgcgcacacgccgccgcggctccccctctcgctcccgctctccctccggctcctgcgggcggccgcggggctccggactcgcccgctgcccgcgccggggctcccgccccacgcagcgtcccgaggcggcaggactagggggagccccgggccgctccccgaggctcctgatggaaagggaaggcccctagtcctggcaggatctgccggccccaacccgcatcctttctgcgcaggaaccatggcgcttccccgactctggagctgtccaggtgctgcctggtgatccgcacgcgacgcggcgacgggggcgcgggcgggcaccccgggggctgtccatgccccggatgcggccgcgccccctccccctccagccgggtacccccgcggctgggcggcgttcagggccgcgggcccgtccgggtgccccgtcgggggcgacatcccggcggccgcgctgaggccaccatgtgacacggcgccgcatcgttgtgcgaccaagcagcggcgccctggtgcctctcgtccatgctcctgggccccagccccgcgcaggccaaggatgaggccgaggcccgaaggtagggggctccgggcgggagtcgcgctgtcccccgcgctactgctgctgctgctgctgccgccgccgccgacgctgctggggcgcctgtgggcagcgggcacaccctcgccgtcggcgcccggagctcggcaggacggcgcgctgggagccggccgcgtcaaacgcggctgggtgtggaaccagttcttcgtggtagaggagtacacgggcacggagcccctgtatgtgggcaagatccactccgactcagacgagggtgacggggccatcaagtacaccatctcaggcgagggtgctgggaccatcttcctgatcgacgagctgacaggcgacattcatgccatggagcgcctggaccgcgagcagaaaaccttctacacgctgcgggcccaggctcgggatcgcgccaccaaccgcctactggagcccgagtcggagttcatcatcaaggtgcaggacatcaatgacagtgagccccgcttcctgcacggcccctatattggcagcgtggccgagctctcacctacaggcacgtcggtgatgcaggtgatggcctcggatgcggatgaccccacgtacggcagcagcgctcggctggtgtacagcgtgctggacggcgagcaccacttcaccgtggaccccaagaccggcgtaatccggacggctgtgcctgaccttgaccgcgagagccaggagcgctacgaggtggtgatccaggccacagacatggcgggtcagctgggtggcctctcgggctccactaccgtcaccatcgtagtcaccgacgtcaatgacaacccgccccgtttcccgcagaagatgtaccagttcagcatccaggagtcagcccccattggaacggctgtgggacgtgtgaaggctgaggactcagacgtgggagagaacacagacatgacttaccaccttaaggacgagagcagcagcggcggcgatgtgttcaaggtcaccacagacagcgacactcaggaggccatcatcgtagtgcagaagcgcctggacttcgaatcccagcccgtgcacaccgtgatcctggaggccctcaacaagttcgtggacccccgcttcgccgacctgggcacgttccgcgaccaggcgatcgtgcgcgtggccgtgaccgacgtggacgagccccccgagttccggccgccctccggcctcctggaggtgcaggaggacgcgcaggtgggctccctggtcggcgtggtgacggcgcgggaccccgacgccgccaaccggcccgtccggtacgccattgaccgcgaatcagatttggaccagatcttcgatatcgatgcggacacaggcgccatcgtgactggcaaggggctggaccgcgagacggccggctggcacaacatcacagtgctggccatggaggcggacaatcatgcacagctatcccgggcatccctaaggatccgaatcctggatgtgaacgacaatcccccagaactggccacaccctacgaggcagctgtatgcgaggatgccaagccaggccagctcatccagaccatcagcgtggtggacagagacgagccccaaggcgggcaccgcttctatttccgcctggtgcctgaagctcccagcaaccctcatttctctctgcttgacatccaagacaacaccgctgcagtgcacacgcagcacgtgggcttcaaccggcaggagcaggacgtgttcttcctgcccatcctggtggtagacagtgggccgcccacactgagcagcacaggcacgctcaccatccgcatctgtggctgcgacagctccggcaccatccagtcctgcaacaccacggcctttgtcatggccgcctccctcagccccggcgccctcatcgccctcttggtctgcgttctcatcctggttgtgctggtgctgctgatcctcaccctcaggcgccaccacaagagccacctgagctcggacgaggatgaagacatgcgggacaacgtcatcaaatacaacgacgaaggcggcggcgagcaggacaccgaagcctacgacatgtcggcgctgcggagcctctacgacttcggcgagctcaagggcggcgacgggggcggcagcgcgggcgggggagcgggcgggggctcgggcgggggcgcgggcagccccccgcaggcccacctgccctccgagcgccactcgctgccgcaggggccgccgagccccgagccagacttctcagtgttcagggacttcatcagccgcaaggtggcactggcggacggggacctgtcggtgccgccctacgacgccttccagacctacgccttcgagggcgcggactcgccggccgcctcgctcagctccctgcacagcggctcgtcgggctccgagcaggacttcgcctatctcagcagctggggtccgcgcttccggcccctggccgcgctctacgccggccaccgcggggacgacgaggcccaggcctcctagcccctcgccctgccgtcggggcgcggctgctcacccgcccagcacacgccggggccccaggacaacgcgtttcccccgcggaccccctttcctgccctcccccaaccctcccttggcgg

SEQ ID NO: 4016 - DNA, 3702 bp, Homo sapiens
  source 1..3702: mol_type = unassigned DNA
ggctggcacgggaggtggagaaagaggcttgggcggccccgctgtagccgcgtgtgggaggacgcacgggcctgcttcaaagctttgggataacagcgcctccgggggataatgaatgcggagcctccgttttcagtcgacttcagatgtgtctccacttttttccgctgtagccgcaaggcaaggaaacatttctcttcccgtactgaggaggctgaggagtgcactgggtgttcttttctcctctaacccagaactgcgagacagaggctgagtccctgtaaagaacagctccagaaaagccaggagagcgcaggagggcatccgggaggccaggaggggttcgctggggcctcaaccgcacccacatcggtcccacctgcgagggggcgggacctcgtggcgctggaccaatcagcacccacctgcgctcacctggcctcctcccgctggctcccgggggctgcggtgctcaaaggggcaagagctgagcggaacaccggcccgccgtcgcggcagctgcttcacccctctctctgcagccatggggctccctcgtggacctctcgcgtctctcctccttctccaggtttgctggctgcagtgcgcggcctccgagccgtgccgggcggtcttcagggaggctgaagtgaccttggaggcgggaggcgcggagcaggagcccggccaggcgctggggaaagtattcatgggctgccctgggcaagagccagctctgtttagcactgataatgatgacttcactgtgcggaatggcgagacagtccaggaaagaaggtcactgaaggaaaggaatccattgaagatcttcccatccaaacgtatcttacgaagacacaagagagattgggtggttgctccaatatctgtccctgaaaatggcaagggtcccttcccccagagactgaatcagctcaagtctaataaagatagagacaccaagattttctacagcatcacggggccgggggcagacagcccccctgagggtgtcttcgctgtagagaaggagacaggctggttgttgttgaataagccactggaccgggaggagattgccaagtatgagctctttggccacgctgtgtcagagaatggtgcctcagtggaggaccccatgaacatctccatcatcgtgaccgaccagaatgaccacaagcccaagtttacccaggacaccttccgagggagtgtcttagagggagtcctaccaggtacttctgtgatgcaggtgacagccacggatgaggatgatgccatctacacctacaatggggtggttgcttactccatccatagccaagaaccaaaggacccacacgacctcatgttcaccattcaccggagcacaggcaccatcagcgtcatctccagtggcctggaccgggaaaaagtccctgagtacacactgaccatccaggccacagacatggatggggacggctccaccaccacggcagtggcagtagtggagatccttgatgccaatgacaatgctcccatgtttgacccccagaagtacgaggcccatgtgcctgagaatgcagtgggccatgaggtgcagaggctgacggtcactgatctggacgcccccaactcaccagcgtggcgtgccacctaccttatcatgggcggtgacgacggggaccattttaccatcaccacccaccctgagagcaaccagggcatcctgacaaccaggaagggtttggattttgaggccaaaaaccagcacaccctgtacgttgaagtgaccaacgaggccccttttgtgctgaagctcccaacctccacagccaccatagtggtccacgtggaggatgtgaatgaggcacctgtgtttgtcccaccctccaaagtcgttgaggtccaggagggcatccccactggggagcctgtgtgtgtctacactgcagaagaccctgacaaggagaatcaaaagatcagctaccgcatcctgagagacccagcagggtggctagccatggacccagacagtgggcaggtcacagctgtgggcaccctcgaccgtgaggatgagcagtttgtgaggaacaacatctatgaagtcatggtcttggccatggacaatggaagccctcccaccactggcacgggaacccttctgctaacactgattgatgtcaatgaccatggcccagtccctgagccccgtcagatcaccatctgcaaccaaagccctgtgcgccaggtgctgaacatcacggacaaggacctgtctccccacacctcccctttccaggcccagctcacagatgactcagacatctactggacggcagaggtcaacgaggaaggtgacacagtggtcttgtccctgaagaagttcctgaagcaggatacatatgacgtgcacctttctctgtctgaccatggcaacaaagagcagctgacggtgatcagggccactgtgtgcgactgccatggccatgtcgaaacctgccctggaccctggaagggaggtttcatcctccctgtgctgggggctgtcctggctctgctgttcctcctgctggtgctgcttttgttggtgagaaagaagcggaagatcaaggagcccctcctactcccagaagatgacacccgtgacaacgtcttctactatggcgaagaggggggtggcgaagaggaccaggactatgacatcacccagctccaccgaggtctggaggccaggccggaggtggttctccgcaatgacgtggcaccaaccatcatcccgacacccatgtaccgtcctcggccagccaacccagatgaaatcggcaactttataattgagaacctgaaggcggctaacacagaccccacagccccgccctacgacaccctcttggtgttcgactatgagggcagcggctccgacgccgcgtccctgagctccctcacctcctccgcctccgaccaagaccaagattacgattatctgaacgagtggggcagccgcttcaagaagctggcagacatgtacggtggcggggaggacgactaggcggcctgcctgcagggctggggaccaaacgtcaggccacagagcatctccaaggggtctcagttcccccttcagctgaggacttcggagcttgtcaggaagtggccgtagcaacttggcggagacaggctatgagtctgacgttagagtggtggcttccttagcctttcaggatggaggaatgtgggcagtttgacttcagcactgaaaacctctccacctgggccagggttgcctcagaggccaagtttccagaagcctcttacctgccgtaaaatgctcaaccctgtgtcctgggcctgggcctgctgtgactgacctacagtggactttctctctggaatggaaccttcttaggcctcctggtgcaacttaatttttttttttaatgctatcttcaaaacgttagagaaagttcttcaaaagtgcagcccagagctgctgggcccactggccgtcctgcatttctggtttccagaccccaatgcctcccattcggatggatctctgcgtttttatactgagtgtgcctaggttgccccttattttttattttccctgttgcgttgctatagatgaagggtgaggacaatcgtgtatatgtactagaacttttttattaaagaaacttttcccagaggtgcctggggagtgaactgttttctaaa

SEQ ID NO: 4017 - DNA, 3487 bp, Homo sapiens
  source 1..3487: mol_type = unassigned DNA
tgcgttttaaaaattgtctttatttacattttacagaaagttgagaaagtgttatttatatggggggtaggggtgctggagattatgagactaataacaaccctcttagctcgcaccctttggcaccactacagcttccaaactctgggactttctcgactagcttccctttgtttagctgtgaaatggaagaagcggtccgggtgtggcggctcatgcctgtaacctgagcactctgggaggcggaggatcgcttgagtccagaagttcaagaccagcttgggcaacatagggtgaccctccaccctccccccgccccaccacatcgctacaaaaaatttttaaaaattagccgggtgtggtggcgcaagcctgtagtctcagcgggagctgagggaggagaatcgcttcagcccgggaggtcgaggctgtagtgagccgagatcgcgctactgcactcctgggcgacagagcgagaccctgtctccaaaaaaaaaaaaaaaagaaaaaagaggaagttgtatccaattcagaaacgcggtccttcgggacctgctagttttataccccggaggatcctccccggcgggctggcacgggaggtggagaaagaggcttgggcggccccgctgtagccgcgtgtgggaggacgcacgggcctgcttcaaagctttgggataacagcgcctccgggggataatgaatgcggagcctccgttttcagtcgacttcagatgtgtctccacttttttccgctgtagccgcaaggcaaggaaacatttctcttcccgtactgaggaggctgaggagtgcactgggtgttcttttctcctctaacccagaactgcgagacagaggctgagtccctgtaaagaacagctccagaaaagccaggagagcgcaggagggcatccgggaggccaggaggggttcgctggggcctcaaccgcacccacatcggtcccacctgcgagggggcgggacctcgtggcgctggaccaatcagcacccacctgcgctcacctggcctcctcccgctggctcccgggggctgcggtgctcaaaggggcaagagctgagcggaacaccggcccgccgtcgcggcagctgcttcacccctctctctgcagccatggggctccctcgtggacctctcgcgtctctcctccttctccaggtttgctggctgcagtgcgcggcctccgagccgtgccgggcggtcttcagggaggctgaagtgaccttggaggcgggaggcgcggagcaggagcccggccaggcgctggggaaagtattcatgggctgccctgggcaagagccagctctgtttagcactgataatgatgacttcactgtgcggaatggcgagacagtccaggaaagaaggtcactgaaggaaaggaatccattgaagatcttcccatccaaacgtatcttacgaagacacaagagagattgggtggttgctccaatatctgtccctgaaaatggcaagggtcccttcccccagagactgaatcagctcaagtctaataaagatagagacaccaagattttctacagcatcacggggccgggggcagacagcccccctgagggtgtcttcgctgtagagaaggagacaggctggttgttgttgaataagccactggaccgggaggagattgccaagtatgagctctttggccacgctgtgtcagagaatggtgcctcagtggaggaccccatgaacatctccatcatcgtgaccgaccagaatgaccacaagcccaagtttacccaggacaccttccgagggagtgtcttagagggagtcctaccaggtacttctgtgatgcaggtgacagccacggatgaggatgatgccatctacacctacaatggggtggttgcttactccatccatagccaagaaccaaaggacccacacgacctcatgttcaccattcaccggagcacaggcaccatcagcgtcatctccagtggcctggaccgggaaaaagtccctgagtacacactgaccatccaggccacagacatggatggggacggctccaccaccacggcagtggcagtagtggagatccttgatgccaatgacaatgctcccatgtttgacccccagaagtacgaggcccatgtgcctgagaatgcagtgggccatgaggtgcagaggctgacggtcactgatctggacgcccccaactcaccagcgtggcgtgccacctaccttatcatgggcggtgacgacggggaccattttaccatcaccacccaccctgagagcaaccagggcatcctgacaaccaggaagggtttggattttgaggccaaaaaccagcacaccctgtacgttgaagtgaccaacgaggccccttttgtgctgaagctcccaacctccacagccaccatagtggtccacgtggaggatgtgaatgaggcacctgtgtttgtcccaccctccaaagtcgttgaggtccaggagggcatccccactggggagcctgtgtgtgtctacactgcagaagaccctgacaaggagaatcaaaagatcagctaccgcatcctgagagacccagcagggtggctagccatggacccagacagtgggcaggtcacagctgtgggcaccctcgaccgtgaggatgagcagtttgtgaggaacaacatctatgaagtcatggtcttggccatggacaatggaagccctcccaccactggcacgggaacccttctgctaacactgattgatgtcaatgaccatggcccagtccctgagccccgtcagatcaccatctgcaaccaaagccctgtgcgccaggtgctgaacatcacggacaaggacctgtctccccacacctcccctttccaggcccagctcacagatgactcagacatctactggacggcagaggtcaacgaggaaggtgacacagtggtcttgtccctgaagaagttcctgaagcaggatacatatgacgtgcacctttctctgtctgaccatggcaacaaagagcagctgacggtgatcagggccactgtgtgcgactgccatggccatgtcgaaacctgccctggaccctggaagggaggtttcatcctccctgtgctgggggctgtcctggctctgctgttcctcctgctggtgctgcttttgttggtgagaaagaagcggaagatcaaggagcccctcctactcccagaagatgacacccgtgacaacgtcttctactatggcgaagaggggggtggcgaagaggaccaggactatgacatcacccagctccaccgaggtctggaggccaggccggaggtggttctccgcaatgacgtggcaccaaccatcatcccgacacccatgtaccgtcctcggccagccaacccagatgaaatcggcaactttataattgaggggaggggagagaggggctcacagagaggaaatggaggcttgcagctggcaagaggcaggacccgccgctcctaa

SEQ ID NO: 4018 - DNA, 2746 bp, Homo sapiens
  source 1..2746: mol_type = unassigned DNA
gcggtgctcaaaggggcaagagctgagcggaacaccggcccgccgtcgcggcagctgcttcacccctctctctgcagccatggggctccctcgtggacctctcgcgtctctcctccttctccagtattcatgggctgccctgggcaagagccagctctgtttagcactgataatgatgacttcactgtgcggaatggcgagacagtccaggaaagaaggtcactgaaggaaaggaatccattgaagatcttcccatccaaacgtatcttacgaagacacaagagagattgggtggttgctccaatatctgtccctgaaaatggcaagggtcccttcccccagagactgaatcagctcaagtctaataaagatagagacaccaagattttctacagcatcacggggccgggggcagacagcccccctgagggtgtcttcgctgtagagaaggagacaggctggttgttgttgaataagccactggaccgggaggagattgccaagtatgagctctttggccacgctgtgtcagagaatggtgcctcagtggaggaccccatgaacatctccatcatcgtgaccgaccagaatgaccacaagcccaagtttacccaggacaccttccgagggagtgtcttagagggagtcctaccaggtacttctgtgatgcaggtgacagccacggatgaggatgatgccatctacacctacaatggggtggttgcttactccatccatagccaagaaccaaaggacccacacgacctcatgttcaccattcaccggagcacaggcaccatcagcgtcatctccagtggcctggaccgggaaaaagtccctgagtacacactgaccatccaggccacagacatggatggggacggctccaccaccacggcagtggcagtagtggagatccttgatgccaatgacaatgctcccatgtttgacccccagaagtacgaggcccatgtgcctgagaatgcagtgggccatgaggtgcagaggctgacggtcactgatctggacgcccccaactcaccagcgtggcgtgccacctaccttatcatgggcggtgacgacggggaccattttaccatcaccacccaccctgagagcaaccagggcatcctgacaaccaggaagggtttggattttgaggccaaaaaccagcacaccctgtacgttgaagtgaccaacgaggccccttttgtgctgaagctcccaacctccacagccaccatagtggtccacgtggaggatgtgaatgaggcacctgtgtttgtcccaccctccaaagtcgttgaggtccaggagggcatccccactggggagcctgtgtgtgtctacactgcagaagaccctgacaaggagaatcaaaagatcagctaccgcatcctgagagacccagcagggtggctagccatggacccagacagtgggcaggtcacagctgtgggcaccctcgaccgtgaggatgagcagtttgtgaggaacaacatctatgaagtcatggtcttggccatggacaatggaagccctcccaccactggcacgggaacccttctgctaacactgattgatgtcaatgaccatggcccagtccctgagccccgtcagatcaccatctgcaaccaaagccctgtgcgccaggtgctgaacatcacggacaaggacctgtctccccacacctcccctttccaggcccagctcacagatgactcagacatctactggacggcagaggtcaacgaggaaggtgacacagtggtcttgtccctgaagaagttcctgaagcaggatacatatgacgtgcacctttctctgtctgaccatggcaacaaagagcagctgacggtgatcagggccactgtgtgcgactgccatggccatgtcgaaacctgccctggaccctggaagggaggtttcatcctccctgtgctgggggctgtcctggctctgctgttcctcctgctggtgctgcttttgttggtgagaaagaagcggaagatcaaggagcccctcctactcccagaagatgacacccgtgacaacgtcttctactatggcgaagaggggggtggcgaagaggaccaggactatgacatcacccagctccaccgaggtctggaggccaggccggaggtggttctccgcaatgacgtggcaccaaccatcatcccgacacccatgtaccgtcctcggccagccaacccagatgaaatcggcaactttataattgagaacctgaaggcggctaacacagaccccacagccccgccctacgacaccctcttggtgttcgactatgagggcagcggctccgacgccgcgtccctgagctccctcacctcctccgcctccgaccaagaccaagattacgattatctgaacgagtggggcagccgcttcaagaagctggcagacatgtacggtggcggggaggacgactaggcggcctgcctgcagggctggggaccaaacgtcaggccacagagcatctccaaggggtctcagttcccccttcagctgaggacttcggagcttgtcaggaagtggccgtagcaacttggcggagacaggctatgagtctgacgttagagtggtggcttccttagcctttcaggatggaggaatgtgggcagtttgacttcagcactgaaaacctctccacctgggccagggttgcctcagaggccaagtttccagaagcctcttacctgccgtaaaatgctcaaccctgtgt

SEQ ID NO: 4019 - DNA, 3038 bp, Homo sapiens
  source 1..3038: mol_type = unassigned DNA
cggcggggaagatgaccgcgggcgccggcgtgctccttctgctgctctcgctctccggcgcgctccgggcccataatgaggatcttacaactagagagacctgcaaggctgggttctctgaagatgattacacggcattaatctcccaaaatattctagaaggggaaaagctacttcaagtcaagttcagcagctgtgtggggaccaaggggacacaatatgagaccaacagcatggacttcaaagttggggcagatgggacagtcttcgccacccgggagctgcaggtcccctccgagcaggtggcgttcacggtgactgcatgggacagccagacagcagagaaatgggacgccgtggtgcggttgctggtggcccagacctcgtccccgcactctggacacaagccgcagaaaggaaagaaggtcgtggctctggacccctctccgcctccgaaggacaccctgctgccgtggccccagcaccagaacgccaacgggctgaggcggcgcaaacgggactgggtcatcccgcccatcaacgtgcccgagaactcgcgcgggcccttcccgcagcagctcgtgaggatccggtccgacaaagacaatgacatccccatccggtacagcatcacgggagtgggcgccgaccagccccccatggaggtcttcagcattgactccatgtccggccggatgtacgtcacaaggcccatggaccgggaggagcacgcctcttaccacctccgagcccacgctgtggacatgaatggcaacaaggtggagaaccccatcgacctgtacatctacgtcatcgacatgaatgacaaccgccctgagttcatcaaccaggtctacaacggctccgtggacgagggctccaagccaggcacctacgtgatgaccgtcacggccaacgatgctgacgacagcaccacggccaacgggatggtgcggtaccggatcgtgacccagaccccacagagcccgtcccagaatatgttcaccatcaacagcgagactggagatatcgtcacagtggcggctggcctggaccgagagaaagttcagcagtacacagtcatcgttcaggccacagatatggaaggaaatctcaactatggcctctcaaacacagccacagccatcatcacggtgacagatgtgaatgacaacccgccagaatttaccgccagcacgtttgcaggggaggtccccgaaaaccgcgtggagaccgtggtcgcaaacctcacggtgatggaccgagatcagccccactctccaaactggaatgccgtttaccgcatcatcagtggggatccatccgggcacttcagcgtccgcacagaccccgtaaccaacgagggcatggtcaccgtggtgaaggcagtcgactacgagctcaacagagctttcatgctgacagtgatggtgtccaaccaggcgcccctggccagcggaatccagatgtccttccagtccacggcaggggtgaccatctccatcatggacatcaacgaggctccctacttcccctcaaaccacaagctgatccgcctggaggagggcgtgccccccggcaccgtgctgaccacgttttcagctgtggaccctgaccggttcatgcagcaggctgtgagatactcaaagctgtcagacccagcgagctggctgcacatcaatgccaccaacggccagatcaccacggcggcagtgctggaccgtgagtccctctacaccaaaaacaacgtctacgaggccaccttcctggcagctgacaatgggatacccccggccagcggcaccgggaccctccagatctatctcattgacatcaacgacaacgcccctgagctgctgcccaaggaggcgcagatctgcgagaagcccaacctgaacgccatcaacatcacggcggccgacgctgacgtcgaccccaacatcggcccctacgtcttcgagctgccctttgtcccggcggccgtgcggaagaactggaccatcacccgcctgaacggtgactatgcccaactcagcttgcgcatcctgtacctggaggccgggatgtatgacgtccccatcatcgtcacagactctggaaaccctcccctgtccaacacgtccatcatcaaagtcaaggtgtgcccatgtgatgacaacggggactgcaccaccattggcgcagtggcagcggctggtctgggcaccggtgccatcgtggccatcctcatctgcatcctcatcctgctgaccatggtcctgctgtttgtcatgtggatgaagcggcgagagaaggagcgccacacgaagcagctgctcattgaccccgaggacgacgtccgcgacaacatcctcaagtatgacgaggaaggcggtggcgaggaggaccaggactacgacctcagccagctgcagcagccggaagccatggggcacgtgccaagcaaagcccctggcgtgcgtcgcgtggatgagcggccggtgggcgctgagccccagtacccgatcaggcccatggtgccgcacccaggcgacatcggtgacttcatcaatgagggactccgcgctgctgacaacgaccccacggcacccccctatgactccctgctggtcttcgactacgaggggagcggctccaccgcaggctccgtcagctccctgaactcatccagttccggggaccaagactacgattacctcaacgactgggggcccagattcaagaagctggcggacatgtatggaggtggtgaagaggattgactgacctcgcatcttcggaccgaagtgagagccgtgctcggacgccggaggagcaggactgagcagaggcggccggtcttcccgactccctgcggctgtgtccttagtgctgttaggaggccccccaatccccacgttgagctgtctagcatgagcacccacccccacagcgccctgcacccggccgctgcccagcaccgcgctggctggcactgaaggacagcaagaggcactctgtcttcacttgaatttcctagaacagaagcactgttttta

SEQ ID NO: 4020 - DNA, 3310 bp, Homo sapiens
  source 1..3310: mol_type = unassigned DNA
atcttgggcctgtcacttggggagcactgtagaaggttctggagaaggcattgagactataattctactttaatgagctgggctacctagattctatggtacagcaagagaagctgtttgtatgcacctgtatgtacgtgccttacttaaaattcagaaagaaaatcttcaggtgccagaattacttgtgaggctggtgaagagtgaaaagccacttcccaggccagacaggaaagagtgccctggttgggaccagacgggcctggctgcagacgtacactttgggcttcagcagccctggtgctgccttgagcttgacccgaattgcttcttcccagaggctgggtctccctcgcagcccctgctctcaaggatgggaatgagaaggtcgatgacaaggcacctctgctttacatccaagcgttgacttttgtggcttcctttaccccattgctctgccctttaaagggtcctggtgtgtttgggaatgggacagacaattttgtttttcacaatggtattgggctgtggatccagaactcaagttccagaggaaagcgatgccaaagtcaacagggatgcttcacggaggcagggaaaatgcaggagtcaagttcagcagctgtgtggggaccaaggggacacaatatgagacctcgtccccgcactctggacacaagccgcagaaaggaaagaaggtcgtggctctggacccctctccgcctccgaaggacaccctgctgccgtggccccagcaccagaacgccaacgggctgaggcggcgcaaacgggactgggtcatcccgcccatcaacgtgcccgagaactcgcgcgggcccttcccgcagcagctcgtgaggatccggtccgacaaagacaatgacatccccatccggtacagcatcacgggagtgggcgccgaccagccccccatggaggtcttcagcattgactccatgtccggccggatgtacgtcacaaggcccatggaccgggaggagcacgcctcttaccacctccgagcccacgctgtggacatgaatggcaacaaggtggagaaccccatcgacctgtacatctacgtcatcgacatgaatgacaaccgccctgagttcatcaaccaggtctacaacggctccgtggacgagggctccaagccaggcacctacgtgatgaccgtcacggccaacgatgctgacgacagcaccacggccaacgggatggtgcggtaccggatcgtgacccagaccccacagagcccgtcccagaatatgttcaccatcaacagcgagactggagatatcgtcacagtggcggctggcctggaccgagagaaagttcagcagtacacagtcatcgttcaggccacagatatggaaggaaatctcaactatggcctctcaaacacagccacagccatcatcacggtgacagatgtgaatgacaacccgccagaatttaccgccagcacgtttgcaggggaggtccccgaaaaccgcgtggagaccgtggtcgcaaacctcacggtgatggaccgagatcagccccactctccaaactggaatgccgtttaccgcatcatcagtggggatccatccgggcacttcagcgtccgcacagaccccgtaaccaacgagggcatggtcaccgtggtgaaggcagtcgactacgagctcaacagagctttcatgctgacagtgatggtgtccaaccaggcgcccctggccagcggaatccagatgtccttccagtccacggcaggggtgaccatctccatcatggacatcaacgaggctccctacttcccctcaaaccacaagctgatccgcctggaggagggcgtgccccccggcaccgtgctgaccacgttttcagctgtggaccctgaccggttcatgcagcaggctgtgagatactcaaagctgtcagacccagcgagctggctgcacatcaatgccaccaacggccagatcaccacggcggcagtgctggaccgtgagtccctctacaccaaaaacaacgtctacgaggccaccttcctggcagctgacaatgggatacccccggccagcggcaccgggaccctccagatctatctcattgacatcaacgacaacgcccctgagctgctgcccaaggaggcgcagatctgcgagaagcccaacctgaacgccatcaacatcacggcggccgacgctgacgtcgaccccaacatcggcccctacgtcttcgagctgccctttgtcccggcggccgtgcggaagaactggaccatcacccgcctgaacggtgactatgcccaactcagcttgcgcatcctgtacctggaggccgggatgtatgacgtccccatcatcgtcacagactctggaaaccctcccctgtccaacacgtccatcatcaaagtcaaggtgtgcccatgtgatgacaacggggactgcaccaccattggcgcagtggcagcggctggtctgggcaccggtgccatcgtggccatcctcatctgcatcctcatcctgctgaccatggtcctgctgtttgtcatgtggatgaagcggcgagagaaggagcgccacacgaagcagctgctcattgaccccgaggacgacgtccgcgacaacatcctcaagtatgacgaggaaggcggtggcgaggaggaccaggactacgacctcagccagctgcagcagccggaagccatggggcacgtgccaagcaaagcccctggcgtgcgtcgcgtggatgagcggccggtgggcgctgagccccagtacccgatcaggcccatggtgccgcacccaggcgacatcggtgacttcatcaatgagggactccgcgctgctgacaacgaccccacggcacccccctatgactccctgctggtcttcgactacgaggggagcggctccaccgcaggctccgtcagctccctgaactcatccagttccggggaccaagactacgattacctcaacgactgggggcccagattcaagaagctggcggacatgtatggaggtggtgaagaggattgactgacctcgcatcttcggaccgaagtgagagccgtgctcggacgccggaggagcaggactgagcagaggcggccggtcttcccgactccctgcggctgtgtccttagtgctgttaggaggccccccaatccccacgttgagctgtctagcatgagcacccacccccacagcgccctgcacccggccgctgcccagcaccgcgctggctggcactgaaggacagcaagaggcactctgtcttcacttgaatttcctagaacagaagcactgttttt

SEQ ID NO: 4021 - DNA, 3100 bp, Homo sapiens
  source 1..3100: mol_type = unassigned DNA
ttcttctttctccctctgccttaatgatgctgcccctttcctgttcctggttgaagctgaagcccgcttcccttcgccgcacacaacacaggagcaatcttctcagccgtgcactcacagcttggaaaataaagggaggaaggagtcccagccacagggtagaggaacggcctctccacagagaagctgctgctgctgagctgaagtgacagtcaagttcagcagctgtgtggggaccaaggggacacaatatgagaccaacagcatggacttcaaagttggggcagatgggacagtcttcgccacccgggagctgcaggtcccctccgagcaggtggcgttcacggtgactgcatgggacagccagacagcagagaaatgggacgccgtggtgcggttgctggtggcccagacctcgtccccgcactctggacacaagccgcagaaaggaaagaaggtcgtggctctggacccctctccgcctccgaaggacaccctgctgccgtggccccagcaccagaacgccaacgggctgaggcggcgcaaacgggactgggtcatcccgcccatcaacgtgcccgagaactcgcgcgggcccttcccgcagcagctcgtgaggatccggtccgacaaagacaatgacatccccatccggtacagcatcacgggagtgggcgccgaccagccccccatggaggtcttcagcattgactccatgtccggccggatgtacgtcacaaggcccatggaccgggaggagcacgcctcttaccacctccgagcccacgctgtggacatgaatggcaacaaggtggagaaccccatcgacctgtacatctacgtcatcgacatgaatgacaaccgccctgagttcatcaaccaggtctacaacggctccgtggacgagggctccaagccaggcacctacgtgatgaccgtcacggccaacgatgctgacgacagcaccacggccaacgggatggtgcggtaccggatcgtgacccagaccccacagagcccgtcccagaatatgttcaccatcaacagcgagactggagatatcgtcacagtggcggctggcctggaccgagagaaagttcagcagtacacagtcatcgttcaggccacagatatggaaggaaatctcaactatggcctctcaaacacagccacagccatcatcacggtgacagatgtgaatgacaacccgccagaatttaccgccagcacgtttgcaggggaggtccccgaaaaccgcgtggagaccgtggtcgcaaacctcacggtgatggaccgagatcagccccactctccaaactggaatgccgtttaccgcatcatcagtggggatccatccgggcacttcagcgtccgcacagaccccgtaaccaacgagggcatggtcaccgtggtgaaggcagtcgactacgagctcaacagagctttcatgctgacagtgatggtgtccaaccaggcgcccctggccagcggaatccagatgtccttccagtccacggcaggggtgaccatctccatcatggacatcaacgaggctccctacttcccctcaaaccacaagctgatccgcctggaggagggcgtgccccccggcaccgtgctgaccacgttttcagctgtggaccctgaccggttcatgcagcaggctgtgagatactcaaagctgtcagacccagcgagctggctgcacatcaatgccaccaacggccagatcaccacggcggcagtgctggaccgtgagtccctctacaccaaaaacaacgtctacgaggccaccttcctggcagctgacaatgggatacccccggccagcggcaccgggaccctccagatctatctcattgacatcaacgacaacgcccctgagctgctgcccaaggaggcgcagatctgcgagaagcccaacctgaacgccatcaacatcacggcggccgacgctgacgtcgaccccaacatcggcccctacgtcttcgagctgccctttgtcccggcggccgtgcggaagaactggaccatcacccgcctgaacggtgactatgcccaactcagcttgcgcatcctgtacctggaggccgggatgtatgacgtccccatcatcgtcacagactctggaaaccctcccctgtccaacacgtccatcatcaaagtcaaggtgtgcccatgtgatgacaacggggactgcaccaccattggcgcagtggcagcggctggtctgggcaccggtgccatcgtggccatcctcatctgcatcctcatcctgctgaccatggtcctgctgtttgtcatgtggatgaagcggcgagagaaggagcgccacacgaagcagctgctcattgaccccgaggacgacgtccgcgacaacatcctcaagtatgacgaggaaggcggtggcgaggaggaccaggactacgacctcagccagctgcagcagccggaagccatggggcacgtgccaagcaaagcccctggcgtgcgtcgcgtggatgagcggccggtgggcgctgagccccagtacccgatcaggcccatggtgccgcacccaggcgacatcggtgacttcatcaatgagggactccgcgctgctgacaacgaccccacggcacccccctatgactccctgctggtcttcgactacgaggggagcggctccaccgcaggctccgtcagctccctgaactcatccagttccggggaccaagactacgattacctcaacgactgggggcccagattcaagaagctggcggacatgtatggaggtggtgaagaggattgactgacctcgcatcttcggaccgaagtgagagccgtgctcggacgccggaggagcaggactgagcagaggcggccggtcttcccgactccctgcggctgtgtccttagtgctgttaggaggccccccaatccccacgttgagctgtctagcatgagcacccacccccacagcgccctgcacccggccgctgcccagcaccgcgctggctggcactgaaggacagcaagaggcactctgtcttcacttgaatttcctagaacagaagcactgtttttaaaaaaaaaaaaaaaaaaagaagaaagaaag

SEQ ID NO: 4022 - DNA, 2728 bp, Homo sapiens
  source 1..2728: mol_type = unassigned DNA
ctagggcagtccgaggagattgaaagggcaaaactatcaagcaagaaaactgtaagttctgattagttttatgactttgccttcatgcctcaggagctcaactgatcacggctttcacgacaggctaaggtacttactacaccattctttggcgaaggctattcagcagtggtgacctcttccaatccaacactctacagattattatctctggactcccagctgacaccctgccggaggcaagagctactaagccaactggaactgtgccttttctcttgtcaaggtttttttcttacacaggaaaaagaaagaaaaaaaaaagatgaagttgggcaaagtggagttctgccattttctgcagctaatagctcttttcctgtgtttttctgggatgagtcaagcagaactctcaaggtccagatcaaagccctatttccaatcagggaggtcccggaccaagcgcagctgggtgtggaatcagttctttgtgctggaggaatacatgggttcagaccccctctatgtaggaaagcttcactctgatgttgataaaggagatggttccatcaaatacatcttgtcaggcgaaggggcaagttccattttcattattgatgagaacactggggatattcatgccaccaagagactggatcgtgaggagcaggcctactacacgctccgagctcaagcgctggataggctcaccaacaaacccgtggagcccgagtcggagtttgtcatcaaaattcaggatatcaacgacaatgaacccaaatttttggatggcccatacacggcaggagttcccgaaatgtctcccgtggggacctcagtggtacaagtgacagcgacggatgctgatgatcctacatatggcaacagtgccagagtggtctacagtattctgcaaggacagccgtacttctcagtggagccaaagacaggagtcatcaagactgcccttccaaacatggatagagaggctaaagaccagtatttgcttgtcattcaggcaaaggatatggttggtcaaaatggaggactgtcaggaactacatcagtcactgtgaccctaactgatgtcaacgataatccacctcgctttcctcgaaggtcttatcaatataacgtcccagagtcattacctgtagcctcagttgtggccagaattaaagctgctgatgcagatattggagctaatgctgaaatggagtacaagattgtggatggtgatggtttgggcatttttaagatttctgttgacaaagaaacccaggaaggaatcattactatacagaaggagctggattttgaagccaaaacaagttacacgctacggatagaagctgcaaataaagatgccgaccctcgctttctgagcttgggtccgttcagtgacacgacaactgtgaagataattgtggaagatgtagatgagccccctgtgttctcttcacccttgtaccctatggaggtgtcggaagctacccaggttgggaatatcattggcactgtagcagctcatgacccagattcttccaatagccctgtgaggtactcaattgacagaaacacagacttggagagatacttcaatattgatgccaacagtggggtcatcacaactgccaagtctttggatcgagagacaaatgctattcacaatatcacagtccttgcaatggagagccagaatccatctcaagtaggaagaggctatgtggccatcactatacttgacatcaatgataacgcccctgaatttgccatggactatgagaccaccgtctgtgaaaatgcccagccggggcaggttatccagaaaatcagtgctgtggataaagatgagccatccaatggacaccagttttacttcagcttaacaacggatgcaacaaataaccacaacttttcattgaaagataacaaagacaacacagcctcaatactgaccaggagaaacggcttccggagacaggaacaatcagtttactatctgccaattttcattgtggacagtggatctccctcacttagcagcaccaacaccctcaccatccgcgtgtgtgactgtgatgctgacggcgtagcccagacctgcaatgcagaggcctatgtcctacctgctggcctcagtacaggagccctgatagccatactcgcctgtgtcttgacattattggtgttgatcctccttatcgtcactatgagaagacggaaaaaagagccccttatttttgacgaagaaagagacatcagagaaaatattgtgagatacgatgacgagggcgggggagaggaggacacggaagcgtttgacatggctgcactgagaaacctcaacgtcatccgagacaccaagacccggagggatgtgactccagaaattcaattcctgagtcgaccagcttttaaaagcatcccagataatgtcatctttagggaatttatttgggaaagattaaaagaagccgatgttgatcctggtgctcctccttatgactccctgcagacatatgcttttgaaggaaatggctcagttgctgaatcactcagctctttagattccatcagctcaaactctgatcagaactatgactacctaagtgactggggacctcgctttaaacgactcgcggacatgtatgggactggccaagagagtttgtactcatagccttggaaccttaattcgaaatgtactgaagaaaaagtaacagca

SEQ ID NO: 4023 - DNA, 6834 bp, Homo sapiens
  source 1..6834: mol_type = unassigned DNA
gggcagggtccccgcgcaccgcggagtgggctgtgattggaggaggagcccgtgccgggcgggcccgagcgggtgtcgagccggttcctccagtctgccccgcgcgcggagctgcgcgcactgggtccccaagagcccgcgggcgtccggcagccgagcgcacgttctttcggatgcacacgcccgggtccctggcgtctgacgccgtggggagggcagcgaggccccagatgaagttgggcaaagtggagttctgccattttctgcagctaatagctcttttcctgtgtttttctgggatgagtcaagcagaactctcaaggtccagatcaaagccctatttccaatcagggaggtcccggaccaagcgcagctgggtgtggaatcagttctttgtgctggaggaatacatgggttcagaccccctctatgtaggaaagcttcactctgatgttgataaaggagatggttccatcaaatacatcttgtcaggcgaaggggcaagttccattttcattattgatgagaacactggggatattcatgccaccaagagactggatcgtgaggagcaggcctactacacgctccgagctcaagcgctggataggctcaccaacaaacccgtggagcccgagtcggagtttgtcatcaaaattcaggatatcaacgacaatgaacccaaatttttggatggcccatacacggcaggagttcccgaaatgtctcccgtggggacctcagtggtacaagtgacagcgacggatgctgatgatcctacatatggcaacagtgccagagtggtctacagtattctgcaaggacagccgtacttctcagtggagccaaagacaggagtcatcaagactgcccttccaaacatggatagagaggctaaagaccagtatttgcttgtcattcaggcaaaggatatggttggtcaaaatggaggactgtcaggaactacatcagtcactgtgaccctaactgatgtcaacgataatccacctcgctttcctcgaaggtcttatcaatataacgtcccagagtcattacctgtagcctcagttgtggccagaattaaagctgctgatgcagatattggagctaatgctgaaatggagtacaagattgtggatggtgatggtttgggcatttttaagatttctgttgacaaagaaacccaggaaggaatcattactatacagaaggagctggattttgaagccaaaacaagttacacgctacggatagaagctgcaaataaagatgccgaccctcgctttctgagcttgggtccgttcagtgacacgacaactgtgaagataattgtggaagatgtagatgagccccctgtgttctcttcacccttgtaccctatggaggtgtcggaagctacccaggttgggaatatcattggcactgtagcagctcatgacccagattcttccaatagccctgtgaggtactcaattgacagaaacacagacttggagagatacttcaatattgatgccaacagtggggtcatcacaactgccaagtctttggatcgagagacaaatgctattcacaatatcacagtccttgcaatggagagccagaatccatctcaagtaggaagaggctatgtggccatcactatacttgacatcaatgataacgcccctgaatttgccatggactatgagaccaccgtctgtgaaaatgcccagccggggcaggttatccagaaaatcagtgctgtggataaagatgagccatccaatggacaccagttttacttcagcttaacaacggatgcaacaaataaccacaacttttcattgaaagataacaaagacaacacagcctcaatactgaccaggagaaacggcttccggagacaggaacaatcagtttactatctgccaattttcattgtggacagtggatctccctcacttagcagcaccaacaccctcaccatccgcgtgtgtgactgtgatgctgacggcgtagcccagacctgcaatgcagaggcctatgtcctacctgctggcctcagtacaggagccctgatagccatactcgcctgtgtcttgacattattggtgttgatcctccttatcgtcactatgagaagacggaaaaaagagccccttatttttgacgaagaaagagacatcagagaaaatattgtgagatacgatgacgagggcgggggagaggaggacacggaagcgtttgacatggctgcactgagaaacctcaacgtcatccgagacaccaagacccggagggatgtgactccagaaattcaattcctgagtcgaccagcttttaaaagcatcccagataatgtcatctttagggaatttatttgggaaagattaaaagaagccgatgttgatcctggtgctcctccttatgactccctgcagacatatgcttttgaaggaaatggctcagttgctgaatcactcagctctttagattccatcagctcaaactctgatcagaactatgactacctaagtgactggggacctcgctttaaacgactcgcggacatgtatgggactggccaagagagtttgtactcatagccttggaaccttaattcgaaatgtactgaagaaaaagtaacagcaaaaaataaaataaaatgaaataaaataataaaccactacatacagaaaacaagaactccccttgctggagacagatggttgtaaatatttctccatttttaattgtttagatttctgccttggtgaggcatatcttcattagacttatctaaaggactgcactgaccacagactctgagcatttgaaggttttttgataaaaataaatgctcagtggtttgtgaatagatagcaactctcatatacctgcaaaggcaccaaacctctatgagaaagtagtgccctgtgttgtcagtgagtcaaagatgccctgtacataccttcatggtactgtcattgagaggaatagaacatgatgagctattgaaaaaccctggaacttgttgcatatcaaaacttgggacaaatttaatttacagagatgcttatagcttactatattatagaatccaacagaattatgttgctcttgattaacagaaatattttatttaggaatatataaattcccagaaattccttcctaactgaaaaccctaccacaaaagccagtaaaatttagtttaaggcaatataaaccattgtttatccaataaattatgaagtgttccaaataagaaaaaggtaaataatttgatagttttgagatgcttgtgtaggtatgataaaaaaaaaagttgctgtctgttcattgatttttattatctcttctgatttgtacaggagaatatcttttcttttttatttgacacatggtgttgtatttattttggagctccaatctccactaaattcaggtccatcatactgcctcatagtattaaactcatcagaacatgctgatttttctccagcccgagctacatgaaggaaatgaagcatggaaatggagaactaatagtaaagcaattgagccctgttgcaggtcacatctcaaagaggagcacagctacaaggacatataaattgttcttctgagccattagaatgtcaaaacattggaataaaatatttgtattttagaaagacttcagagagaattgagattttctttgatgcaagaattatttttcaagatcatgagttctacatgctccaaagacgatttcaagaacacaacctttcttgctgcaaacctattgagtaaaatattgagtttttaaaagtcttaatataatgttataaaaattaaaatccatctttaaattctgatgcaaatatgtccctcaagaattaaccaagcaatgtatgatttctgtgtggtttagatgtgccaaaggaaggaaggcaattgcaagtcatcatgtgtttaagtttgagttgagcttgttagagtatgactttcatgaccaaaatgatgtttctacctattatttttcctagattaatactagtttaatgtgcatatacattcaagtaagaatggatttattttttccttcctttctccttttaaaaataattcattgttgggttcctaatacatttacagatagtaaacactgtgtagagaatcatgttctaaaagtgctttttgaaaggtagacagtggaattagaatattaatatgttgattacacaaagaagaactatgtaggattctgtaaacttgcagcccaactttagaaatgaagtatgtaaaagtggccttcaacttcataagtataaataatccaataaatttcattacctgcaaacagttctttaatttgaatagagttttgtagacattgttttatgactatatagatatgcttcttgctgtattaatatgcatatatattttaaaaaattataacagtgaaagatactgttcataacttttaatcacacatgcaagtttttcaaactaaaaaataacaaacaaacaaaaaaacacgcgtatttacccagttcaataaaatcagagtgtggtgcaggaattacagagttgttaagtcagcaaggtgctgagaaaacagtttgtaataatccccttgttgtctgcaagaagatgaaatagtttagtacatttggatgatgtcaaaactgctgattgttgcacataccactaaacggaggtgtggatgtattttagaaaaggaacacacatcattcaccctgctttttctgcttttaaaatgtgtgttttttctcattaattttttcaaatggttaccaatgatagattggaaaaagaaaggttcatgtttaaataataatttaaaattattgcatatacccaattgctatttatgtgtggatgattatatgaatacagtattacatttcattcagtggtattttttaattaaaaaaattaatttaaaaaattaatttttgagatggctggaagaatgttcctaatataggtagtatttatatgaagtattctaagcttaattgtaatagtagtaaattttttgccgttgcttattttagttttcttttttcttctgaaatctaatgctatatatgatgactgtcaatacttgagatataggctttgttttaaaaacagtgattgaagagctgattgataaaattaatattaagtctagttggaaaattctccaaatatgatttaaataaatatatattatcaagttgcttaaattcagtattatactgaaaccaactagaatgagctcacaggaactaattcttcatatctcttcccaactccaggtacagtgatatcattttggtaggttgatgtcagccttggtgggattatttagaccacaacagtaatcagcaaacactacccttttctctggagaacaagttgttaaacatttaccagcactctactgcttaaattattttataaaatgaaatgtcataattgtaaatatagtatgaatttatatgatttaaaataatgacatgaaaggaatttatgctatattttactactaaataacaatgtatgtggtagtgatttcctgaagtgaaatccttggagctacttgtagacagggagaggagtcacttctttatggaaaacaatggctaaatttcaagtagagataatagttcaggaagtcaatatatttaattattttccacttgtccatacaggagcatcaatagaaactcagggtttgccaaattatgcccattttgaacagtttaatttattgaaaaatcagatgcattttacttcttactgtctatgtcaaggaaatacacccaagcccttaatctgaattgtcaccattgcattattaaaaatcaacataaaaatataaaaatcaaatcttaaggaaatggatttctggagatcaagcctaaattatcaatctcaattcacaaattagtctctgaaagaaatattccaagatcagccagctaaggaacaaaatcaggaaagagacatcaataaaaaattaggtagtaatttgcaggcaataagtagatttttgatttttctacaagcaatcaccagatctgggatctggtaaatgtctttatttgccaggaagctctgctgatgactacaattgaggttagttgtctacaagatacatgcaggaggtagtagtggttaagtaatggtagctgccttttcactctgccctctgaggaagttttaaattattttatcttcatgcacaattacatttactacattggatggtagacataggcaattattttcatgtcaacggcatagttacacaatgtaggaatgatatttgtgaagtgatccacatgcccaagaaatgcaaatgcaaatagtgttgttagcatttatattgaaatataaaatctaaagcagcttaaaataagctaagctaaacaaactgcaagaagctaaatgatttaaacatgttaaagttttaaagcactagctgtaaatattaatcttcagattttcaatttaacatgtattcacttacaaactgttctaataataacactaattattttccaagtcaccatttaaagttttatttacagttgacctaatccaattgaagttgatgaaagcttcaacttattttttaactctttctggtccacgatgcctggaggcaagtgaaatatatatgacaaataatagataaaccaatttattttctgttagtgtatgtttattttttaattattaataatgtatattgtgtgtatatatgacggtgtatgaaagttggcaatgaaagctaatacaatcatgttagtcggctggatataataaagaacaagaaaggaataa

SEQ ID NO: 4024 - DNA, 2812 bp, Homo sapiens
  source 1..2812: mol_type = unassigned DNA
gggcagggtccccgcgcaccgcggagtgggctgtgattggaggaggagcccgtgccgggcgggcccgagcgggtgtcgagccggttcctccagtctgccccgcgcgcggagctgcgcgcactgggtccccaagagcccgcgggcgtccggcagccgagcgcacgttctttcggatgcacacgcccgggtccctggcgtctgacgccgtggggagggcagcgaggccccaggtacttactacaccattctttggcgaaggctattcagcagtggtgacctcttccaatccaacactctacagattattatctctggactcccagctgacaccctgccggaggcaagagctactaagccaactggaactgtgccttttctcttgtcaaggtttttttcttacacaggaaaaagaaagaaaaaaaaaagatgaagttgggcaaagtggagttctgccattttctgcagctaatagctcttttcctgtgtttttctgggatgagtcaagcagaactctcaaggtccagatcaaagccctatttccaatcagggaggtcccggaccaagcgcagctgggtgtggaatcagttctttgtgctggaggaatacatgggttcagaccccctctatgtaggaaagcttcactctgatgttgataaaggagatggttccatcaaatacatcttgtcaggcgaaggggcaagttccattttcattattgatgagaacactggggatattcatgccaccaagagactggatcgtgaggagcaggcctactacacgctccgagctcaagcgctggataggctcaccaacaaacccgtggagcccgagtcggagtttgtcatcaaaattcaggatatcaacgacaatgaacccaaatttttggatggcccatacacggcaggagttcccgaaatgtctcccgtggggacctcagtggtacaagtgacagcgacggatgctgatgatcctacatatggcaacagtgccagagtggtctacagtattctgcaaggacagccgtacttctcagtggagccaaagacaggagtcatcaagactgcccttccaaacatggatagagaggctaaagaccagtatttgcttgtcattcaggcaaaggatatggttggtcaaaatggaggactgtcaggaactacatcagtcactgtgaccctaactgatgtcaacgataatccacctcgctttcctcgaaggtcttatcaatataacgtcccagagtcattacctgtagcctcagttgtggccagaattaaagctgctgatgcagatattggagctaatgctgaaatggagtacaagattgtggatggtgatggtttgggcatttttaagatttctgttgacaaagaaacccaggaaggaatcattactatacagaaggagctggattttgaagccaaaacaagttacacgctacggatagaagctgcaaataaagatgccgaccctcgctttctgagcttgggtccgttcagtgacacgacaactgtgaagataattgtggaagatgtagatgagccccctgtgttctcttcacccttgtaccctatggaggtgtcggaagctacccaggttgggaatatcattggcactgtagcagctcatgacccagattcttccaatagccctgtgaggtactcaattgacagaaacacagacttggagagatacttcaatattgatgccaacagtggggtcatcacaactgccaagtctttggatcgagagacaaatgctattcacaatatcacagtccttgcaatggagagccagaatccatctcaagtaggaagaggctatgtggccatcactatacttgacatcaatgataacgcccctgaatttgccatggactatgagaccaccgtctgtgaaaatgcccagccggggcaggttatccagaaaatcagtgctgtggataaagatgagccatccaatggacaccagttttacttcagcttaacaacggatgcaacaaataaccacaacttttcattgaaagataacaaagacaacacagcctcaatactgaccaggagaaacggcttccggagacaggaacaatcagtttactatctgccaattttcattgtggacagtggatctccctcacttagcagcaccaacaccctcaccatccgcgtgtgtgactgtgatgctgacggcgtagcccagacctgcaatgcagaggcctatgtcctacctgctggcctcagtacaggagccctgatagccatactcgcctgtgtcttgacattattggtgttgatcctccttatcgtcactatgagaagacggaaaaaagagccccttatttttgacgaagaaagagacatcagagaaaatattgtgagatacgatgacgagggcgggggagaggaggacacggaagcgtttgacatggctgcactgagaaacctcaacgtcatccgagacaccaagacccggagggatgtgactccagaaattcaattcctgagtcgaccagcttttaaaagcatcccagataatgtcatctttagggaatttatttgggaaagattaaaagaagccgatgttgatcctggtgctcctccttatgactccctgcagacatatgcttttgaaggaaatggctcagttgctgaatcactcagctctttagattccatcagctcaaactctgatcagaactatgactacctaagtgactggggacctcgctttaaacgactcgcggacatgtatgggactggccaagagagtttgtactcatagccttggaaccttaattcgaaatgtactg

SEQ ID NO: 4025 - DNA, 3765 bp, Homo sapiens
  source 1..3765: mol_type = unassigned DNA
ctgggaggcgccgaagtctcagtggctccctgggccggcctccgacagcgctgacagcaggcgcccgccgcccaccatcgtcgccctcttcccctccctcttcggccccggctccggcgcgctctctcctcctctcctgcgcgccctctcgccctctctctggccgcgcgctcccgctggctccggaccctgcgtctcagctgcccgggcgagccggaggggcccctcgcagtgagcagacgcagcgggcccccggcgcccgaggccggggcagggtccccgcgcaccgcggagtgggctgtgattggaggaggagcccgtgccgggcgggcccgagcgggtgtcgagccggttcctccagtctgccccgcgcgcggagctgcgcgcactgggtccccaagagcccgcgggcgtccggcagccgagcgcacgttctttcggatgcacacgcccgggtccctggcgtctgacgccgtggggagggcagcgaggccccaggtacttactacaccattctttggcgaaggctattcagcagtggtgacctcttccaatccaacactctacagattattatctctggactcccagctgacaccctgccggaggcaagagctactaagccaactggaactgtgccttttctcttgtcaaggtttttttcttacacaggaaaaagaaagaaaaaaaaaagatgaagttgggcaaagtggagttctgccattttctgcagctaatagctcttttcctgtgtttttctgggatgagtcaagcagaactctcaaggtccagatcaaagccctatttccaatcagggaggtcccggaccaagcgcagctgggtgtggaatcagttctttgtgctggaggaatacatgggttcagaccccctctatgtaggaaagcttcactctgatgttgataaaggagatggttccatcaaatacatcttgtcaggcgaaggggcaagttccattttcattattgatgagaacactggggatattcatgccaccaagagactggatcgtgaggagcaggcctactacacgctccgagctcaagcgctggataggctcaccaacaaacccgtggagcccgagtcggagtttgtcatcaaaattcaggatatcaacgacaatgaacccaaatttttggatggcccatacacggcaggagttcccgaaatgtctcccgtggggacctcagtggtacaagtgacagcgacggatgctgatgatcctacatatggcaacagtgccagagtggtctacagtattctgcaaggacagccgtacttctcagtggagccaaagacaggagtcatcaagactgcccttccaaacatggatagagaggctaaagaccagtatttgcttgtcattcaggcaaaggatatggttggtcaaaatggaggactgtcaggaactacatcagtcactgtgaccctaactgatgtcaacgataatccacctcgctttcctcgaaggtcttatcaatataacgtcccagagtcattacctgtagcctcagttgtggccagaattaaagctgctgatgcagatattggagctaatgctgaaatggagtacaagattgtggatggtgatggtttgggcatttttaagatttctgttgacaaagaaacccaggaaggaatcattactatacagaaggagctggattttgaagccaaaacaagttacacgctacggatagaagctgcaaataaagatgccgaccctcgctttctgagcttgggtccgttcagtgacacgacaactgtgaagataattgtggaagatgtagatgagccccctgtgttctcttcacccttgtaccctatggaggtgtcggaagctacccaggttgggaatatcattggcactgtagcagctcatgacccagattcttccaatagccctgtgaggtactcaattgacagaaacacagacttggagagatacttcaatattgatgccaacagtggggtcatcacaactgccaagtctttggatcgagagacaaatgctattcacaatatcacagtccttgcaatggagagccagaatccatctcaagtaggaagaggctatgtggccatcactatacttgacatcaatgataacgcccctgaatttgccatggactatgagaccaccgtctgtgaaaatgcccagccggggcaggttatccagaaaatcagtgctgtggataaagatgagccatccaatggacaccagttttacttcagcttaacaacggatgcaacaaataaccacaacttttcattgaaagataacaaagacaacacagcctcaatactgaccaggagaaacggcttccggagacaggaacaatcagtttactatctgccaattttcattgtggacagtggatctccctcacttagcagcaccaacaccctcaccatccgcgtgtgtgactgtgatgctgacggcgtagcccagacctgcaatgcagaggcctatgtcctacctgctggcctcagtacaggagccctgatagccatactcgcctgtgtcttgacattattgggtaggtactgtttccagggcttgctctgaaagagctgtcacaataaccacatgtcacgacttgcctattatcttctccatttggtgaacatatgcagatattctactggatggtgtttgttttgttttgtttttctttgagacggggtctcactctgttgcccaggctggagtgcagtagaatgatctgggctcactgcagcctctgcctcccaggttcaagcaattctcccacctcagcctcccgagtagctgggattacaggggtgcaccaccacacccagctaacttttgtatctttagtagagactgagtttcaccatgttgggcaggctggtcttgaactcctgacctcaggtgatccacccaccttggcctcccaaagtgctgggattacaggagtgagccacagctcctggcctggatggtgttttgctcactaagtaatacaattgttggccacactttccagtggtatatttgaagtataactcagacaaaaagttgtatcaatttcattttcaaagcaacagtgaagataaatggcttatgctttaaattaatgctttttaggattaaaaataatctatcttatcccagttctttgctttagagcactctacagaggagatacactagactggagaatacattttctatattgttttgacaatatgcttattttagaaattatggctttatattctactttttaaagaaattatttgattgctttcttaaattatttgcaaatttgaaatgattacaatttcagcaatgcaaatcttatatttttaaagtattaaatactaacacatttaattgtacatttccatgattagtttattactcggttaaattaaatttataactcatatttgcagtaactcagattttgcagcatccttttaaaaattgggagatgtccaatgtggacactgggtaatgggtttattccaaagaaacatttttcttcacattgtaacttgtaacacgaacacaacaagaacagagtaaacattcaatataccgttccatatggtgaatgttcaataaattttaagtgttactgatggaaaattataagctaagacctagttactaatacattataaatgctgtcgtgaaaatggaggttattgtcttaagtaacttaagctaaacaagtaaatctaaaagaaaataaactatattttgcatagaacttt

SEQ ID NO: 4026 - DNA, 9721 bp, Homo sapiens
  source 1..9721: mol_type = unassigned DNA
aacataacgccagccccagagctcaggtgagacctctagagagaaagctcgcaggtacctcatccgcatgctgttattatctgccagcccacttatccaggagctcggtcctcagcgggctgcgcgcaccgcgcggaagggcgcatcttcacctcgtggctctggcggcagagacgcgcggggcttgctcgggagcgaggagcgaaaagttgtgcgcccacttgggtagggggaaagagagcgatcgagccagcgcgggagagcgaagggggaaggcggggagggggcggggaggggggactgcttacatgaatttccaagtggtagacctgcctctgcgctctgcccaatgagatccgtcaggggaggcacccggctcacttttccacatcacttcacagttacatttggcaggcaggcgggctcgcacgccggagcgctcagcccagaattagtggatttatttggaatctccctgcctcctccaagctccgccgccgccgccggcttgtgcatagacggtagcgtcaagacaccagctgcactttgggttgcggacacccagagcccagcgcgcccgccctgcgtctccgcaccaagccctgtagctccgagaggcatgaacggaatccggaggcgcctgcctagcgagcgaggaccggtcggcgcttgccgccctcgggagctaaccccgagcacctccagccatttgtgaacctggaggcttgacattcgccagcgcagggccccacaagagaaatttcaatgaaaagaaaagccaatggattgtggtcttagaaaagctgcttagatgatgtctgtttcccgtgctatagacacgtggcagagctgtaagtaaatgctcggcactgcatgatgaattggatggctgcagaccggagacaaaaaaaataattgtctcattttcgtggtgatttgcttaactggtgggaccatgccagaacggctagcggaaatgctcttggatctctggactccattaataatattatggattactcttcccccttgcatttacatggctccgatgaatcagtctcaagttttaatgagtggatcccctttggaactaaacagtctgggtgaagaacagcgaattttgaaccgctccaaaagaggctgggtttggaatcaaatgtttgtcctggaagagttttctggacctgaaccgattcttgttggccggctacacacagacctggatcctgggagcaaaaaaatcaagtatatcctatcaggtgatggagctgggaccatatttcaaataaatgatgtaactggagatatccatgctataaaaagacttgaccgggaggaaaaggctgagtataccctaacagctcaagcagtggactgggagacaagcaaacctctggagcctccttctgaatttattattaaagttcaagacatcaatgacaatgcaccagagtttcttaatggaccctatcatgctactgtgccagaaatgtccattttgggtacatctgtcactaacgtcactgcgaccgacgctgatgacccagtttatggaaacagtgcaaagttggtttatagtatattggaagggcagccttatttttccattgagcctgaaacagctattataaaaactgcccttcccaacatggacagagaagccaaggaggagtacctggttgttatccaagccaaagatatgggtggacactctggtggcctgtctgggaccacgacacttacagtgactcttactgatgttaatgacaatcctccaaaatttgcacagagcctgtatcacttctcagtaccggaagatgtggttcttggcactgcaataggaagggtgaaggccaatgatcaggatattggtgaaaatgcacagtcatcatatgatatcatcgatggagatggaacagcactttttgaaatcacttctgatgcccaggcccaggatggcattataaggctaagaaaacctctggactttgagaccaaaaaatcctatacgctaaaggtagaggcagccaatgtccatattgacccacgcttcagtggcagggggccctttaaagacacggcgacagtcaaaatcgtggttgaagatgctgatgagcctccggtcttctcttcaccgacttacctacttgaagttcatgaaaatgctgctctaaactccgtgattgggcaagtgactgctcgtgaccctgatatcacttccagtcctataaggttttccatcgaccggcacactgacctggagaggcagttcaacattaatgcagacgatgggaagataacgctggcaacaccacttgacagagaattaagtgtatggcacaacataacaatcattgctactgaaattaggaaccacagtcagatatcacgagtacctgttgctattaaagtgctggatgtcaatgacaacgcccctgaattcgcatccgaatatgaggcatttttatgtgaaaatggaaaacccggccaagtcattcaaactgttagcgccatggacaaagatgatcccaaaaacggacattatttcttatacagtctccttccagaaatggtcaacaatccgaatttcaccatcaagaaaaatgaagataattccctcagtattttggcaaagcataatggattcaaccgccagaagcaagaagtctatcttttaccaatcataatcagtgatagtggaaatcctccactgagcagcactagcaccttgacaatcagggtctgtggctgcagcaatgacggtgtcgtccagtcttgcaatgtcgaagcttatgtccttccaattggactcagtatgggcgccttaattgccatattagcatgcatcattttgctgttagtcatcgtggtgctgtttgtaactctacggcggcataaaaatgaaccattaattatcaaagatgatgaagacgttcgagaaaacatcattcgctacgatgatgaaggaggaggggaggaggacacagaggcttttgacattgcaactttacaaaatccagatggaattaatggatttttaccccgtaaggatattaaaccagatttgcagtttatgccaaggcaagggcttgctccagttccaaatggtgttgatgtcgatgaatttataaatgtaaggctgcatgaggcagataatgatcccacggccccgccatatgactccattcagatatatggctatgaaggccgagggtcagtggctggctccctcagctccttggagtccaccacatcagactcagaccagaattttgactacctcagtgactggggtccccgctttaagagactgggcgaactctactctgttggtgaaagtgacaaagaaacttgacagtggattataaataaatcactggaactgagcattctgtaatattctagggtcactccccttagatacaaccaatgtggctatttgttttagaggcaagtttagcaccagtcatctataaactcaaccacattttaatgttgaaccaaaaaaagataataaaataaaaaagtatatgttaggaggttataaatcttgtggagtgtgaattaagtatgtggagtgtctagaagtccttggatatttgatatttacctgaccaccacagacaaagattgggatcctggctaatccttagataaatggtttaaatagaggaaaaaatcataattaaaaggtgctttcttagaaaaaaaaatacggacctgcaaggaatctgctgctgatatgtgtcttctgcaaggatttttatgaatgcaaatggttttttccccttcaccaataaggatcccgccacaaatgataaagcaatacttggtctgctgtacattataactttttggagttttgagaggcctcctagattatacagtacggtgaccacacattgtacataattgttggccccactcactagagactgaatagcatctttaaatattgtgtcgagccttaaaatattcacatgttcgtaatccattccagggtggggcttgccaattcagtggtgggaggagagaaatcccattcaaacatgcttgttttctagaagcaggattcctcgttccctcctcttcatcttcttccacaaggacacaaagataaactgtatcacacagtggactacataagagacagatggttttattgctagcgcgtgaatttatttgtttaatcctcgaaataaatattttattgatgtccattaatgcttttatttattaaggtcggtaatctatagattaaggggatatatgggaaaaaactaaattatatccattaataatcctttagattgttttatataaatatatatacaatgaatgtttaatacatgtacattttgatgagatgagtatggcaggcaatattatcgaaaggagagctaatagtctctttagagtagaaagtgttattgtaactggagatggcaggaacagcatcttcccagacaaacttttggactgttttctattttgttcataatcctagtatttggtgtttttactacaagcacaaacatcctaaagtatattgattcctgtgaatatttaaactctagacttttagatacctacatcatgccctgcccaataaacatgcttcaatttacccccacagttttagagcaggaactgatttgtacataatttcactgtttacgtttttagcactcctatccctgatcttcatggtgatgcacagaatgtcttagactccaaaaaggaacagcactagaagatgtgagcatatttaatttgtaatgcaaacctgccatttaggagtagaaaatgtatgataaaactcaagtattacatgcagatcattttaattttctactttgctttaatgcaatattgtttattcactccatgtattgtattcagagaaactcctgtattgtttcctactttgtgaaatatatttttataaatacctttgttgtcattaatttttttttcaatcagtggaagatctattaacagaatcatcaactcaaactaaaattctagaatactcaaccaaatcatcccaagggtcacttttgtttgtaagactctttattatagagaaacagagaagagaaatggcttgccagtgatcacacagcaagataccagcagggacataagaggaacatggaacacctaaaggctagtccagctgtgtcatttgggtccttctggaagcagacgcattgggcagggaaaaccttcagacaagtttgcagacctaaaacttgtaacaatagagggattgggagcaggatttggcaagagagtcttagactgcagtgcggacctggcaaaatctctgccagtctgacagggggttctagagtgaaaacacatccattaaagcagtcaggctgtggtcctctgtcatctcagtcattggtgcggggctgctaagaagagaacggtttttgactcaaaagctgaacgcaccaacttctagaggccaccttcactgtgacagaaactgcatgtttaaatactatactaacaatttataactatccggtggcttaatcaactttttattgagtttctgttgctgagaataagtcatcttttatgcgtattattacggctagtgaacactttttcttgaggtcaaagggatggtccaacatgactttaaaatatactaggacttggcacagtgtctaaaacaagtgcttggtgaatgtaaattattagtagtagttgcagtaataaccaatagtaatattccaactatcttacaccttccaaaccaaggagagattattatgttttatgtatctcttgaacaccagactcatttctagtgtactttgaagtgcccaaagattatagacacacaaatatgtctaacagaataattacagtattttttaaggagtataaaatctgtatcctcaaatattggtaatcaacaggataatcttcgtacagtggtttctgtgagcaggagataatgtctgctctactagttgcccaaatatcgcctaagtattctctttgcctaggaacacagaatgaaagcttgcatctcttgctgactttctttgccaccacagtgtcagcattttgtgtttaaaagcctatttcaggtcttgtaacatagaataaagtgactaataccttgatcctaataagattgacctatacttttagagtgtcatgaattaaactaaaaatctcaggaactatctctctctttctctctttctctctctctctctctctctctctcacacacacacacacacacacacacacacacacacaacaaacaaataaaaaacacacattttgacttgaagttttactttagcaatagacttgccaggactttcccaaccaaaagatatcaataaggttcctaacattttctaagatttaagtatcccatgctcaatttgttaaataacacattttaaaaactttattgaaatgactatatttttaaagctatgtgcattgttgtctgtttcatcaacattgacatagcagaaacaagagtactctctgctaaatagagaagaatgattaagttggagccaagtgagacaaagttatctccctctgcctacctcacaattcaaggttcccacctagggaactgatgcatccctgggtgattggacacaacatgggatcaattcagcctctactctgcctatgatttgatcaaatcatattagcaaagtgtctcttaaacatccatatatgaatattaaagagtattaaggggggcatttcttaacaatatttttatgagtatagttataagtttctaaacatttataatacgatgactaaaatatgctatttttaaattcaagtgttaaccttgccacacagaattatgacttctagggtgtaaactttaaagtgaaactgttttgaaaaaaatctgcagttaagtgtatgtgtatatatagaagaaaaggaaacttagatttactggtatcaccagtgaagcaagaatgcttagaaagatacaaatgtgtctttgggagagtctgcttaatcagatgcttaaagtaagacaagtctctgcatgagacttagaaatctcctaggagcagctggattccacactgagactcaacagagttctgggctatgctgtattttggaaaaggaaaagcgggtgctgagagctaagtagccaattactctttatagccacataaggactgaaggcaagtaggcccttccaacaagttgtattatgcgatcactggctttgcagggaatctcacgaatgtataaccttctgattgcctttttgattgaaagttccatctgagatcagggcagtgtaaccagtaataagatttcaaaaaaatcccatcactggcactgtcggaaaggctgagcatgactgaaatcctatcattgtcagtcaaaaagataaggtaacagcgggcatcactataaaagctctataaatgcacaacttaaacatgaatatcaacattaaaaagaatatatatatccttatacatatatttataaatatattcatatatataaatatgcacatatatacacaattcagttactggggataatttatagttttaatttttcatctcataatctcacgcactgccaacaaattgaaattgtggctctctgttttcatgaatctaaccttgaatttgaaagaagttgaattgagggtaaagggttttaaaagcagctttttatttgtgaacagaataatggctcataatacctgggattagaattaaatatgtcacgttgtgaggctgtacttagactttttaaatgtcattgtatttttttgtggacaaaataattgtagaatatactttgcaggaaatacttttctatattttttcaatttcaatactgttttatttgctataaaaagtgtctttgcactgttactcagccaaacagtgttgaatgtattatttgcccttgtaattattgcttcttatgataattgtagaagagcatgtctttatgatctatcatttaaaaatacatttattgtcattgtagttttagtcaacacaaatttatggattacatggtatactgttgctattgaagatattctagtcctagtattttgagcacagacctagcgttatggaggacataaaatttaaaaatttcctgacttgatggactatctgaggaaaaagaattttgtctgtcacatttattgagtatctatcagtacagaaattaagctacatggttgatacagaaagattaaatacagtagcattctcaaacttattttctttatttataaaatgtacctaatcaatctcataagaactaattgttgaattttttttttatctatggataaatactatttgagtctgggtttaagtttggttgatctgacactaaatccccttaactttcaactaaacagttatctctgtaattatgagacttttgatgataagaaatagaaactaagttatatatagtgctatggaagtactgaggaggaagtaagggaccccatatgggaagactcaagaagacgtcacggtgaaattttccaaaaagatgggaactcaagaatgggtgcaacagaaatcacagcttttccaaatactaaaagggaaaattataaaaagcaccaatggcacacttttggacattcagaaagatccagaaattaggtgcttataggaaactctaggtttgccaaattgtagtgttttatggataggaaaaatgaagttcagaaacgttataaggaattttcagggttaaattacacatcaaatatgtgagagaaacagaaattacatgctggtatttggggtcatctcctgagttgtaatgttgtaagtgtttttgtatgtattctcctccttcctttatgtgtggaagtttcatctaggtctcaaggttagtaggcatttgctggtgaaaatagtgcctttgggtactatttccccaacttgagttacctgccaccatctaattcacatcttgaatgcaagtattatttcttgcaagtatccctactaatagataatagatatttctattattatccacagattacagaagagggttgctaggaggaatatcacaagatgctgtctgaagagaaagactgtggaaaaccatggcttcaatgaactcagaggtcaggaccagaaaaggaaatgagaggtcaccaaagccaaatgttaatttcttgggatttcttctgtacatgcaaagaacttcaggccatcctatgattcctcaaaaataagaggaaaattttaacaattatgctctaagatggaccatgacaatttaggagtcattgggatcaccccccaaagccaaatgttaatttcttgggatttcttctgtacatgcaaagaacttcaggccatcctatgatccctcacaaataagaggaagattttaacaattatgctctaagatggaacatgacaatttaggagtcactgggatcaccccccccacctttccaacgttactctgctttaactacaaatatgtcgaatggttttctaatttttctttaacttaacctctaaagttcgagagctgtcatctttgtcaagtctgattgttgagtatgtgaatggatgtttttggctcaatgttagagccaaaatttataaataataattatttatacataatgatattgcaaataaactttaagaaagagctttaaacataaaaa

SEQ ID NO: 4027 - DNA, 4950 bp, Homo sapiens
  source 1..4950: mol_type = unassigned DNA
aacataacgccagccccagagctcaggtgagacctctagagagaaagctcgcaggtacctcatccgcatgctgttattatctgccagcccacttatccaggagctcggtcctcagcgggctgcgcgcaccgcgcggaagggcgcatcttcacctcgtggctctggcggcagagacgcgcggggcttgctcgggagcgaggagcgaaaagttgtgcgcccacttgggtagggggaaagagagcgatcgagccagcgcgggagagcgaagggggaaggcggggagggggcggggaggggggactgcttacatgaatttccaagtggtagacctgcctctgcgctctgcccaatgagatccgtcaggggaggcacccggctcacttttccacatcacttcacagttacatttggcaggcaggcgggctcgcacgccggagcgctcagcccagaattagtggatttatttggaatctccctgcctcctccaagctccgccgccgccgccggcttgtgcatagacggtagcgtcaagacaccagctgcactttgggttgcggacacccagagcccagcgcgcccgccctgcgtctccgcaccaagccctgtagctccgagaggcatgaacggaatccggaggcgcctgcctagcgagcgaggaccggtcggcgcttgccgccctcgggagctaaccccgagcacctccagccatttgtgaacctggaggcttgacattcgccagcgcagggccccacaagagaaatttcaatgaaaagaaaagccaatggattgtggtcttagaaaagctgcttagatgatgtctgtttcccgtgctatagacacgtggcagagctgtaagtaaatgctcggcactgcatgatgaattggatggctgcagaccggagacaaaaaaaataattgtctcattttcgtggtgatttgcttaactggtgggaccatgccagaacggctagcggaaatgctcttggatctctggactccattaataatattatggattactcttcccccttgcatttacatggctccgatgaatcagtctcaagttttaatgagtggatcccctttggaactaaacagtctgggtgaagaacagcgaattttgaaccgctccaaaagaggctgggtttggaatcaaatgtttgtcctggaagagttttctggacctgaaccgattcttgttggccggctacacacagacctggatcctgggagcaaaaaaatcaagtatatcctatcaggtgatggagctgggaccatatttcaaataaatgatgtaactggagatatccatgctataaaaagacttgaccgggaggaaaaggctgagtataccctaacagctcaagcagtggactgggagacaagcaaacctctggagcctccttctgaatttattattaaagttcaagacatcaatgacaatgcaccagagtttcttaatggaccctatcatgctactgtgccagaaatgtccattttgggtacatctgtcactaacgtcactgcgaccgacgctgatgacccagtttatggaaacagtgcaaagttggtttatagtatattggaagggcagccttatttttccattgagcctgaaacagctattataaaaactgcccttcccaacatggacagagaagccaaggaggagtacctggttgttatccaagccaaagatatgggtggacactctggtggcctgtctgggaccacgacacttacagtgactcttactgatgttaatgacaatcctccaaaatttgcacagagcctgtatcacttctcagtaccggaagatgtggttcttggcactgcaataggaagggtgaaggccaatgatcaggatattggtgaaaatgcacagtcatcatatgatatcatcgatggagatggaacagcactttttgaaatcacttctgatgcccaggcccaggatggcattataaggctaagaaaacctctggactttgagaccaaaaaatcctatacgctaaaggtagaggcagccaatgtccatattgacccacgcttcagtggcagggggccctttaaagacacggcgacagtcaaaatcgtggttgaagatgctgatgagcctccggtcttctcttcaccgacttacctacttgaagttcatgaaaatgctgctctaaactccgtgattgggcaagtgactgctcgtgaccctgatatcacttccagtcctataaggttttccatcgaccggcacactgacctggagaggcagttcaacattaatgcagacgatgggaagataacgctggcaacaccacttgacagagaattaagtgtatggcacaacataacaatcattgctactgaaattaggaaccacagtcagatatcacgagtacctgttgctattaaagtgctggatgtcaatgacaacgcccctgaattcgcatccgaatatgaggcatttttatgtgaaaatggaaaacccggccaagtcattcaaactgttagcgccatggacaaagatgatcccaaaaacggacattatttcttatacagtctccttccagaaatggtcaacaatccgaatttcaccatcaagaaaaatgaagataattccctcagtattttggcaaagcataatggattcaaccgccagaagcaagaagtctatcttttaccaatcataatcagtgatagtggaaatcctccactgagcagcactagcaccttgacaatcagggtctgtggctgcagcaatgacggtgtcgtccagtcttgcaatgtcgaagcttatgtccttccaattggactcagtatgggcgccttaattgccatattagcatgcatcattttgctgttagtcatcgtggtgctgtttgtaactctacggcggcataaaaatgaaccattaattatcaaagatgatgaagacgttcgagaaaacatcattcgctacgatgatgaaggaggaggggaggaggacacagaggcttttgacattgcaactttacaaaatccagatggaattaatggatttttaccccgtaaggatattaaaccagatttgcagtttatgccaaggcaagggcttgctccagttccaaatggtgttgatgtcgatgaatttataaatgtaaggctgcatgaggcagataatgatcccacggccccgccatatgactccattcagatatatggctatgaaggccgagggtcagtggctggctccctcagctccttggagtccaccacatcagactcagaccagaattttgactacctcagtgactggggtccccgctttaagagactgggcgaactctactctgttggtgaaagtgacaaagaaacttgacagtggattataaataaatcactggaactgagcattctgtaatattctagggtcactccccttagatacaaccaatgtggctatttgttttagaggcaagtttagcaccagtcatctataaactcaaccacattttaatgttgaaccaaaaaaagataataaaataaaaaagtatatgttaggaggttataaatcttgtggagtgtgaattaagtatgtggagtgtctagaagtccttggatatttgatatttacctgaccaccacagacaaagattgggatcctggctaatccttagataaatggtttaaatagaggaaaaaatcataattaaaaggtgctttcttagaaaaaaaaatacggacctgcaaggaatctgctgctgatatgtgtcttctgcaaggatttttatgaatgcaaatggttttttccccttcaccaataaggatcccgccacaaatgataaagcaatacttggtctgctgtacattataactttttggagttttgagaggcctcctagattatacagtacggtgaccacacattgtacataattgttggccccactcactagagactgaatagcatctttaaatattgtgtcgagccttaaaatattcacatgttcgtaatccattccagggtggggcttgccaattcagtggtgggaggagagaaatcccattcaaacatgcttgttttctagaagcaggattcctcgttccctcctcttcatcttcttccacaaggacacaaagataaactgtatcacacagtggactacataagagacagatggttttattgctagcgcgtgaatttatttgtttaatcctcgaaataaatattttattgatgtccattaatgcttttatttattaaggtcggtaatctatagattaaggggatatatgggaaaaaactaaattatatccattaataatcctttagattgttttatataaatatatatacaatgaatgtttaatacatgtacattttgatgagatgagtatggcaggcaatattatcgaaaggagagctaatagtctctttagagtagaaagtgttattgtaactggagatggcaggaacagcatcttcccagacaaacttttggactgttttctattttgttcataatcctagtatttggtgtttttactacaagcacaaacatcctaaagtatattgattcctgtgaatatttaaactctagacttttagatacctacatcatgccctgcccaataaacatgcttcaatttacccccacagttttagagcaggaactgatttgtacataatttcactgtttacgtttttagcactcctatccctgatcttcatggtgatgcacagaatgtcttagactccaaaaaggaacagcactagaagatgtgagcatatttaatttgtaatgcaaacctgccatttaggagtagaaaatgtatgataaaactcaagtattacatgcagatcattttaattttctactttgctttaatgcaatattgtttattcactccatgtattgtattcagagaaactcctgtattgtttcctactttgtgaaatatatttttataaat

SEQ ID NO: 4028 - DNA, 3079 bp, Homo sapiens
  source 1..3079: mol_type = unassigned DNA
actgagatgcatgaagattcagctgtgaagatactataaaaagggaagagaaggaccgagacagaagcaacaacggaactgtcagtgcggagtagggctaaactcagttccattgttaagcaaggaaaaacaaacaatacattgaatttgacaacccactgaagttgcagataatgaggacttaccattatataccattattcatctggacctatatgttccatacagttgacaccatcctattacaagaaaaacctaacagttatttatcaagcaaaaagatagcgggtctgacaaaagatgacggtaaaatgctacgtcgcaccaagcgtggctggatgtggaatcagttcttcttattggaagagtacacaggtactgacacacaatatgtaggcaagcttcacactgaccaagataaaggagatggaaatttaaaatacatactaacaggagatggggctggcagtctatttgttatagatgaaaatacaggagacattcatgctgcaaagaaactagacagagaagaaaaatctctgtacattcttcgtgccaaggctatagacagaaaaactgggcggcaggtggaaccggaatcggaatttatcattaaaatacatgatatcaatgacaatgagccaaaatttacaaaagacttatacactgccagtgttcctgaaatgtctggagtcggtacatctgttatacaagtaactgcaacagatgcagatgacgccaactatggaaatagtgccaaagtggtctatagcatattgcaaggacagccatatttttcagtggacccagaatcaggcataataaaaactgcattaccagacatgagcagagaaaatagagagcagtaccaggttgttatacaggccaaagacatgggtggccagatgggaggcctttctggaaccaccacagtgaacatcacgctgacagatgtcaacaacaaccctcctcgatttccccagagtacgtatcaatttaattctcctgagtctgtacctcttggaactcatcttggaaggataaaagccaatgaccctgacgtgggggaaaatgcagaaatggagtatagcattgctgaaggagatggtgcagacatgttcgatgtcatcactgacaaggatacacaggaagggattataactgtcaaacagaatttagattttgaaaatcaaatgctctatactttaagagtggatgcaagtaacactcaccctgatccacgattcttacacctgggacctttcaaagatacagctgtggtcaaaatatctgtggaagatatagatgagcctcctgtgttcactaaagtctcttacttgatagaagtagatgaagatgtaaaggagggcagtatcattggacaggttacagcatacgatccagatgccaggaacaatttaataaagtactctgttgatcggcatactgatatggaccgtatttttggtattcactcagaaaatggttctattttcactttgaaagcccttgaccgggaatcatctccttggcataacatcactgttacagccacagaaataaataacccaaaacaaagtagccacatccctgtcttcatcagaattctagatataaatgaccatgctccggaatttgccatgtattatgaaacatttgtttgtgaaaatgcaaaacctgggcagttgattcagactgtcagtgtcatggataaggatgaccctccccgaggtcacaaattcttttttgaaccagtgccagaatttactctcaatccgaatttcaccattgtagataataaagataatacagcaggaatcatgactcggaaagatggctacagtcgcaacaaaatgagcacctacttattgccgattttaatctttgacaacgattatccaattcaaagcagcactggtacactcactatccgtgtgtgtgcctgcgataatcaaggaaacatgcaatcctgcaccgcagaagccctgatcctttcagccggcctgagcacgggagctctcgttgcgattctactctgtgtcctcatactgcttattttagtcgtgttgtttgctgcattgaagaggcaaagaaaaaaggaacctctgataatttcaaaagacgatgtccgggacaacattgtgacctacaacgatgaaggcggcggggaagaagatacccaagcttttgacattggcacattaaggaatccagaggcaagagaagacagtaaacttagacgggatgtaatgcctgaaactatttttcagataaggaggactgtgcctctgtgggaaaatattgatgtacaagattttatccatcgaagattaaaagaaaacgacgcagacccaagtgcacctccatatgattcgctggcaacgtatgcctatgaagggaatgattccatagcagattcgctcagttctttggaatctctcacagctgattgtaaccaagattatgattacctcagtgactgggggcctcgtttcaaaaaacttgccgatatgtatgggggtgatgatagtgaccgagactaagaggattgtttgacttaatcaatattagtggaagtactgtctatgttattagattgagtggcctgcattctcttcctgggaggaaatctttcaaaaattgaagttacaaacaatacgtagatgttgtcaagtagggatttgcttaatcagtaagtctttgtgaatgaatacgaatgatacagatttttaaaaaagtaataaccagttcaccctctttgcctaacaatctcggaaggaaaatatatcacatcaataatcaataaaaataagtaaaaggctttttgtgccttttcttaggtataataatttataaatgttttcttaactgactttcagtcacctttacaattaaactaaatattgtgcaaccgctttgtaaattaatatgaagaagatatatccctaatgaaataggaatgactattactgccatatttatttagttgaagaatgtctttgtgttaattcattcatatttttataaatgtatatttatatttttgtatttttatgaaataaactagtatttataaaac

SEQ ID NO: 4029 - DNA, 532 bp, Homo sapiens
  source 1..532: mol_type = unassigned DNA
gagatgcatgaagattcagctgtgaagatactataaaaagggaagagaaggaccgagacagaagcaacaacggaactgtcagtgcggagtagggctaaactcagttccattgttaagcaaggtctcattctgtcgcccaggctggagtgtagtggcaggatcttggctcactgcaacgtctgcctcttgggttcaagtgattattgtgattcaacctcccaagtatctgggactacaggaaaaacaaacaatacattgaatttgacaacccactgaagttgcagataatgaggacttaccattatataccattattcatctggacctatatgttccatacagttgacaccatcctattacaagaaaaacctaacagttatttatcaagcaaaaagatagcgggtctgacaaaagatgacggtaaaatgctacgtcgcaccaagcgtggctggatgtggaatcagttcttcttattggaagagtacacaggtactgacacacaatatgtaggcaagcttcacactgaccaaga

SEQ ID NO: 4030 - DNA, 556 bp, Homo sapiens
  source 1..556: mol_type = unassigned DNA
agacttaactggggaagcctctattgtccctagcatttaccctattgtgtccggaattggtgggttcttggtctcactgacttcaagaacgaagccgcgcaccctcacggaaaaacaaacaatacattgaatttgacaacccactgaagttgcagataatgaggacttaccattatataccattattcatctggacctatatgttccatacagttgacaccatcctattacaagaaaaacctaacagttatttatcaagcaaaaagatagcgggtctgacaaaagatgacggtaaaatgctacgtcgcaccaagcgtggctggatgtggaatcagttcttcttattggaagagtacacaggtactgacacacaatatgtaggcaagcttcacactgaccaagataaaggagatggaaatttaaaatacatactaacaggagatggggctggcagtctatttgttatagatgaaaatacaggagacattcatgctgcaaagaaactagacagagaagaaaaatctctgtacattcttcgtgccaaggctatagacag

SEQ ID NO: 4031 - DNA, 11389 bp, Homo sapiens
  source 1..11389: mol_type = unassigned DNA
atggcgccgccgccgccgcccgtgctgcccgtgctgctgctcctggccgccgccgccgccctgccggcgatggggctgcgagcggccgcctgggagccgcgcgtacccggcgggacccgcgccttcgccctccggcccggctgtacctacgcggtgggcgccgcttgcacgccccgggcgccgcgggagctgctggacgtgggccgcgatgggcggctggcaggacgtcggcgcgtctcgggcgcggggcgcccgctgccgctgcaagtccgcttggtggcccgcagtgccccgacggcgctgagccgccgcctgcgggcgcgcacgcaccttcccggctgcggagcccgtgcccggctctgcggaaccggtgcccggctctgcggggcgctctgcttccccgtccccggcggctgcgcggccgcgcagcattcggcgctcgcagctccgaccaccttacccgcctgccgctgcccgccgcgccccaggccccgctgtcccggccgtcccatctgcctgccgccgggcggctcggtccgcctgcgtctgctgtgcgccctgcggcgcgcggctggcgccgtccgggtgggactggcgctggaggccgccaccgcggggacgccctccgcgtcgccatccccatcgccgcccctgccgccgaacttgcccgaagcccgggcggggccggcgcgacgggcccggcggggcacgagcggcagagggagcctgaagtttccgatgcccaactaccaggtggcgttgtttgagaacgaaccggcgggcaccctcatcctccagctgcacgcgcactacaccatcgagggcgaggaggagcgcgtgagctattacatggaggggctgttcgacgagcgctcccggggctacttccgaatcgactctgccacgggcgccgtgagcacggacagcgtactggaccgcgagaccaaggagacgcacgtcctcagggtgaaagccgtggactacagtacgccgccgcgctcggccaccacctacatcactgtcttggtcaaagacaccaacgaccacagcccggtcttcgagcagtcggagtaccgcgagcgcgtgcgggagaacctggaggtgggctacgaggtgctgaccatccgcgccagcgaccgcgactcgcccatcaacgccaacttgcgttaccgcgtgttggggggcgcgtgggacgtcttccagctcaacgagagctctggcgtggtgagcacacgggcggtgctggaccgggaggaggcggccgagtaccagctcctggtggaggccaacgaccaggggcgcaatccgggcccgctcagtgccacggccaccgtgtacatcgaggtggaggacgagaacgacaactacccccagttcagcgagcagaactacgtggtccaggtgcccgaggacgtggggctcaacacggctgtgctgcgagtgcaggccacggaccgggaccagggccagaacgcggccattcactacagcatcctcagcgggaacgtggccggccagttctacctgcactcgctgagcgggatcctggatgtgatcaaccccttggatttcgaggatgtccagaaatactcgctgagcattaaggcccaggatgggggccggcccccgctcatcaattcttcaggggtggtgtctgtgcaggtgctggatgtcaacgacaacgagcctatctttgtgagcagccccttccaggccacggtgctggagaatgtgcccctgggctaccccgtggtgcacattcaggcggtggacgcggactctggagagaacgcccggctgcactatcgcctggtggacacggcctccacctttctggggggcggcagcgctgggcctaagaatcctgcccccacccctgacttccccttccagatccacaacagctccggttggatcacagtgtgtgccgagctggaccgcgaggaggtggagcactacagcttcggggtggaggcggtggaccacggctcgccccccatgagctcctccaccagcgtgtccatcacggtgctggacgtgaatgacaacgacccggtgttcacgcagcccacctacgagcttcgtctgaatgaggatgcggccgtggggagcagcgtgctgaccctgcaggcccgcgaccgtgacgccaacagtgtgattacctaccagctcacaggcggcaacacccggaaccgctttgcactcagcagccagagagggggcggcctcatcaccctggcgctacctctggactacaagcaggagcagcagtacgtgctggcggtgacagcatccgacggcacacggtcgcacactgcgcatgtcctaatcaacgtcactgatgccaacacccacaggcctgtctttcagagctcccattacacagtgagtgtcagtgaggacaggcctgtgggcacctccattgctaccctcagtgccaacgatgaggacacaggagagaatgcccgcatcacctacgtgattcaggaccccgtgccgcagttccgcattgaccccgacagtggcaccatgtacaccatgatggagctggactatgagaaccaggtcgcctacacgctgaccatcatggcccaggacaacggcatcccgcagaaatcagacaccaccaccctagagatcctcatcctcgatgccaatgacaatgcaccccagttcctgtgggatttctaccagggttccatctttgaggatgctccaccctcgaccagcatcctccaggtctctgccacggaccgggactcaggtcccaatgggcgtctgctgtacaccttccagggtggggacgacggcgatggggacttctacatcgagcccacgtccggtgtgattcgcacccagcgccggctggaccgggagaatgtggccgtgtacaacctttgggctctggctgtggatcggggcagtcccactccccttagcgcctcggtagaaatccaggtgaccatcttggacattaatgacaatgcccccatgtttgagaaggacgaactggagctgtttgttgaggagaacaacccagtggggtcggtggtggcaaagattcgtgctaacgaccctgatgaaggccctaatgcccagatcatgtatcagattgtggaaggggacatgcggcatttcttccagctggacctgctcaacggggacctgcgtgccatggtggagctggactttgaggtccggcgggagtatgtgctggtggtgcaggccacgtcggctccgctggtgagccgagccacggtgcacatccttctcgtggaccagaatgacaacccgcctgtgctgcccgacttccagatcctcttcaacaactatgtcaccaacaagtccaacagtttccccaccggcgtgatcggctgcatcccggcccatgaccccgacgtgtcagacagcctcaactacaccttcgtgcagggcaacgagctgcgcctgttgctgctggaccccgccacgggcgaactgcagctcagccgcgacctggacaacaaccggccgctggaggcgctcatggaggtgtctgtgtctgatggcatccacagcgtcacggccttctgcaccctgcgtgtcaccatcatcacggacgacatgctgaccaacagcatcactgtccgcctggagaacatgtcccaggagaagttcctgtccccgctgctggccctcttcgtggagggggtggccgccgtgctgtccaccaccaaggacgacgtcttcgtcttcaacgtccagaacgacaccgacgtcagctccaacatcctgaacgtgaccttctcggcgctgctgcctggcggcgtccgcggccagttcttcccgtcggaggacctgcaggagcagatctacctgaatcggacgctgctgaccaccatctccacgcagcgcgtgctgcccttcgacgacaacatctgcctgcgcgagccctgcgagaactacatgaagtgcgtgtccgttctgcgattcgacagctccgcgcccttcctcagctccaccaccgtgctcttccggcccatccaccccatcaacggcctgcgctgccgctgcccgcccggcttcaccggcgactactgcgagacggagatcgacctctgctactccgacccgtgcggcgccaacggccgctgccgcagccgcgagggcggctacacctgcgagtgcttcgaggacttcactggagagcactgtgaggtggatgcccgctcaggccgctgtgccaacggggtgtgcaagaacgggggcacctgcgtgaacctgctcatcggcggcttccactgcgtgtgtcctcctggcgagtatgagaggccctactgtgaggtgaccaccaggagcttcccgccccagtccttcgtcaccttccggggcctgagacagcgcttccacttcaccatctccctcacgtttgccactcaggaaaggaacggcttgcttctctacaacggccgcttcaatgagaagcacgacttcatcgccctggagatcgtggacgagcaggtgcagctcaccttctctgcaggcgagacaacaacgaccgtggcaccgaaggttcccagtggtgtgagtgacgggcggtggcactctgtgcaggtgcagtactacaacaagcccaatattggccacctgggcctgccccatgggccgtccggggaaaagatggccgtggtgacagtggatgattgtgacacaaccatggctgtgcgctttggaaaggacatcgggaactacagctgcgctgcccagggcactcagaccggctccaagaagtccctggatctgaccggccctctactcctggggggtgtccccaacctgccagaagacttcccagtgcacaaccggcagttcgtgggctgcatgcggaacctgtcagtcgacggcaaaaatgtggacatggccggattcatcgccaacaatggcacccgggaaggctgcgctgctcggaggaacttctgcgatgggaggcggtgtcagaatggaggcacctgtgtcaacaggtggaatatgtatctgtgtgagtgtccactccgattcggcgggaagaactgtgagcaagccatgcctcacccccagctcttcagcggtgagagcgtcgtgtcctggagtgacctgaacatcatcatctctgtgccctggtacctggggctcatgttccggacccggaaggaggacagcgttctgatggaggccaccagtggtgggcccaccagctttcgcctccagatcctgaacaactacctccagtttgaggtgtcccacggcccctccgatgtggagtccgtgatgctgtccgggttgcgggtgaccgacggggagtggcaccacctgctgatcgagctgaagaatgttaaggaggacagtgagatgaagcacctggtcaccatgaccttggactatgggatggaccagaacaaggcagatatcgggggcatgcttcccgggctgacggtaaggagcgtggtggtcggaggcgcctctgaagacaaggtctccgtgcgccgtggattccgaggctgcatgcagggagtgaggatgggggggacgcccaccaacgtcgccaccctgaacatgaacaacgcactcaaggtcagggtgaaggacggctgtgatgtggacgacccctgtacctcgagcccctgtccccccaatagccgctgccacgacgcctgggaggactacagctgcgtctgtgacaaagggtaccttggaataaactgtgtggatgcctgtcacctgaacccctgcgagaacatgggggcctgcgtgcgctcccccggctccccgcagggctacgtgtgcgagtgtgggcccagtcactacgggccgtactgtgagaacaaactcgaccttccgtgccccagaggctggtgggggaaccccgtctgtggaccctgccactgtgccgtcagcaaaggctttgatcccgactgtaataagaccaacggccagtgccaatgcaaggagaattactacaagctcctagcccaggacacctgtctgccctgcgactgcttcccccatggctcccacagccgcacttgcgacatggccaccgggcagtgtgcctgcaagcccggcgtcatcggccgccagtgcaaccgctgcgacaacccgtttgccgaggtcaccacgctcggctgtgaagtgatctacaatggctgtcccaaagcatttgaggccggcatctggtggccacagaccaagttcgggcagccggctgcggtgccatgccctaagggatccgttggaaatgcggtccgacactgcagcggggagaagggctggctgcccccagagctctttaactgtaccaccatctccttcgtggacctcagggccatgaatgagaagctgagccgcaatgagacgcaggtggacggcgccagggccctgcagctggtgagggcgctgcgcagtgctacacagcacacgggcacgctctttggcaatgacgtgcgcacggcctaccagctgctgggccacgtccttcagcacgagagctggcagcagggcttcgacctggcagccacgcaggacgccgactttcacgaggacgtcatccactcgggcagcgccctcctggccccagccaccagggcggcgtgggagcagatccagcggagcgagggcggcacggcacagctgctccggcgcctcgagggctacttcagcaacgtggcacgcaacgtgcggcggacgtacctgcggcccttcgtcatcgtcaccgccaacatgattcttgctgtcgacatctttgacaagttcaactttacgggagccagggtcccgcgattcgacaccatccatgaagagttccccagggagctggagtcctccgtctccttcccagccgacttcttcagaccacctgaagaaaaagaaggccccctgctgaggccggctggccggaggaccaccccgcagaccacgcgcccggggcctggcaccgagagggaggccccgatcagcaggcggaggcgacaccctgatgacgctggccagttcgccgtcgctctggtcatcatttaccgcaccctggggcagctcctgcccgagcgctacgaccccgaccgtcgcagcctccggttgcctcaccggcccatcattaataccccgatggtgagcacgctggtgtacagcgagggggctccgctcccgagacccctggagaggcccgtcctggtggagttcgccctgctggaggtggaggagcgaaccaagcctgtctgcgtgttctggaaccactccctggccgttggtgggacgggagggtggtctgcccggggctgcgagctcctgtccaggaaccggacacatgtcgcctgccagtgcagccacacagccagctttgcggtgctcatggatatctccaggcgtgagaacggggaggtcctgcctctgaagattgtcacctatgccgctgtgtccttgtcactggcagccctgctggtggccttcgtcctcctgagcctggtccgcatgctgcgctccaacctgcacagcattcacaagcacctcgccgtggcgctcttcctctctcagctggtgttcgtgattgggatcaaccagacggaaaacccgtttctgtgcacagtggttgccatcctcctccactacatctacatgagcacctttgcctggaccctcgtggagagcctgcatgtctaccgcatgctgaccgaggtgcgcaacatcgacacggggcccatgcggttctactacgtcgtgggctggggcatcccggccattgtcacaggactggcggtcggcctggacccccagggctacgggaaccccgacttctgctggctgtcgcttcaagacaccctgatttggagctttgcggggcccatcggagctgttataatcatcaacacagtcacttctgtcctatctgcaaaggtttcctgccaaagaaagcaccattattatgggaaaaaagggatcgtctccctgctgaggaccgcattcctcctgctgctgctcatcagcgccacctggctgctggggctgctggctgtgaaccgcgatgcactgagctttcactacctcttcgccatcttcagcggcttacagggccccttcgtcctccttttccactgcgtgctcaaccaggaggtccggaagcacctgaagggcgtgctcggcgggaggaagctgcacctggaggactccgccaccaccagggccaccctgctgacgcgctccctcaactgcaacaccaccttcggtgacgggcctgacatgctgcgcacagacttgggcgagtccaccgcctcgctggacagcatcgtcagggatgaagggatccagaagctcggcgtgtcctctgggctggtgaggggcagccacggagagccagacgcgtccctcatgcccaggagctgcaaggatccccctggccacgattccgactcagatagcgagctgtccctggatgagcagagcagctcttacgcctcctcacactcgtcagacagcgaggacgatggggtgggagctgaggaaaaatgggacccggccaggggcgccgtccacagcacccccaaaggggacgctgtggccaaccacgttccggccggctggcccgaccagagcctggctgagagtgacagtgaggaccccagcggcaagccccgcctgaaggtggagaccaaggtcagcgtggagctgcaccgcgaggagcagggcagtcaccgtggagagtaccccccggaccaggagagcgggggcgcagccaggcttgctagcagccagcccccagagcagaggaaaggcatcttgaaaaataaagtcacctacccgccgccgctgacgctgacggagcagacgctgaagggccggctccgggagaagctggccgactgtgagcagagccccacatcctcgcgcacgtcttccctgggctctggcggccccgactgcgccatcacagtcaagagccctgggagggagccggggcgtgaccacctcaacggggtggccatgaatgtgcgcactgggagcgcccaggccgatggctccgactctgagaaaccgtgaggcaagcccgtcaccccacacaggctgcggcatcaccctcagaccttggagcccaaggggccactgcccttgaagtggagtgggcccagagtgtggcggtccccatggtggcagccccccgactgatcatccagacacaaaggtcttggttctcccaggagctcagggcctgtcagacctggtgacaagtgccaaaggccacaggcatgagggaggcgtggaccactgggccagcaccgctgagtcctaagactgcagtcaaagccagaactgagaggggaccccagactgggcccagaggctggccagagttcaggaacgccgggcacagaccaaagaccgcggtccagccccgcccaggcgggcatctcatggcagtgcggacccgtggctggcagcccgggcagtcctttgcaaaggcaccccttgtcttaaaatcacttcgctatgtgggaaaggtggagatacttttatatatttgtatgggactctgaggaggtgcaacctgtatatatattgcattcgtgctgactttgttatcccgagagatccatgcaatgatctcttgctgtcttctctgtcaagattgcacagttgtacttgaatctggcatgtgttgacgaaactggtgccccagcagatcaaaggtgggaaatacgtcagcagtggggctaaaaccaagcggctagaagccctacagctgccttcggccaggaagtgaggatggtgtgggccctccccgccggccccctgggtccccagtgttcgctgtgtgtgcgtttgtcctctgctgccatctgccccggctgtgtgaattcaagacagggcagtgcagcactaggcaggtgtgaggagccctgctgaggtcactgtggggcacggttgccacacggctgtcatttttcacctggtcattctgtgaccaccaccccctcccctcaccgcctcccaggtggcccgggagctgcaggtggggatggctttgtcctttgctcctgctccccgtgggacctgggaccttaaagcgttgcaggttcctgatttggacagaggtgtggggccttccaggccgttacatacctcctgccaattctctaactctctgagactgcgaggatctccaggcagggttctcccctctggagtctgaccaattacttcattttgcttcaaatggccaattgtgcagagggacaaagccacagccacactcttcaacggttaccaaactgtttttggaaattcacaccaaggtcgggcccactgcaggcagctggcacagcgtggcccgaggggctgtggaacgggtcccggaactgtcagacatgtttgattttagcgtttcctttgttcttcaaatcaggtgcccaaataagtgatcagcacagctgcttccaaataggagaaaccataaaataggatgaaaatcaagtaaaatgcaaagatgtccacactgttttaaacttgaccctgatgaaaatgtgagcactgttagcagatgcctatgggagaggaaaagcgtatctgaaaatggtccaggacaggaggatgaaatgagatcccagagtcctcacacctgaatgaattatacatgtgccttaccaggtgagtggtctttcgaagataaaaaactctagtccctttaaacgtttgcccctggcgtttcctaagtacgaaaaggtttttaagtcttcgaacagtctcctttcatgactttaacaggattctgccccctgaggtgtaatttttttgttctatttttttccacgtactccacagccaacatcacgaggtgtaatttttaatttgatcagaactgttaccaaaaaacaactgtcagttttattgagatgggaaaaatgtaaacctatttttattacttaagactttatgggagagattagacactggaggtttttaacagaacgtgtatttattaatgttcaaaacactggaattacaaatgagaagagtctacaataaattaagatttttgaatttgtacttctgcggtgctggtttttctccacaaacacccccgcccctccccatgcccagggtggccgtggaagggacggtttacggacgtgcagctgagctgtccgtgtcccatgctccctcagccagtggaacgtgccggaactttttgtccattccctagtaggcctgccacagcctagatgggcagtttttgtctttcaccaaatttgaggactttttttttttgccattatttcttcagttttcttttcttgcactgatctttctcctctccttctgtgactccagtgactcagacgttagacctcttgatgttttcccactggtccctgaggctctgttc

SEQ ID NO: 4032 - DNA, 4194 bp, Homo sapiens
  source 1..4194: mol_type = unassigned DNA
atggcgccgccgccgccgcccgtgctgcccgtgctgctgctcctggccgccgccgccgccctgccggcgatggggctgcgagcggccgcctgggagccgcgcgtacccggcgggacccgcgccttcgccctccggcccggctgtacctacgcggtgggcgccgcttgcacgccccgggcgccgcgggagctgctggacgtgggccgcgatgggcggctggcaggacgtcggcgcgtctcgggcgcggggcgcccgctgccgctgcaagtccgcttggtggcccgcagtgccccgacggcgctgagccgccgcctgcgggcgcgcacgcaccttcccggctgcggagcccgtgcccggctctgcggaaccggtgcccggctctgcggggcgctctgcttccccgtccccggcggctgcgcggccgcgcagcattcggcgctcgcagctccgaccaccttacccgcctgccgctgcccgccgcgccccaggccccgctgtcccggccgtcccatctgcctgccgccgggcggctcggtccgcctgcgtctgctgtgcgccctgcggcgcgcggctggcgccgtccgggtgggactggcgctggaggccgccaccgcggggacgccctccgcgtcgccatccccatcgccgcccctgccgccgaacttgcccgaagcccgggcggggccggcgcgacgggcccggcggggcacgagcggcagagggagcctgaagtttccgatgcccaactaccaggtggcgttgtttgagaacgaaccggcgggcaccctcatcctccagctgcacgcgcactacaccatcgagggcgaggaggagcgcgtgagctattacatggaggggctgttcgacgagcgctcccggggctacttccgaatcgactctgccacgggcgccgtgagcacggacagcgtactggaccgcgagaccaaggagacgcacgtcctcagggtgaaagccgtggactacagtacgccgccgcgctcggccaccacctacatcactgtcttggtcaaagacaccaacgaccacagcccggtcttcgagcagtcggagtaccgcgagcgcgtgcgggagaacctggaggtgggctacgaggtgctgaccatccgcgccagcgaccgcgactcgcccatcaacgccaacttgcgttaccgcgtgttggggggcgcgtgggacgtcttccagctcaacgagagctctggcgtggtgagcacacgggcggtgctggaccgggaggaggcggccgagtaccagctcctggtggaggccaacgaccaggggcgcaatccgggcccgctcagtgccacggccaccgtgtacatcgaggtggaggacgagaacgacaactacccccagttcagcgagcagaactacgtggtccaggtgcccgaggacgtggggctcaacacggctgtgctgcgagtgcaggccacggaccgggaccagggccagaacgcggccattcactacagcatcctcagcgggaacgtggccggccagttctacctgcactcgctgagcgggatcctggatgtgatcaaccccttggatttcgaggatgtccagaaatactcgctgagcattaaggcccaggatgggggccggcccccgctcatcaattcttcaggggtggtgtctgtgcaggtgctggatgtcaacgacaacgagcctatctttgtgagcagccccttccaggccacggtgctggagaatgtgcccctgggctaccccgtggtgcacattcaggcggtggacgcggactctggagagaacgcccggctgcactatcgcctggtggacacggcctccacctttctggggggcggcagcgctgggcctaagaatcctgcccccacccctgacttccccttccagatccacaacagctccggttggatcacagtgtgtgccgagctggaccgcgaggaggtggagcactacagcttcggggtggaggcggtggaccacggctcgccccccatgagctcctccaccagcgtgtccatcacggtgctggacgtgaatgacaacgacccggtgttcacgcagcccacctacgagcttcgtctgaatgaggatgcggccgtggggagcagcgtgctgaccctgcaggcccgcgaccgtgacgccaacagtgtgattacctaccagctcacaggcggcaacacccggaaccgctttgcactcagcagccagagagggggcggcctcatcaccctggcgctacctctggactacaagcaggagcagcagtacgtgctggcggtgacagcatccgacggcacacggtcgcacactgcgcatgtcctaatcaacgtcactgatgccaacacccacaggcctgtctttcagagctcccattacacagtgagtgtcagtgaggacaggcctgtgggcacctccattgctaccctcagtgccaacgatgaggacacaggagagaatgcccgcatcacctacgtgattcaggaccccgtgccgcagttccgcattgaccccgacagtggcaccatgtacaccatgatggagctggactatgagaaccaggtcgcctacacgctgaccatcatggcccaggacaacggcatcccgcagaaatcagacaccaccaccctagagatcctcatcctcgatgccaatgacaatgcaccccagttcctgtgggatttctaccagggttccatctttgaggatgctccaccctcgaccagcatcctccaggtctctgccacggaccgggactcaggtcccaatgggcgtctgctgtacaccttccagggtggggacgacggcgatggggacttctacatcgagcccacgtccggtgtgattcgcacccagcgccggctggaccgggagaatgtggccgtgtacaacctttgggctctggctgtggatcggggcagtcccactccccttagcgcctcggtagaaatccaggtgaccatcttggacattaatgacaatgcccccatgtttgagaaggacgaactggagctgtttgttgaggagaacaacccagtggggtcggtggtggcaaagattcgtgctaacgaccctgatgaaggccctaatgcccagatcatgtatcagattgtggaaggggacatgcggcatttcttccagctggacctgctcaacggggacctgcgtgccatggtggagctggactttgaggtccggcgggagtatgtgctggtggtgcaggccacgtcggctccgctggtgagccgagccacggtgcacatccttctcgtggaccagaatgacaacccgcctgtgctgcccgacttccagatcctcttcaacaactatgtcaccaacaagtccaacagtttccccaccggcgtgatcggctgcatcccggcccatgaccccgacgtgtcagacagcctcaactacaccttcgtgcagggcaacgagctgcgcctgttgctgctggaccccgccacgggcgaactgcagctcagccgcgacctggacaacaaccggccgctggaggcgctcatggaggtgtctgtgtctgatggcatccacagcgtcacggccttctgcaccctgcgtgtcaccatcatcacggacgacatgctgaccaacagcatcactgtccgcctggagaacatgtcccaggagaagttcctgtccccgctgctggccctcttcgtggagggggtggccgccgtgctgtccaccaccaaggacgacgtcttcgtcttcaacgtccagaacgacaccgacgtcagctccaacatcctgaacgtgaccttctcggcgctgctgcctggcggcgtccgcggccagttcttcccgtcggaggacctgcaggagcagatctacctgaatcggacgctgctgaccaccatctccacgcagcgcgtgctgcccttcgacgacaacatctgcctgcgcgagccctgcgagaactacatgaagtgcgtgtccgttctgcgattcgacagctccgcgcccttcctcagctccaccaccgtgctcttccggcccatccaccccatcaacggcctgcgctgccgctgcccgcccggcttcaccggcgactactgcgagacggagatcgacctctgctactccgacccgtgcggcgccaacggccgctgccgcagccgcgagggcggctacacctgcgagtgcttcgaggacttcactgctgtttcttag

SEQ ID NO: 4033 - DNA, 2446 bp, Homo sapiens
  source 1..2446: mol_type = unassigned DNA
ctgacttccccttccagatccacaacagctccggttggatcacagtgtgtgccgagctggaccgcgaggaggtggagcactacagcttcggggtggaggcggtggaccacggctcgccccccatgagctcctccaccagcgtgtccatcacggtgctggacgtgaatgacaacgacccggtgttcacgcagcccacctacgagcttcgtctgaatgaggatgcggccgtggggagcagcgtgctgaccctgcaggcccgcgaccgtgacgccaacagtgtgattacctaccagctcacaggcggcaacacccggaaccgctttgcactcagcagccagagagggggcggcctcatcaccctggcgctacctctggactacaagcaggagcagcagtacgtgctggcggtgacagcatccgacggcacacggtcgcacactgcgcatgtcctaatcaacgtcactgatgccaacacccacaggcctgtctttcagagctcccattacacagtgagtgtcagtgaggacaggcctgtgggcacctccattgctaccctcagtgccaacgatgaggacacaggagagaatgcccgcatcacctacgtgattcaggaccccgtgccgcagttccgcattgaccccgacagtggcaccatgtacaccatgatggagctggactatgagaaccaggtcgcctacacgctgaccatcatggcccaggacaacggcatcccgcagaaatcagacaccaccaccctagagatcctcatcctcgatgccaatgacaatgcaccccagttcctgtgggatttctaccagggttccatctttgaggatgctccaccctcgaccagcatcctccaggtctctgccacggaccgggactcaggtcccaatgggcgtctgctgtacaccttccagggtggggacgacggcgatggggacttctacatcgagcccacgtccggtgtgattcgcacccagcgccggctggaccgggagaatgtggccgtgtacaacctttgggctctggctgtggatcggggcagtcccactccccttagcgcctcggtagaaatccaggtgaccatcttggacattaatgacaatgcccccatgtttgagaaggacgaactggagctgtttgttgaggagaacaacccagtggggtcggtggtggcaaagattcgtgctaacgaccctgatgaaggccctaatgcccagatcatgtatcagattgtggaaggggacatgcggcatttcttccagctggacctgctcaacggggacctgcgtgccatggtggagctggactttgaggtccggcgggagtatgtgctggtggtgcaggccacgtcggctccgctggtgagccgagccacggtgcacatccttctcgtggaccagaatgacaacccgcctgtgctgcccgacttccagatcctcttcaacaactatgtcaccaacaagtccaacagtttccccaccggcgtgatcggctgcatcccggcccatgaccccgacgtgtcagacagcctcaactacaccttcgtgcagggcaacgagctgcgcctgttgctgctggaccccgccacgggcgaactgcagctcagccgcgacctggacaacaaccggccgctggaggcgctcatggaggtgtctgtgtctgatggcatccacagcgtcacggccttctgcaccctgcgtgtcaccatcatcacggacgacatgctgaccaacagcatcactgtccgcctggagaacatgtcccaggagaagttcctgtccccgctgctggccctcttcgtggagggggtggccgccgtgctgtccaccaccaaggacgacgtcttcgtcttcaacgtccagaacgacaccgacgtcagctccaacatcctgaacgtgaccttctcggcgctgctgcctggcggcgtccgcggccagttcttcccgtcggaggacctgcaggagcagatctacctgaatcggacgctgctgaccaccatctccacgcagcgcgtgctgcccttcgacgacaacatctgcctgcgcgagccctgcgagaactacatgaagtgcgtgtccgttctgcgattcgacagctccgcgcccttcctcagctccaccaccgtgctcttccggcccatccaccccatcaacggcctgcgctgccgctgcccgcccggcttcaccggcgactactgcgagacggagatcgacctctgctactccgacccgtgcggcgccaacggccgctgccgcagccgcgagggcggctacacctgcgagtgcttcgaggacttcactgaaatttcgtgactcatcctcccgcctctgaagatgctctttccttgatacctcctgactcatcaccaagatgaattactccaaatgtagccaacggtggtttttaaaaataaagagccaccccgagagcggtacagaaa

SEQ ID NO: 4034 - DNA, 10534 bp, Homo sapiens
  source 1..10534: mol_type = unassigned DNA
aggagccggaggaggagccgccgccgccgttgacccggccgccggccgggagctgggagagatgcggagcccggccaccggcgtccccctcccaacgccgccgccgccgctgctgctgctgttgctgctgctgctgccgccgccactattgggagaccaagtggggccctgtcgttccttggggtccaggggacgaggctcttcgggggcctgcgcccccatgggctggctctgtccatcctcagcgtcgaacctctggctctacaccagccgctgcagggatgcgggcactgagctgactggccacctggtaccccaccacgatggcctgagggtttggtgtccagaatccgaggcccatattcccctaccaccagctcctgaaggctgcccctggagctgtcgcctcctgggcattggaggccacctttccccacagggcaagctcacactgcccgaggagcacccgtgcttaaaggctccacggctcagatgccagtcctgcaagctggcacaggcccccgggctcagggcaggggaaaggtcaccagaagagtccctgggtgggcgtcggaaaaggaatgtaaatacagccccccagttccagccccccagctaccaggccacagtgccggagaaccagccagcaggcacccctgttgcatccctgagggccatcgacccggacgagggtgaggcaggtcgactggagtacaccatggatgccctctttgatagccgctccaaccagttcttctccctggacccagtcactggtgcagtaaccacagccgaggagctggatcgtgagaccaagagcacccacgtcttcagggtcacggcgcaggaccacggcatgccccgacgaagtgccctggctacactcaccatcttggttactgacaccaatgaccatgaccctgtgttcgagcagcaggagtacaaggagagcctcagggagaacctggaggttggctatgaggtgctcactgtcagggccacggatggtgatgcccctcccaatgccaatattctgtaccgcctgctggaggggtctgggggcagcccctctgaagtctttgagatcgaccctcgctctggggtgatccgaacccgtggccctgtggatcgggaagaggtggaatcctaccagctgacggtagaggcaagtgaccagggtcgggacccgggtcctcggagtaccacagccgctgttttcctttctgtggaggatgacaatgataatgccccccagtttagtgagaagcgctatgtggtccaggtgagggaggatgtgactccaggggccccagtactccgagtcacagcctcggatcgagacaaggggagcaatgccgtggtgcactatagcatcatgagtggcaatgctcggggacagttttatctggatgcccagactggagctctggatgtggtgagccctcttgactatgagacgaccaaggagtacaccctacgggtgcgagcacaggatggtggccgtcccccactctctaatgtctctggcttggtgacagtacaggtcctggatatcaacgacaatgcccccatcttcgtcagcacccctttccaggctactgtcctggagagtgtccccttaggctacctggttctccatgtccaggctatcgacgctgatgctggtgacaatgcccgcctggaataccgccttgctggggtgggacatgacttccccttcaccatcaacaatggcacaggctggatctctgtggctgctgaactggaccgggaggaagttgatttctacagctttggggtagaagctcgagaccatggcactccagcactcactgcctcggccagtgtcagcgtgactgtcctggatgtcaacgacaacaatccaacctttacccaaccagagtacacagtgcggctcaatgaggatgcagctgtgggcaccagcgtggtgacggtgtcagctgtggaccgtgatgctcatagtgtcatcacctaccagatcaccagtggcaatactcgaaaccgcttctccatcaccagccaaagtggtggtgggctggtatcccttgccctgccactggactacaaacttgagcggcagtatgtgttggctgttaccgcctccgatggcactcggcaggacacggcacagattgtggtgaatgtcaccgacgccaacacccatcgtcctgtctttcagagctcccactatacagtgaatgttaatgaggaccggccggcaggcaccacggtggtgctgatcagcgccacggatgaggacacaggtgagaatgcccgcatcacctacttcatggaggacagcatcccccagttccgcatcgatgcagacacgggggctgtcaccacccaggctgagctggactatgaagaccaagtgtcttacaccctggccattactgctcgggacaatggcattccccagaagtccgacaccacctacctggagatcctggtgaacgacgtgaatgacaatgcccctcagttcctgcgagactcctaccagggcagtgtctatgaggatgtgccacccttcactagcgtcctgcagatctcagccactgatcgtgattctggacttaatggcagggtcttctacaccttccaaggaggcgacgatggagacggtgactttattgttgagtccacgtcaggcatcgtgcgaacgctacggaggctggatcgagagaacgtggcccagtatgtcttgcgggcatatgcagtggacaaggggatgcccccagcccgcacacctatggaagtgacagtcactgtgttggatgtgaatgacaatccccctgtctttgagcaggatgagtttgatgtgtttgtggaagagaacagccccattgggctagccgtggcccgggtcacagccactgaccccgatgaaggcaccaatgcccagattatgtaccagattgtggagggcaacatccctgaggtctttcagctggacatcttctccggggagctgacagccctggtagacttagactacgaggaccggcctgagtacgtcctggtcatccaggccacgtcagctcctctggtgagccgggctacagtccacgtccgcctccttgaccgcaatgacaacccaccagtgctgggcaactttgagatccttttcaacaactatgtcaccaatcgctcaagcagcttccctgggggtgccattggccgagtacctgcccatgaccctgatatctcagatagtctgacttacagctttgagcggggaaatgaactcagcctggtcctgctcaatgcctccacgggtgagctgaagctaagccgcgcactggacaacaaccggcctctggaggccatcatgagcgtgctggtgtcagacggcgtacacagcgtgaccgcccagtgcgcgctgcgtgtgaccatcatcaccgatgagatgctcacccacagcatcacgctgcgcctggaggacatgtcacccgagcgcttcctgtcaccactgctaggcctcttcatccaggcggtggccgccacgctggccacgccaccggaccacgtggtggtcttcaacgtacagcgggacaccgacgcccccgggggccacatcctcaacgtgagcctgtcggtgggccagccgccagggcccgggggcgggccgcccttcctgccctctgaggacctgcaggagcgcctatacctcaaccgcagcctgctgacggccatctcggcacagcgcgtgctgcccttcgacgacaacatctgcctgcgggagccctgcgagaactacatgcgctgcgtgtcggtgctgcgcttcgactcctccgcgcccttcatcgcctcctcctccgtgctcttccggcccatccaccccgtcggagggctgcgctgccgctgcccgcccggcttcacgggtgactactgcgagaccgaggtggacctctgctactcgcggccctgtggcccccacgggcgctgccgcagccgcgagggcggctacacctgcctctgtcgtgatggctacacgggtgagcactgtgaggtgagtgctcgctcaggccgttgcaccccgggtgtctgcaagaatgggggcacctgtgtcaacctgctggtgggcggtttcaagtgcgattgcccatctggagacttcgagaagccctactgccaggtgaccacgcgcagcttccccgcccactccttcatcacctttcgcggcctgcgccagcgtttccacttcaccctggccctctcgtttgccacaaaggagcgcgacgggttgctgttgtacaatgggcgtttcaatgagaagcatgactttgtggccctcgaggtgatccaggagcaggtccagctcaccttctctgcaggggagtcaaccaccacggtgtccccattcgtgcccggaggagtcagtgatggccagtggcatacggtgcagctgaaatactacaataagccactgttgggtcagacagggctcccacagggcccatcagagcagaaggtggctgtggtgaccgtggatggctgtgacacaggagtggccttgcgcttcggatctgtcctgggcaactactcctgtgctgcccagggcacccagggtggcagcaagaagtctctggatctgacggggcccctgctactaggcggggtgcctgacctgcccgagagcttcccagtccgaatgcggcagttcgtgggctgcatgcggaacctgcaggtggacagccggcacatagacatggctgacttcattgccaacaatggcaccgtgcctggctgccctgccaagaagaacgtgtgtgacagcaacacttgccacaatgggggcacttgcgtgaaccagtgggacgcgttcagctgcgagtgccccctgggctttgggggcaagagctgcgcccaggaaatggccaatccacagcacttcctgggcagcagcctggtggcctggcatggcctctcgctgcccatctcccaaccctggtacctcagcctcatgttccgcacgcgccaggccgacggtgtcctgctgcaggccatcaccagggggcgcagcaccatcaccctacagctacgagagggccacgtgatgctgagcgtggagggcacagggcttcaggcctcctctctccgtctggagccaggccgggccaatgacggtgactggcaccatgcacagctggcactgggagccagcggggggcccggccatgccattctgtccttcgattatgggcagcagagagcagagggcaacctgggcccccggctgcatggtctgcacctgagcaacataacagtgggcggaatacctgggccagccggcggtgtggcccgtggctttcggggctgtttgcagggtgtgcgggtgagcgatacgccggagggggttaacagcctggatcccagccatggggagagcatcaacgtggagcaaggctgtagcctgcctgacccttgtgactcaaacccgtgtcctgctaacagctattgcagcaacgactgggacagctattcctgcagctgtgatccaggttactatggtgacaactgtactaatgtgtgtgacctgaacccgtgtgagcaccagtctgtgtgtacccgcaagcccagtgccccccatggctatacctgcgagtgtcccccaaattaccttgggccatactgtgagaccaggattgaccagccttgtccccgtggctggtggggacatcccacatgtggcccatgcaactgtgatgtcagcaaaggctttgacccagactgcaacaagacaagcggcgagtgccactgcaaggagaaccactaccggcccccaggcagccccacctgcctcttgtgtgactgctaccccacaggctccttgtccagagtctgtgaccctgaggatggccagtgtccatgcaagccaggtgtcatcgggcgtcagtgtgaccgctgtgacaacccttttgctgaggtcaccaccaatggctgtgaagtgaattatgacagctgcccacgagcgattgaggctgggatctggtggccccgtacccgcttcgggctgcctgctgctgctccctgtcccaaaggctcctttgggactgctgtgcgccactgtgatgagcacagggggtggctccccccaaacctcttcaactgcacgtccatcaccttctcagaactgaagggcttcgctgagcggctacagcggaatgagtcaggcctagactcagggcgctcccagcagctagccctgctcctgcgcaacgccacgcagcacacagctggctacttcggcagcgacgtcaaggtggcctaccagctggccacgcggctgctggcccacgagagcacccagcggggctttgggctgtctgccacacaggacgtgcacttcactgagaatctgctgcgggtgggcagcgccctcctggacacagccaacaagcggcactgggagctgatccagcagacagagggtggcaccgcctggctgctccagcactatgaggcctacgccagtgccctggcccagaacatgcggcacacctacctaagccccttcaccatcgtcacgcccaacattgtcatctccgtagtgcgcttggacaaagggaactttgctggggccaagctgccccgctacgaggccctgcgtggggagcagcccccggaccttgagacaacagtcattctgcctgagtctgtcttcagagagacgccccccgtggtcaggcccgcaggccccggagaggcccaggagccagaggagctggcacggcgacagcgacggcacccggagctgagccagggtgaggctgtggccagcgtcatcatctaccgcaccctggccgggctactgcctcataactatgaccctgacaagcgcagcttgagagtccccaaacgcccgatcatcaacacacccgtggtgagcatcagcgtccatgatgatgaggagcttctgccccgggccctggacaaacccgtcacggtgcagttccgcctgctggagacagaggagcggaccaagcccatctgtgtcttctggaaccattcaatcctggtcagtggcacaggtggctggtcggccagaggctgtgaagtcgtcttccgcaatgagagccacgtcagctgccagtgcaaccacatgacgagcttcgctgtgctcatggacgtttctcggcgggagaatggggagatcctgccactgaagacactgacatacgtggctctaggtgtcaccttggctgcccttctgctcaccttcttcttcctcactctcttgcgtatcctgcgctccaaccaacacggcatccgacgtaacctgacagctgccctgggcctggctcagctggtcttcctcctgggaatcaaccaggctgacctcccttttgcctgcacagtcattgccatcctgctgcacttcctgtacctctgcaccttttcctgggctctgctggaggccttgcacctgtaccgggcactcactgaggtgcgcgatgtcaacaccggccccatgcgcttctactacatgctgggctggggcgtgcctgccttcatcacagggctagccgtgggcctggaccccgagggctacgggaaccctgacttctgctggctctccatctatgacacgctcatctggagttttgctggcccggtggcctttgccgtctcgatgagtgtcttcctgtacatcctggcggcccgggcctcctgtgctgcccagcggcagggctttgagaagaaaggtcctgtctcgggcctgcagccctccttcgccgtcctcctgctgctgagcgccacgtggctgctggcactgctctctgtcaacagcgacaccctcctcttccactacctctttgctacctgcaattgcatccagggccccttcatcttcctctcctatgtggtgcttagcaaggaggtccggaaagcactcaagcttgcctgcagccgcaagcccagccctgaccctgctctgaccaccaagtccaccctgacctcgtcctacaactgccccagcccctacgcagatgggcggctgtaccagccctacggagactcggccggctctctgcacagcaccagtcgctcgggcaagagtcagcccagctacatccccttcttgctgagggaggagtccgcactgaaccctggccaagggccccctggcctgggggatccaggcagcctgttcctggaaggtcaagaccagcagcatgatcctgacacggactccgacagtgacctgtccttagaagacgaccagagtggctcctatgcctctacccactcatcagacagtgaggaggaagaagaggaggaggaagaggaggccgccttccctggagagcagggctgggatagcctgctggggcctggagcagagagactgcccctgcacagtactcccaaggatgggggcccagggcctggcaaggccccctggccaggagactttgggaccacagcaaaagagagtagtggcaacggggcccctgaggagcggctgcgggagaatggagatgccctgtctcgagaggggtccctaggcccccttccaggctcttctgcccagcctcacaaaggcatccttaagaagaagtgtctgcccaccatcagcgagaagagcagcctcctgcggctccccctggagcaatgcacagggtcttcccggggctcctccgctagtgagggcagccggggaggcccccctccccgcccaccgccccggcagagcctccaggagcagctgaacggggtcatgcccatcgccatgagcatcaaggcaggcacggtggatgaggactcgtcaggctccgaatttctcttctttaacttcctgcattaaccctgggccgtggttcctacgcccgaggctcccttcccttccccagccgcactcatgccctgctcctgtcttgtgctttatcctgccccgctccccatcgcctgcccgcagcagcgacgaaacgtccatctgaggagcctgggccttgccgggaggggtactcaccccacctaaggccatctagtgccaactccccccccaccattcccctcactgcactttggacccctggggccaacatctccaagacaaagtttttcagaaaagaggaaaaaaagaatttaaaaaaggatctccactcttcatgacttcagggattcattttttttatacgctggaaattgactcccctttcccttcccaaagaggataggacctcccaggatgcttcccagcctctcctcagtttcccatctgctgtgcctctgggaggagagggactcctggggggcctgcccctcatacgccatcaccaaaaggaaaggacaaagccacacgcagccagggcttcacacccttcaggctgcacccgggcaggcctcagaacggtgaggggccagggcaaagggtgtgcctcgtcctgcccgcactgcctctcccaggaactggaaaagccctgtccggtgagggggcagaaggactcagcgcccctggacccccaaatgctgcatgaacacattttcaggggagcctgtgcccccaggcgggggtcgggcagccccagcccctctccttttcctggactctggccgtgcgcggcagcccaggtgtttgctcagttgctgacccaaaagtgcttcatttttcgtgcccgccccgcgccccgggcaggccagtcatgtgttaagttgcgcttctttgctgtgatgtgggtgggggaggaagagtaaacacagtgctggctcggctgccctgagggtgctcaatcaagcacaggtttcaagtctgggttctggtgtccactcacccaccccaccccccaaaatcagacaaatgctactttgtctaacctgctgtggcctctgagacatgttctatttttaaccccttcttggaattggctctcttcttcaaaggaccaggtcctgttcctctttctccccgactccaccccagctccctgtgaagagagagttaatatatttgttttatttatttgctttttgtgttgggatgggttcgtgtccagtcccgggggtctgatatggccatcacaggctgggtgttcccagcagccctggcttgggggcttgacgcccttccccttgccccaggccatcatctccccacctctcctcccctctcctcagttttgccgactgcttttcatctgagtcaccatttactccaagcatgtattccagacttgtcactgactttccttctggagcaggtggctagaaaaagaggctgtgggcaggaaagaaaggctcctgtttctcatttgtgaggccagcctctggcttttctgccgtggattctcccccgtcttctcccctcagcaattcctgcaaagggttaaaaatttaactggtttttactactgatgacttgatttaaaaaaaatacaaagatgctggatgctaacttggtactaaccatcagattgtacagtttggttgttgctgtaaatagggtagcgttttgttgttgttgttttttcatgccccatactactgaataaactagttctgtgcgggt

SEQ ID NO: 4035 - DNA, 11956 bp, Homo sapiens
  source 1..11956: mol_type = unassigned DNA
agcgaaccatcggggcggccgggagccatgttggagcggcgggaggcggcagcagcgtcggggatgctgtggtgggggcggaaaaagccagggccgcacgccggaggggctccggccgcggagtagatggtgcccagagggcggcgggggtgcggagagacaggcggaggggcgggggcccggggcggcggcaggggcccgggagggggcccgagcggcggggccagcccaaggcccggaccggggcggggggcggtggaggccgtgcagggaggcgggggatgatggcgaggcggccgccgtggcggggcctcgggggacggtcgacccccatactcctgctccttctcctctctttgttccccctcagccaggaggagctggggggcggtgggcaccagggctgggacccaggcttagctgccactacggggccaagggcgcatatcggtggcggagccttagctctttgtccggagtcttccggggtccgggaggatggggggcctggcctgggggtcagggagcctatcttcgtggggctccgagggagaaggcaaagcgcccggaatagtcgagggccccctgagcagccgaatgaggagctggggattgaacacggcgtccagccattgggcagccgcgaacgagagacaggacagggaccagggtctgtgttatactggcgcccagaggtctcctcttgcgggcggacaggacctttgcaaagaggtagtctgtcaccaggggctctgtcctcaggggtcccgggctcggggaacagctcgcccctcccttcagactttttgattcggcaccacggtcccaagccggtgtcctcccagcggaacgctgggacaggctcccgcaaaagagtgggcaccgcgcgctgctgtggggaattatgggcaacagggagcaagggtcagggcgagagagccacgacatccggagcagaaaggacagccccccggcggaactgtcttccaggggcctcgggatctggccccgagctggattcagcaccacgcacggcgaggacagctcctgcatcaggttcagcaccccgcgagtctcggacagctcccgagccggcgcccaagcgcatgcgctcccggggtctcttccgctgccgcttcctcccgcagcgccccgggccgcgtcccccgggactcccggcccgtcctgaagccaggaaagtaacctcggcgaaccgggcacgctttcgtcgcgccgcaaaccgccacccgcagtttccgcagtacaactaccagacgctggtgccggagaatgaggcagcaggcaccgcggtgctacgcgtggttgctcaggacccggacgccggcgaggccgggcgcctagtctactcgctggcggcactcatgaacagccgctcgctggagctgttcagcatcgacccgcagagcggccttatccgtacggcggcagctctggaccgcgagagcatggagcgtcactacctgcgtgtgaccgcgcaggaccacgggtcgccgcgcctctcggccaccacgatggtggccgtgacagtagccgaccgcaacgaccactcgccggtttttgagcaagcgcagtaccgggagacccttcgcgagaatgtggaggagggctaccctatcctgcagctgcgtgccactgacggcgacgcgccccccaacgccaacctgcgctaccgcttcgtggggccgccagctgcgcgcgctgcagctgccgccgccttcgagattgatccacgctccggcctcatcagcaccagcggccgagtggaccgcgagcacatggaaagctatgagctggtggtggaagccagcgaccagggccaggaacccgggccgcgctcggccactgtgcgcgtacacataactgtgctagacgagaacgacaatgctcctcagttcagcgagaagcgctacgtggcgcaggtgcgcgaggatgtgcgcccccacacagtcgtgctgcgcgtcacggccactgaccgggacaaggacgccaacggattggtgcactacaacatcatcagtggcaatagccgtggacactttgccatcgacagcctcactggcgagatccaggtggtggcacctctggacttcgaggcagagagagagtatgccttgcgcatcagggcgcaggatgctggccggccaccgctgtccaacaacacgggcctggccagcatccaggtggtggacatcaatgaccacattcctatttttgtcagcacgcccttccaagtttctgtcttggaaaatgctcccttgggtcactcagtcatccacattcaggcagtcgatgcagaccatggggagaatgccagattggagtactccctaactggtgtggcacctgatactccttttgtgataaacagcgccactggctgggtctctgtgagtggtcccctggaccgtgagtctgtggagcattacttctttggtgtggaggctcgagaccatggctcacccccactctctgcctcagccagtgtcaccgtgactgtgctggacgttaatgacaatcggcctgagttcacaatgaaggagtaccacctacgactgaatgaggatgcagctgtgggcaccagtgtggtcagcgtgaccgcagtagaccgtgatgccaacagtgccatcagctaccagatcacaggcggcaacacccggaatcgctttgccatcagcacccaggggggtgtgggtctggtgactctggctctgccactggactacaagcaggaacgctacttcaagctggtactaactgcatctgaccgtgcccttcatgatcactgctatgtgcacatcaacatcacagatgccaacactcatcggccggtctttcaaagtgcccactactcagtgagtgtgaatgaagatcggccaatgggtagcaccatagtggtcatcagtgcctctgatgatgacgtgggtgagaatgctcgtatcacctatctcctggaggacaacctgccccagttccgcattgatgcagactcaggagccattacattacaggccccattagactatgaggaccaggtgacctacaccctggctatcacagctcgggacaatggcatcccacagaaggcagacactacttatgtggaggtgatggtcaatgacgtgaatgacaatgctccacaatttgtggcctcccactatacagggctggtctctgaggatgccccacctttcaccagtgtcctgcagatctcagccactgaccgggatgctcatgccaatggccgggtccagtacactttccagaatggtgaagatggggatggagattttaccattgagcccacctctggaattgtccgtacagtaaggcggctagaccgggaggcagtatcagtgtatgagttgactgcctacgcagtggacagaggtgtgcccccactccggactccagtcagtatccaggtgatggtgcaggatgtgaacgacaatgcacctgtcttcccagctgaggagtttgaggtgcgggtgaaagagaatagcattgtgggctcagtggtggcccagatcactgcagtggaccctgacgaaggccccaatgcccatataatgtaccagatcgtggaggggaacatccctgagctgttccaaatggacatcttctctggagaactgacggcactcattgacctagactatgaggctcgccaagaatatgtgattgtggtgcaggccacatctgctcctttggtcagccgggccactgtgcacgtccgcctggttgaccagaatgacaacagccctgtgctcaacaacttccagatcctcttcaacaactatgtatccaaccgttcagacaccttcccgtcgggcattattgggcgcatcccagcttatgaccccgatgtctccgaccacctcttctactcctttgagcgtggcaatgagctgcagctgctggtagtcaaccagaccagtggggagctgcgactcagccgaaagctagacaataaccgcccactggtggcctccatgttggtgactgtcacagatggcctgcacagcgtgacggcgcagtgtgtgctgcgcgtggtcatcatcacggaggagttgctggccaacagcctgaccgtgcgccttgagaacatgtggcaggagcgcttcctgtcaccgctgctgggccgcttcctcgagggcgtggctgcggtgctcgctacgcccgctgaggacgtcttcatcttcaacatccagaacgacacagacgtagggggcaccgtgctcaatgtgagtttctcggcgctagctccacgtggggccggggcgggcgctgcagggccctggttcagctccgaggagctgcaggagcagttgtacgtgcgccgggcggcgctggcggctcgctccctgctcgacgtactgcccttcgacgacaacgtgtgcctgcgagagccctgtgagaactacatgaaatgcgtgtccgtgctccgctttgactcgtccgcgcccttcctggcctcggcctccacgctgttccgacccatccagcccatcgctggcctgcgctgccgctgcccgcccggattcacgggagacttttgcgagaccgagctcgacctctgctactccaacccatgtcgcaacggcggagcctgcgcgcggcgcgagggaggctacacgtgcgtctgccgcccgcgcttcaccggagaggactgcgagctggacaccgaggccggccgctgcgtgccgggcgtctgccgcaacgggggcacctgcaccgacgcgcccaacggcggctttcgctgccagtgcccggcaggcggcgccttcgagggcccgcgctgcgaggtggctgcgcgctccttcccgcccagttcgttcgtcatgtttcgcggcctgcggcagcgattccaccttacgctgtccctctcgttcgcgacagtgcagcagagcgggctgctcttctacaacgggcgcctgaacgagaagcacgacttcctggccctggaactcgtggctggccaagtgcggctcacatattccacgggtgaatccaacaccgtggtcagccccacagttccagggggcttgagtgacgggcaatggcatacagtgcatctgagatactacaacaagccccggacagatgccctagggggtgcacagggcccctccaaggacaaggtggctgtgctaagcgtggatgattgtgatgtggccgtggctctgcagtttggtgctgagattggcaactactcatgcgcggctgctggtgtgcaaacaagctccaagaagtccctggacctgacgggccctcttcttctgggaggtgtccccaacctccccgagaacttccccgtatcccataaggacttcatcggctgtatgcgggacctgcacattgatggccgccgagtggacatggcggcttttgtcgcaaataatggcaccatggcaggctgccaagccaagctacacttttgtgactcaggcccctgcaagaacagtggcttctgctcggagcgctggggcagcttcagctgcgactgccctgtgggcttcggcggcaaagactgtcagcttactatggcccatccccaccatttccgtggcaacggcacactgagctggaactttggaagtgacatggctgtgtctgtgccatggtacctggggctggcatttcggacacgggcaacgcagggggtcctgatgcaagtgcaggctgggccacacagcacgctcctttgccagctagatcgggggttactgtctgtgacagtgaccaggggctcgggccgtgcttcccatctccttctggaccaggtgactgtcagtgatggccggtggcacgatctgcggctggagttgcaggaggaaccaggtggccggcggggccaccatgtccttatggtctcactggactttagcctcttccaggacaccatggcggtggggagtgagctgcagggcctgaaggtaaagcagctccacgtgggaggcctgccccccggcagtgcagaggaggctcctcagggtctggttggctgcatccagggggtgtggctcggctccacaccctctggctccccggccctgctaccccccagccaccgagtgaatgcggagcctggctgtgttgtgaccaacgcctgtgcctctgggccctgcccacctcacgcagactgccgggacctctggcagaccttttcttgcacctgccagccaggttactacggcccaggctgtgtggatgcctgcctcctgaacccctgtcagaaccagggatcatgccggcacctgccaggagccccccatggctatacctgtgactgtgtgggtggctatttcgggcaccactgtgagcacaggatggaccagcagtgcccacggggctggtgggggagcccaacctgtggcccctgcaactgtgatgttcacaaaggttttgatcccaactgcaacaagacaaatgggcagtgtcactgcaaggagttccactaccgaccgcggggcagtgactcttgcctcccatgtgactgctaccctgtgggctccacctcgcgctcatgtgcaccccacagcgggcagtgcccctgtcgcccaggagcccttggccgccagtgcaacagctgtgacagtcccttcgcagaggtgacagccagcggctgccgggtgctctatgatgcctgccctaagtccctgagatctggtgtgtggtggccccagacaaagtttggcgtcctggccacagtgccctgtccccggggggccctgggtgctgctgtgcggctgtgtgatgaggcccagggttggctggagcccgacctcttcaactgtacctcccctgcctttcgagagctcagtctgctgctggatggcctagagctgaacaagacggcactggataccatggaggccaagaagctggctcagcggctacgggaggtgactggccacactgaccactattttagccaagatgttcgagtcactgcccgcctgctggcccacctgctggccttcgagagccatcagcagggcttcgggctgacagccacacaggatgcccacttcaatgagaatctgctgtgggccggctctgcactgcttgccccagagacaggggacttgtgggcggcgctggggcagcgggcccctgggggctccccaggcagcgcgggactggtgaggcacctggaggagtatgcagccacactcgcaaggaatatggaactcacatacctgaatcccatggggctggtgacgcctaatatcatgctcagcattgaccgcatggagcaccccagttctccccggggggcccgtcgctaccctcgctaccatagcaacctctttcgaggccaggatgcctgggatcctcacacccatgtgctgctgccttcccagtccccacggccatccccatctgaagttctgcccacaagcagcagcatagaaaactccaccacctcaagtgtggtccccccaccagccccgccagagccagagcctgggatctccattatcattctcctcgtttaccgcaccttagggggactgctccctgcccagttccaggcagaacgccgaggtgccaggcttcctcagaaccccgtcatgaactccccggtggtcagcgtggctgtgttccacggacgcaacttcctaaggggaatcctggagtcccccatcagcctagagtttcgcctgctacagacagcgaatcggagcaaggcgatctgtgtgcagtgggacccacctggcctggcggagcagcatggtgtgtggacagcacgggactgcgagctggtgcacaggaatgggtcccacgcacggtgtcgctgcagccggacagggacctttggggtcctcatggatgcctctccccgtgagaggctggagggcgacctggagctgctggctgtgttcacccacgtggtcgtggctgtgtctgtggctgcgctggtgctgactgcagccatcctgctgagcctgcgcagcctcaagtccaatgtgcgtgggatccatgccaatgtggcagccgccctgggggtggcagagctcctcttcctgctggggattcacaggacccacaatcagctggtgtgcactgcagtcgccatcctcctgcactacttcttcctcagcaccttcgcgtggctcttcgtgcaggggctgcacctctaccgcatgcaggttgagccacgcaacgtggaccgcggcgccatgcgcttctaccatgccctgggctggggcgtccctgctgtgctgctgggccttgctgtgggcctggaccctgagggctatgggaaccctgacttctgctggatctcagtccacgagcccctcatctggagctttgctggccctgttgtcctggtcatagtgatgaacgggaccatgtttctcctcgctgcccgcacatcctgctccacagggcagagggaggccaagaagacctctgcactgacccttcgcagctccttcctgctgcttctgctggtcagtgcctcctggctctttgggctcctggcagtcaaccacagcatcctagccttccactacctccatgctggactctgcggcctccagggcctggcggtgctgctgctcttctgtgtcctaaatgcagatgctcgggctgcctggatgccagcctgtctgggcaggaaggcagcgcctgaggaggcaaggccagcacctgggctgggacctggggcctacaacaacacggctctctttgaggagagtggcctcatccgcatcactctgggcgcctccaccgtctcctctgtgagcagtgcccgctccggccggacccaggaccaggacagccagcggggccgcagctacctcagggacaatgtcctggttcgacatggctcagccgctgaccacactgaccacagcctccaggctcatgctggccccactgacctggacgtggccatgttccatcgagatgctggcgcagactccgactctgacagtgacctgtccttggaggaggagaggagtctctccattccatcttcagaaagcgaggacaatggccggacgcgggggcgcttccaacggccactctgccgagcagcccagagtgagaggctcctcacccaccccaaagatgtggatggcaatgacctcctgtcctactggccagccctgggggagtgcgaggcagccccctgtgctctgcagacttggggctctgaaaggcgcctggggctggacaccagcaaggatgcagctaacaacaaccagccagacccggccctgaccagtggggatgagacttctctgggccgggcccagcgccagaggaaaggcatcctgaagaaccggttgcaatacccactggtgccacagacccgaggtgcccctgagctgtcctggtgccgtgcagccaccttgggccaccgtgctgtgccagctgcctcttacggtcgcatctatgctggcgggggcacgggcagcctttcacagccagccagccgctactcttctagagaacagctggacctgctcctccggcggcaactgagccgtgagcgactagaggaagcccctgcccctgttctacgtcccctgagccggccagggtcccaggaatgcatggatgctgcaccaggccgactggagcccaaagatcggggcagcaccctgccacggaggcagccacctcgggactaccctggcgccatggctggccgcttcgggtcacgggatgcgctcgacttaggggcacctcgagagtggttgagcacgctgcctccgccccgccgcacccgggaccttgacccacagcccccacctctgcccctgtctccccagcggcaactctcaagggaccccctcttgccatcccggccgctggactctctgtctaggagctcgaactctcgggagcagctggaccaggtgcctagccggcacccctcacgagaagcccttgggccactcccgcagctgctcagagctagggaggactcggtcagtggccccagccatggcccctccacagaacagttggacattctttcctccatccttgcctctttcaactcctcggccctctcctctgtgcaatcttcaagcacacccttgggccctcacaccactgccacaccttctgccacagcctctgtgcttgggccctccacgccacgttctgccacgtctcacagcatctcggagctgtcgccagactcagaagttcccagaagtgagggtcactcctgaggggatgacggcgtggacgaggaacagctgagggcgacagaggatctaggctaacaggagagactccaggagtgggggcagatcccaaggcagcctcctgctccccagtggtgggtgccccagctctacctggtgtggcagggctgaggctccatgtgcatctgtgagcatgcgtgtgacaggtgcagagacgggggactggagggagacttttatacgttttgtacctttgtaaccagagagatgcttatgttatttttcagcttttctgtctcctggggggtttgaggctgggctgggagggggagggagatagagggagagatgcagtttgaccccatttgggtcctgagcaaaccctatgctcatctctctctccttcctggggtggactcagatgggtgggacacatgccttcctccccctattccacccccaagttgatctgagtatcgtcaggggcccaaagtacagaattgttctttgctttttattgaatgctccaaaggccaaacttctggggctgggggttggtcttggaaacaggggtcctctgacttcctcatgggggcttgctcataccgcccctcctggtggatgtgtgtgtttattatgtggagtccctgccacttactgccttatgacctaggactgatgctgtggggtgctggtggagcagctgatgtcgtgtttacagagcaaggcttccctgtctcccacggggaggggctcgggcctctagtcagacattcctgcagagggtcggtggaggggtcattcacctgcccctgcagcaagcaaaagttgtctgtggtgccatttgattccctgacactgccccctgcttgaattgattccgaagggtagggtgggaaggtgagcaaagggagcagaaacaagggaattcaagacccagaatgtaggtgccactgcctcctatgtttacaggatcctccgtggccctaggcacctgggctgcaggaagtgactccgttccactcctcctttattcccttaaaaagggaaaaatgactgttacgaccctgttcacaaaactcttacttttgctattttgtctgctgtccagaactgaagactttaaaattttgttactgtttacaagtccagattcaaaaaatgtttttactttgtttacaactcaaaactttgagttttacactttgtttacagtagataattttttttcctttgtttccaagtgaaaggtagggaaagtgggagagggacttggaggacccacctgtgaggaccctgacctggccatcttgaggggttttctaacccccaggtctcccaggccgaaggtcagccttgagtcccgtttaacagcagatccagaagaccttgagagtaggcgtcctctaaccacgggggagagtggctgtgcagggctggggggtggtctgtgcagacacctcctcacccaccaccccatgcatactcttgggaagcagcttcctgggagattagaaattctacttccctgactggagctaaatcccaccagccaggacccaaactctccttaccgagaaggaccccagctcttgaagggctgagtggcctgctgggggtgggagggtgtctttactatgtcctaggtttcgtagatgcccctctctggggttcccctcctccagcccagcggccctctttcctgtctgtgtaaattgttccgtgaagccgcgctctgttttgggaataaacttctatag

SEQ ID NO: 4036 - DNA, 11971 bp, Homo sapiens
  source 1..11971: mol_type = unassigned DNA
agcgaaccatcggggcggccgggagccatgttggagcggcgggaggcggcagcagcgtcggggatgctgtggtgggggcggaaaaagccagggccgcacgccggaggggctccggccgcggagtagatggtgcccagagggcggcgggggtgcggagagacaggcggaggggcgggggcccggggcggcggcaggggcccgggagggggcccgagcggcggggccagcccaaggcccggaccggggcggggggcggtggaggccgtgcagggaggcgggggatgatggcgaggcggccgccgtggcggggcctcgggggacggtcgacccccatactcctgctccttctcctctctttgttccccctcagccaggaggagctggggggcggtgggcaccagggctgggacccaggcttagctgccactacggggccaagggcgcatatcggtggcggagccttagctctttgtccggagtcttccggggtccgggaggatggggggcctggcctgggggtcagggagcctatcttcgtggggctccgagggagaaggcaaagcgcccggaatagtcgagggccccctgagcagccgaatgaggagctggggattgaacacggcgtccagccattgggcagccgcgaacgagagacaggacagggaccagggtctgtgttatactggcgcccagaggtctcctcttgcgggcggacaggacctttgcaaagaggtagtctgtcaccaggggctctgtcctcaggggtcccgggctcggggaacagctcgcccctcccttcagactttttgattcggcaccacggtcccaagccggtgtcctcccagcggaacgctgggacaggctcccgcaaaagagtgggcaccgcgcgctgctgtggggaattatgggcaacagggagcaagggtcagggcgagagagccacgacatccggagcagaaaggacagccccccggcggaactgtcttccaggggcctcgggatctggccccgagctggattcagcaccacgcacggcgaggacagctcctgcatcaggttcagcaccccgcgagtctcggacagctcccgagccggcgcccaagcgcatgcgctcccggggtctcttccgctgccgcttcctcccgcagcgccccgggccgcgtcccccgggactcccggcccgtcctgaagccaggaaagtaacctcggcgaaccgggcacgctttcgtcgcgccgcaaaccgccacccgcagtttccgcagtacaactaccagacgctggtgccggagaatgaggcagcaggcaccgcggtgctacgcgtggttgctcaggacccggacgccggcgaggccgggcgcctagtctactcgctggcggcactcatgaacagccgctcgctggagctgttcagcatcgacccgcagagcggccttatccgtacggcggcagctctggaccgcgagagcatggagcgtcactacctgcgtgtgaccgcgcaggaccacgggtcgccgcgcctctcggccaccacgatggtggccgtgacagtagccgaccgcaacgaccactcgccggtttttgagcaagcgcagtaccgggagacccttcgcgagaatgtggaggagggctaccctatcctgcagctgcgtgccactgacggcgacgcgccccccaacgccaacctgcgctaccgcttcgtggggccgccagctgcgcgcgctgcagctgccgccgccttcgagattgatccacgctccggcctcatcagcaccagcggccgagtggaccgcgagcacatggaaagctatgagctggtggtggaagccagcgaccagggccaggaacccgggccgcgctcggccactgtgcgcgtacacataactgtgctagacgagaacgacaatgctcctcagttcagcgagaagcgctacgtggcgcaggtgcgcgaggatgtgcgcccccacacagtcgtgctgcgcgtcacggccactgaccgggacaaggacgccaacggattggtgcactacaacatcatcagtggcaatagccgtggacactttgccatcgacagcctcactggcgagatccaggtggtggcacctctggacttcgaggcagagagagagtatgccttgcgcatcagggcgcaggatgctggccggccaccgctgtccaacaacacgggcctggccagcatccaggtggtggacatcaatgaccacattcctatttttgtcagcacgcccttccaagtttctgtcttggaaaatgctcccttgggtcactcagtcatccacattcaggcagtcgatgcagaccatggggagaatgccagattggagtactccctaactggtgtggcacctgatactccttttgtgataaacagcgccactggctgggtctctgtgagtggtcccctggaccgtgagtctgtggagcattacttctttggtgtggaggctcgagaccatggctcacccccactctctgcctcagccagtgtcaccgtgactgtgctggacgttaatgacaatcggcctgagttcacaatgaaggagtaccacctacgactgaatgaggatgcagctgtgggcaccagtgtggtcagcgtgaccgcagtagaccgtgatgccaacagtgccatcagctaccagatcacaggcggcaacacccggaatcgctttgccatcagcacccaggggggtgtgggtctggtgactctggctctgccactggactacaagcaggaacgctacttcaagctggtactaactgcatctgaccgtgcccttcatgatcactgctatgtgcacatcaacatcacagatgccaacactcatcggccggtctttcaaagtgcccactactcagtgagtgtgaatgaagatcggccaatgggtagcaccatagtggtcatcagtgcctctgatgatgacgtgggtgagaatgctcgtatcacctatctcctggaggacaacctgccccagttccgcattgatgcagactcaggagccattacattacaggccccattagactatgaggaccaggtgacctacaccctggctatcacagctcgggacaatggcatcccacagaaggcagacactacttatgtggaggtgatggtcaatgacgtgaatgacaatgctccacaatttgtggcctcccactatacagggctggtctctgaggatgccccacctttcaccagtgtcctgcagatctcagccactgaccgggatgctcatgccaatggccgggtccagtacactttccagaatggtgaagatggggatggagattttaccattgagcccacctctggaattgtccgtacagtaaggcggctagaccgggaggcagtatcagtgtatgagttgactgcctacgcagtggacagaggtgtgcccccactccggactccagtcagtatccaggtgatggtgcaggatgtgaacgacaatgcacctgtcttcccagctgaggagtttgaggtgcgggtgaaagagaatagcattgtgggctcagtggtggcccagatcactgcagtggaccctgacgaaggccccaatgcccatataatgtaccagatcgtggaggggaacatccctgagctgttccaaatggacatcttctctggagaactgacggcactcattgacctagactatgaggctcgccaagaatatgtgattgtggtgcaggccacatctgctcctttggtcagccgggccactgtgcacgtccgcctggttgaccagaatgacaacagccctgtgctcaacaacttccagatcctcttcaacaactatgtatccaaccgttcagacaccttcccgtcgggcattattgggcgcatcccagcttatgaccccgatgtctccgaccacctcttctactcctttgagcgtggcaatgagctgcagctgctggtagtcaaccagaccagtggggagctgcgactcagccgaaagctagacaataaccgcccactggtggcctccatgttggtgactgtcacagatggcctgcacagcgtgacggcgcagtgtgtgctgcgcgtggtcatcatcacggaggagttgctggccaacagcctgaccgtgcgccttgagaacatgtggcaggagcgcttcctgtcaccgctgctgggccgcttcctcgagggcgtggctgcggtgctcgctacgcccgctgaggacgtcttcatcttcaacatccagaacgacacagacgtagggggcaccgtgctcaatgtgagtttctcggcgctagctccacgtggggccggggcgggcgctgcagggccctggttcagctccgaggagctgcaggagcagttgtacgtgcgccgggcggcgctggcggctcgctccctgctcgacgtactgcccttcgacgacaacgtgtgcctgcgagagccctgtgagaactacatgaaatgcgtgtccgtgctccgctttgactcgtccgcgcccttcctggcctcggcctccacgctgttccgacccatccagcccatcgctggcctgcgctgccgctgcccgcccggattcacgggagacttttgcgagaccgagctcgacctctgctactccaacccatgtcgcaacggcggagcctgcgcgcggcgcgagggaggctacacgtgcgtctgccgcccgcgcttcaccggagaggactgcgagctggacaccgaggccggccgctgcgtgccgggcgtctgccgcaacgggggcacctgcaccgacgcgcccaacggcggctttcgctgccagtgcccggcaggcggcgccttcgagggcccgcgctgcgaggtggctgcgcgctccttcccgcccagttcgttcgtcatgtttcgcggcctgcggcagcgattccaccttacgctgtccctctcgttcgcgacagtgcagcagagcgggctgctcttctacaacgggcgcctgaacgagaagcacgacttcctggccctggaactcgtggctggccaagtgcggctcacatattccacgggtgaatccaacaccgtggtcagccccacagttccagggggcttgagtgacgggcaatggcatacagtgcatctgagatactacaacaagccccggacagatgccctagggggtgcacagggcccctccaaggacaaggtggctgtgctaagcgtggatgattgtgatgtggccgtggctctgcagtttggtgctgagattggcaactactcatgcgcggctgctggtgtgcaaacaagctccaagaagtccctggacctgacgggccctcttcttctgggaggtgtccccaacctccccgagaacttccccgtatcccataaggacttcatcggctgtatgcgggacctgcacattgatggccgccgagtggacatggcggcttttgtcgcaaataatggcaccatggcaggctgccaagccaagctacacttttgtgactcaggcccctgcaagaacagtggcttctgctcggagcgctggggcagcttcagctgcgactgccctgtgggcttcggcggcaaagactgtcagcttactatggcccatccccaccatttccgtggcaacggcacactgagctggaactttggaagtgacatggctgtgtctgtgccatggtacctggggctggcatttcggacacgggcaacgcagggggtcctgatgcaagtgcaggctgggccacacagcacgctcctttgccagctagatcgggggttactgtctgtgacagtgaccaggggctcgggccgtgcttcccatctccttctggaccaggtgactgtcagtgatggccggtggcacgatctgcggctggagttgcaggaggaaccaggtggccggcggggccaccatgtccttatggtctcactggactttagcctcttccaggacaccatggcggtggggagtgagctgcagggcctgaaggtaaagcagctccacgtgggaggcctgccccccggcagtgcagaggaggctcctcagggtctggttggctgcatccagggggtgtggctcggctccacaccctctggctccccggccctgctaccccccagccaccgagtgaatgcggagcctggctgtgttgtgaccaacgcctgtgcctctgggccctgcccacctcacgcagactgccgggacctctggcagaccttttcttgcacctgccagccaggttactacggcccaggctgtgtggatgcctgcctcctgaacccctgtcagaaccagggatcatgccggcacctgccaggagccccccatggctatacctgtgactgtgtgggtggctatttcgggcaccactgtgagcacaggatggaccagcagtgcccacggggctggtgggggagcccaacctgtggcccctgcaactgtgatgttcacaaaggttttgatcccaactgcaacaagacaaatgggcagtgtcactgcaaggagttccactaccgaccgcggggcagtgactcttgcctcccatgtgactgctaccctgtgggctccacctcgcgctcatgtgcaccccacagcgggcagtgcccctgtcgcccaggagcccttggccgccagtgcaacagctgtgacagtcccttcgcagaggtgacagccagcggctgccgggtgctctatgatgcctgccctaagtccctgagatctggtgtgtggtggccccagacaaagtttggcgtcctggccacagtgccctgtccccggggggccctgggattgcggggtgcaggtgctgctgtgcggctgtgtgatgaggcccagggttggctggagcccgacctcttcaactgtacctcccctgcctttcgagagctcagtctgctgctggatggcctagagctgaacaagacggcactggataccatggaggccaagaagctggctcagcggctacgggaggtgactggccacactgaccactattttagccaagatgttcgagtcactgcccgcctgctggcccacctgctggccttcgagagccatcagcagggcttcgggctgacagccacacaggatgcccacttcaatgagaatctgctgtgggccggctctgcactgcttgccccagagacaggggacttgtgggcggcgctggggcagcgggcccctgggggctccccaggcagcgcgggactggtgaggcacctggaggagtatgcagccacactcgcaaggaatatggaactcacatacctgaatcccatggggctggtgacgcctaatatcatgctcagcattgaccgcatggagcaccccagttctccccggggggcccgtcgctaccctcgctaccatagcaacctctttcgaggccaggatgcctgggatcctcacacccatgtgctgctgccttcccagtccccacggccatccccatctgaagttctgcccacaagcagcagcatagaaaactccaccacctcaagtgtggtccccccaccagccccgccagagccagagcctgggatctccattatcattctcctcgtttaccgcaccttagggggactgctccctgcccagttccaggcagaacgccgaggtgccaggcttcctcagaaccccgtcatgaactccccggtggtcagcgtggctgtgttccacggacgcaacttcctaaggggaatcctggagtcccccatcagcctagagtttcgcctgctacagacagcgaatcggagcaaggcgatctgtgtgcagtgggacccacctggcctggcggagcagcatggtgtgtggacagcacgggactgcgagctggtgcacaggaatgggtcccacgcacggtgtcgctgcagccggacagggacctttggggtcctcatggatgcctctccccgtgagaggctggagggcgacctggagctgctggctgtgttcacccacgtggtcgtggctgtgtctgtggctgcgctggtgctgactgcagccatcctgctgagcctgcgcagcctcaagtccaatgtgcgtgggatccatgccaatgtggcagccgccctgggggtggcagagctcctcttcctgctggggattcacaggacccacaatcagctggtgtgcactgcagtcgccatcctcctgcactacttcttcctcagcaccttcgcgtggctcttcgtgcaggggctgcacctctaccgcatgcaggttgagccacgcaacgtggaccgcggcgccatgcgcttctaccatgccctgggctggggcgtccctgctgtgctgctgggccttgctgtgggcctggaccctgagggctatgggaaccctgacttctgctggatctcagtccacgagcccctcatctggagctttgctggccctgttgtcctggtcatagtgatgaacgggaccatgtttctcctcgctgcccgcacatcctgctccacagggcagagggaggccaagaagacctctgcactgacccttcgcagctccttcctgctgcttctgctggtcagtgcctcctggctctttgggctcctggcagtcaaccacagcatcctagccttccactacctccatgctggactctgcggcctccagggcctggcggtgctgctgctcttctgtgtcctaaatgcagatgctcgggctgcctggatgccagcctgtctgggcaggaaggcagcgcctgaggaggcaaggccagcacctgggctgggacctggggcctacaacaacacggctctctttgaggagagtggcctcatccgcatcactctgggcgcctccaccgtctcctctgtgagcagtgcccgctccggccggacccaggaccaggacagccagcggggccgcagctacctcagggacaatgtcctggttcgacatggctcagccgctgaccacactgaccacagcctccaggctcatgctggccccactgacctggacgtggccatgttccatcgagatgctggcgcagactccgactctgacagtgacctgtccttggaggaggagaggagtctctccattccatcttcagaaagcgaggacaatggccggacgcgggggcgcttccaacggccactctgccgagcagcccagagtgagaggctcctcacccaccccaaagatgtggatggcaatgacctcctgtcctactggccagccctgggggagtgcgaggcagccccctgtgctctgcagacttggggctctgaaaggcgcctggggctggacaccagcaaggatgcagctaacaacaaccagccagacccggccctgaccagtggggatgagacttctctgggccgggcccagcgccagaggaaaggcatcctgaagaaccggttgcaatacccactggtgccacagacccgaggtgcccctgagctgtcctggtgccgtgcagccaccttgggccaccgtgctgtgccagctgcctcttacggtcgcatctatgctggcgggggcacgggcagcctttcacagccagccagccgctactcttctagagaacagctggacctgctcctccggcggcaactgagccgtgagcgactagaggaagcccctgcccctgttctacgtcccctgagccggccagggtcccaggaatgcatggatgctgcaccaggccgactggagcccaaagatcggggcagcaccctgccacggaggcagccacctcgggactaccctggcgccatggctggccgcttcgggtcacgggatgcgctcgacttaggggcacctcgagagtggttgagcacgctgcctccgccccgccgcacccgggaccttgacccacagcccccacctctgcccctgtctccccagcggcaactctcaagggaccccctcttgccatcccggccgctggactctctgtctaggagctcgaactctcgggagcagctggaccaggtgcctagccggcacccctcacgagaagcccttgggccactcccgcagctgctcagagctagggaggactcggtcagtggccccagccatggcccctccacagaacagttggacattctttcctccatccttgcctctttcaactcctcggccctctcctctgtgcaatcttcaagcacacccttgggccctcacaccactgccacaccttctgccacagcctctgtgcttgggccctccacgccacgttctgccacgtctcacagcatctcggagctgtcgccagactcagaagttcccagaagtgagggtcactcctgaggggatgacggcgtggacgaggaacagctgagggcgacagaggatctaggctaacaggagagactccaggagtgggggcagatcccaaggcagcctcctgctccccagtggtgggtgccccagctctacctggtgtggcagggctgaggctccatgtgcatctgtgagcatgcgtgtgacaggtgcagagacgggggactggagggagacttttatacgttttgtacctttgtaaccagagagatgcttatgttatttttcagcttttctgtctcctggggggtttgaggctgggctgggagggggagggagatagagggagagatgcagtttgaccccatttgggtcctgagcaaaccctatgctcatctctctctccttcctggggtggactcagatgggtgggacacatgccttcctccccctattccacccccaagttgatctgagtatcgtcaggggcccaaagtacagaattgttctttgctttttattgaatgctccaaaggccaaacttctggggctgggggttggtcttggaaacaggggtcctctgacttcctcatgggggcttgctcataccgcccctcctggtggatgtgtgtgtttattatgtggagtccctgccacttactgccttatgacctaggactgatgctgtggggtgctggtggagcagctgatgtcgtgtttacagagcaaggcttccctgtctcccacggggaggggctcgggcctctagtcagacattcctgcagagggtcggtggaggggtcattcacctgcccctgcagcaagcaaaagttgtctgtggtgccatttgattccctgacactgccccctgcttgaattgattccgaagggtagggtgggaaggtgagcaaagggagcagaaacaagggaattcaagacccagaatgtaggtgccactgcctcctatgtttacaggatcctccgtggccctaggcacctgggctgcaggaagtgactccgttccactcctcctttattcccttaaaaagggaaaaatgactgttacgaccctgttcacaaaactcttacttttgctattttgtctgctgtccagaactgaagactttaaaattttgttactgtttacaagtccagattcaaaaaatgtttttactttgtttacaactcaaaactttgagttttacactttgtttacagtagataattttttttcctttgtttccaagtgaaaggtagggaaagtgggagagggacttggaggacccacctgtgaggaccctgacctggccatcttgaggggttttctaacccccaggtctcccaggccgaaggtcagccttgagtcccgtttaacagcagatccagaagaccttgagagtaggcgtcctctaaccacgggggagagtggctgtgcagggctggggggtggtctgtgcagacacctcctcacccaccaccccatgcatactcttgggaagcagcttcctgggagattagaaattctacttccctgactggagctaaatcccaccagccaggacccaaactctccttaccgagaaggaccccagctcttgaagggctgagtggcctgctgggggtgggagggtgtctttactatgtcctaggtttcgtagatgcccctctctggggttcccctcctccagcccagcggccctctttcctgtctgtgtaaattgttccgtgaagccgcgctctgttttgggaataaacttctatag

SEQ ID NO: 4037 - DNA, 11079 bp, Homo sapiens
  source 1..11079: mol_type = unassigned DNA
gcggcggcggctcgggagagagggacgcgggctgcaggcgcgatgcttggctagaggacgcgtccgacggcggccggacgctgaggtggtcggggctagtcagcccggcctgggcatggagcgcggggtggcagagcctctggacgtttggggcgcgcccagtccgagcccccggcgcgcctgaagttgcgagcggcgagcggcgagcggcgagcggcccgcggagacccaggagctgccggcacgccgcggatgagccttcgcgccggcgggaagacgcggcggtggccagggccagagcaggcggcccgcgggggccgatccggcggagagcagagcccgaggcgaggcgaggcgcggcgccgctgcacacacgcacacggagccatggggcgccatgttgccaccagctgccacgtggcctggcttttggtgctgatctctggatgctggggccaggtgaaccggctgcccttcttcaccaaccacttctttgatacatacctgctgatcagcgaggacacgcctgtgggttcttctgtgacccagttgctggcccaagacatggacaatgaccccctggtgtttggcgtgtctggggaggaggcctctcgcttctttgcagtggagcctgacactggcgtggtgtggctccggcagccactggacagagagaccaagtcagagttcaccgtggagttctctgtcagcgaccaccagggggtgatcacacggaaggtgaacatccaggttggggatgtgaatgacaacgcgcccacatttcacaatcagccctacagcgtccgcatccctgaggtaggagccactgggaatacaccagtggggacgcccatcttcatcgtgaatgccacagaccccgacttgggggcagggggcagcgtcctctactccttccagcccccctcccaattcttcgccattgacagcgcccgcggtatcgtcacagtgatccgggagctggactacgagaccacacaggcctaccagctcacggtcaacgccacagatcaagacaagaccaggcctctgtccaccctggccaacttggccatcatcatcacagatgtccaggacatggaccccatcttcatcaacctgccttacagcaccaacatctacgagcattctcctccgggcacgacggtgcgcatcatcaccgccatagaccaggataaaggacgtccccggggcattggctacaccatcgtttcagggaataccaacagcatctttgccctggactacatcagcggagtgctgaccttgaatggcctgctggaccgggagaaccccctgtacagccatggcttcatcctgactgtgaagggcacggagctgaacgatgaccgcaccccatctgacgctacagtcaccacgaccttcaatatcctggttattgacatcaatgacaatgccccggagttcaacagctccgagtacagcgtggccatcactgagctggcacaggtcggctttgcccttccactcttcatccaggtggtggacaaggatgagggcctgaacagcatgtttgaggtgtacttggtggggaacaactcccaccacttcatcatctccccgacctccgtccaggggaaggcggacattcgtattcgggtggccatcccactggactacgagaccgtggaccgctacgactttgatctctttgccaatgagagtgtgcctgaccatgtgggctatgccaaggtgaagatcactctcatcaatgaaaatgacaaccggcccatcttcagccagccactgtacaacatcagcctgtacgagaacgtcaccgtggggacctctgtgctgacagtcctggcaactgacaatgatgcaggcacctttggggaagtcagctacttcttcagtgatgaccctgacaggttctcgctggacaaggacacgggactcatcatgctgattgccaggctggactatgagctcatccagcgcttcaccctgacgatcattgcccgggacgggggcggcgaggagaccacaggccgggtcaggatcaatgtgttggatgtcaacgacaacgtgcccaccttccagaaggatgcctacgtgggtgctctgcgggagaacgagccttctgtcacacagctggtgcggctccgggcaacagatgaagactcccctcccaacaaccagatcacctacagcattgtcagtgcatctgcctttggcagctacttcgacatcagcctgtacgagggctatggagtgatcagcgtcagtcgccccctggattatgaacagatatccaatgggctgatttatctgacggtcatggccatggatgctggcaacccccctctcaacagcaccgtccctgtcaccatcgaggtgtttgatgagaatgacaaccctcccaccttcagcaagcccgcctacttcgtctccgtggtggagaacatcatggcaggagccacggtgctgttcctgaatgccacagacctggaccgctcccgggagtacggccaggagtccatcatctactccttggaaggctccacccagtttcggatcaatgcccgctcaggggaaatcaccaccacgtctctgcttgaccgagagaccaagtctgaatacatcctcatcgttcgcgcagtggacgggggtgtgggccacaaccagaaaactggcatcgccaccgtaaacatcaccctcctggacatcaatgacaaccaccccacgtggaaggacgcaccctactacatcaacctggtggagatgacccctccagactctgatgtgaccacggtggtggctgttgacccagacctgggggagaatggcaccctggtgtacagcatccagccacccaacaagttctacagcctcaacagcaccacgggcaagatccgcaccacccacgccatgctggaccgggagaaccccgacccccatgaggccgagctgatgcgcaaaatcgtcgtctctgttactgactgtggcaggccccctctgaaagccaccagcagtgccacagtgtttgtgaacctcttggatctcaatgacaatgaccccacctttcagaacctgccttttgtggccgaggtgcttgaaggcatcccggcgggggtctccatctaccaagtggtggccatcgacctcgatgagggcctgaacggcctggtgtcctaccgcatgccggtgggcatgccccgcatggacttcctcatcaacagcagcagcggcgtggtggtcaccaccaccgagctggaccgcgagcgcatcgcggagtaccagctgcgggtggtggccagtgatgcaggcacgcccaccaagagctccaccagcacgctcaccatccatgtgctggatgtgaacgacgagacgcccaccttcttcccggccgtgtacaatgtgtctgtgtccgaggacgtgccacgcgagttccgggtggtctggctgaactgcacggacaacgacgtgggcctcaatgcagagctcagctacttcatcacaggtggcaacgtggatgggaagttcagcgtgggttaccgcgatgccgttgtgagaaccgtggtgggcctggaccgggagaccacagccgcctacatgctcatcctggaggccatcgacaacggccctgtagggaagcgacacacgggcacagccaccgtgttcgtcactgtcctggatgtgaatgacaaccggcccatctttctgcagagcagctatgaggccagcgtccctgaggacatccctgaaggccacagcatcttgcagctgaaagccacggacgcagatgagggcgagtttgggcgtgtgtggtaccgcatcctccatggtaaccatggcaacaacttccggatccatgtcagcaatgggctcctgatgcgagggccccggcccctggaccgggagcggaactcatcccacgtgctgatagtggaggcctacaaccacgacctgggccccatgcggagctccgtcagggtgattgtgtacgtggaggacatcaacgatgaggcccccgtgttcacacagcagcagtacagccgtctggggcttcgagagaccgcaggcattggaacgtcagtcatcgtggtccaagccacagaccgagactctggggatggtggcctggtgaactaccgcatcctgtcgggcgcagaggggaagtttgagattgacgagagcacagggcttatcatcaccgtgaattacctggactacgagaccaagaccagctacatgatgaatgtgtcggccactgaccaggccccgcccttcaaccagggcttctgcagcgtctacatcactctgctcaacgagctggacgaggccgtgcagttctccaatgcctcatacgaggctgccatcctggagaatctggcactgggtactgagattgtgcgggtccaggcctactccatcgacaacctcaaccaaatcacgtaccgcttcaacgcctacaccagcacccaggccaaagccctcttcaagatagacgccatcacgggtgtgatcacagtccagggcctggtggaccgtgagaagggcgacttctataccttgacagtggtggcagatgacggcggccccaaggtggactccaccgtgaaggtctacatcactgtgctggacgagaatgacaacagcccccggtttgacttcacctccgactcggcggtcagcatacccgaggactgccctgtgggccagcgagtggctactgtcaaggcctgggaccctgatgctggcagcaatgggcaggtggtcttctccctggcctctggcaacatcgcgggggcctttgagatcgtcaccaccaatgactccattggcgaagtgtttgtggccaggcccctggacagagaagagctggatcactacatcctccaggttgtggcttctgaccgaggcacccctccacggaagaaggaccacatcctgcaggtgaccatcctggacatcaatgacaaccctccagtcatcgagagcccctttggatacaatgtcagtgtgaatgagaacgtgggtggaggtactgctgtggtccaggtgagagccactgaccgtgacatcgggatcaacagtgttctgtcctactacatcaccgagggcaacaaggacatggccttccgcatggaccgcatcagcggtgagatcgccacacggcctgccccgcctgaccgcgagcgccagagcttctaccacctggtggccactgtggaggacgagggcaccccaaccctgtcggccaccacgcacgtgtacgtgaccattgtggatgagaatgataacgcgcccatgttccagcagccccactatgaggtgctgctggatgagggcccagacacgctcaacaccagcctcatcaccatccaggcactggacctggatgagggtcccaacggcacagtcacctatgccatcgtcgcaggcaacatcgtcaacaccttccgcatcgacagacacatgggtgtcatcactgctgccaaagagctggactacgagatcagccacggccgctacaccctgatcgtcactgccacagaccagtgccccatcttatcccaccgcctcacctctaccaccacggtgcttgtgaatgtgaatgacatcaacgacaatgtgcctaccttcccccgggactatgagggaccatttgaagtcactgagggccagccggggcccagagtgtggaccttcctggcccatgaccgagactcaggacccaacgggcaggtggagtacagcatcatggatggagaccctctgggggagtttgtgatctctcctgtggagggggtgctaagggtccggaaggacgtggagctggaccgggagaccatcgccttctacaacctgaccatctgtgcccgtgaccgggggatgcccccactcagctccacaatgctggtggggatccgggtgctggacatcaacgacaacgaccctgtgctgctgaacctgcccatgaacatcaccatcagcgagaacagccctgtctccagctttgtcgcccatgtcctggccagtgacgctgacagtggctgcaatgcacgcctcaccttcaacatcactgcgggcaaccgcgagcgggccttcttcatcaatgccacgacagggatcgtcactgtgaaccggcccctggaccgcgagcggatcccagagtacaagctgaccatttctgtgaaggacaacccggagaatccacgcatagccaggagggattatgacttgcttctgatcttcctttctgatgagaatgacaaccaccccctcttcactaaaagcacctaccaggcagaggtgatggaaaactctcccgctggcacccctctcacggtgctcaatgggcccatcctggccctggatgcagaccaagacatctacgccgtggtgacctaccagctgctgggtgcccagagtggcctctttgacatcaacagcagcaccggtgtggtgaccgtgaggtcaggtgtcatcattgaccgggaggcattctcgccacccatcctggagctgctgctgctggctgaggacatcgggctgctcaacagcacggcccacctgctcatcaccatcctggatgacaatgacaaccggcccacctttagccctgccaccctcactgtccatctgctagagaactgcccgcctggattctcagtccttcaagtcacagccacagatgaggacagtggcctcaatggggagctggtctaccgaatagaagctggggctcaggaccgcttcctcattcatctggtcaccggggtcatccgtgttggtaatgccaccatcgacagagaggagcaggagtcctacaggctaacggtggtggccaccgaccggggcaccgttcctctctcgggcacagccattgtcaccattctgatcgatgacatcaatgactcccgccccgagttcctcaaccccatccagacagtgagcgtgctggagtcggctgagccaggcactgtcattgccaatatcacggccattgaccacgacctcaacccaaagctagagtaccacattgtcggcattgtggccaaggacgacactgatcgcctggtgcccaaccaggaggacgcctttgctgtgaatatcaacacaggatctgtaatggtgaagtcccccatgaatcgggagctggttgccacctatgaggtcactctctcagtgattgacaatgccagcgacctaccagagcgctctgtcagtgtgccaaatgccaagctgactgtcaacgtcctggacgtcaatgacaatacgccccagttcaagccctttgggatcacctactacatggagcggatcctggagggggccacccctgggaccacactcattgctgtggcagccgtggaccctgacaagggccttaatgggctggtcacctacaccctgctggacctggtgcccccagggtatgtccagctggaggactcctcggcagggaaggtcattgccaaccggacagtggactacgaggaggtgcactggctcaactttaccgtgagggcctcagacaacgggtccccgccccgggcagctgagatccctgtctacctggaaatcgtggacatcaatgacaacaaccccatctttgaccagccctcctaccaggaggctgtctttgaggatgtgcctgtgggcacaatcatcctgacagtcactgccactgatgctgactcaggcaactttgcactcattgagtacagccttggagatggagagagcaagtttgccatcaaccccaccacgggtgacatctatgtgctgtcttctctggaccgggagaagaaggaccactatatcctgactgccttggccaaagacaaccctggggatgtagccagcaaccgtcgcgaaaattcagtgcaggtggtgatccaagtgctggatgtcaatgactgccggccacagttctccaagccccagttcagcacaagcgtgtatgagaatgagccggcgggcacctcggtcatcaccatgatggccactgaccaggatgaaggtcccaatggagagttgacctactcacttgagggccctggcgtggaggccttccatgtggacatggactcgggcttggtgaccacacagcggccactgcagtcctacgagaagttcagtctgaccgtggtggccacagatggtggagagcccccactctggggcaccaccatgctcctggtggaggtcatcgacgtcaatgacaaccgccctgtctttgtgcgcccacccaacggcaccatcctccacatcagagaggagatcccgctgcgctccaacgtgtacgaggtctacgccacggacaaggatgagggcctcaacggggcggtgcgctacagcttcctgaagactgcgggcaaccgggactgggagttcttcatcatcgacccaatcagcggcctcatccagactgctcagcgcctggaccgcgagtcgcaggcggtgtacagcctcatcttggtggccagcgacctgggccagccagtgccatacgagactatgcagccgctgcaggtggccctggaggacatcgatgacaacgaaccccttttcgtgaggcctccaaaaggcagcccccagtaccagctgctgacagtgcctgagcactcaccacgcggcaccctcgtgggcaacgtgacaggcgcagtggatgcagatgagggccccaacgcgatcgtgtactacttcatcgcagccggcaacgaagagaagaacttccatctgcagcccgatgggtgtctgctggtgctgcgggacctggaccgggagcgagaagccatcttctccttcatcgtcaaggcctccagcaatcgcagctggacacctccccgtggaccctccccaaccctcgacctggttgctgacctcacactgcaggaggtgcgcgttgtgctagaggacatcaacgaccagccaccacgcttcaccaaggctgagtacactgcaggggtggccaccgacgccaaggtgggctcagagttgatccaggtgctggccctggatgcagacattggcaacaacagccttgtcttctacagcattctggccatccactacttccgggcccttgccaacgactctgaagatgtgggccaggtcttcaccatggggagcatggacggcattctgcgcaccttcgacctcttcatggcctacagccccggctacttcgtggtggacattgtggcccgagacctggcaggccacaacgacacggccatcatcggcatctacatcctgagggacgaccagcgcgtcaagatcgtcattaacgagatccccgaccgtgtgcgcggcttcgaggaggagttcatccacctgctctccaacatcactggggccattgtcaatactgacaatgtgcagttccatgtggacaagaagggccgggtgaactttgcgcagacagaactgcttatccacgtggtgaaccgcgataccaaccgcatcctggacgtggaccgggtgatccagatgatcgatgagaacaaggagcagctacggaatcttttccggaactacaacgtcctggacgtgcagcctgccatctctgtccggctgccggatgacatgtctgccctgcagatggcgatcatcgtcctggctatcctcctgttcctggccgccatgctctttgtcctcatgaactggtactacaggactgtacacaagaggaagctcaaggccattgtggctggctcagctgggaatcgtggcttcatcgacatcatggacatgcctaacaccaacaagtactcctttgatggagccaaccctgtgtggctggatcccttctgtcggaacctggagctggccgcccaggcggagcatgaggatgacctaccggagaacctgagtgagatcgccgacctgtggaacagccccacgcgcacccatggaacttttgggcgtgagccagcagctgtcaagcctgatgatgaccgatacctgcgggctgccatccaggagtatgacaacattgccaagctgggccagatcattcgtgaggggccaatcaagggctcgctgctgaaggtggtcctggaggattacctgcggctcaaaaagctctttgcacagcggatggtgcaaaaagcctcctcctgccactcctccatctctgagctgatacagactgagctggacgaggagccaggagaccacagcccagggcagggtagcctgcgcttccgccacaagccaccagtggagctcaaggggcccgatgggatccatgtggtgcacggcagcacgggcacgctgctggccaccgacctcaacagcctgcccgaggaagaccagaagggcctgggccgctcgctggagacgctgaccgctgccgaggccactgccttcgagcgcaacgcccgcacagaatccgccaaatccacacccctgcacaaacttcgcgacgtgatcatggagacccccctggagatcacagagctgtgactagacagggaagccttgtgggtgtgagcagcacccatccaccgtcccctcccagggagcaagggcagggacagggccggtcgggggggaccctccaaggccaggccttggggacaaccttggcttggccctggcagcccgcatcagctgctcagatcccacttttgccagacgctcattcagcatctgacctctaccttcataagatctgttatttttataagaaaaccaaacaaaaatgttaagcatctaaggacaaggtaaggagggtcactggggcccaagagtctggggaccagcttggctcaggctgagctgaaagaggccaaacaggccctcctccctcccagctccaccccgcaagcaccatcccctccggctaagcaggcgcaagggaggcccagcgcggacatcccctgctggccggacacccgactccagtccaagtctcgctacatttccgccacatccctctctgctggacgtccaggtggaggtggcatccccacgtggacaagaaagtcaatgtcaatgaacaagcattctctccatttcactggcttcccaaatgtgtgcccagcttataaacagaagtgactgatgttccctccggttttg

SEQ ID NO: 4038 - DNA, 3963 bp, Homo sapiens
  source 1..3963: mol_type = unassigned DNA
gcggcggcggctcgggagagagggacgcgggctgcaggcgcgatgcttggctagaggacgcgtccgacggcggccggacgctgaggtggtcggggctagtcagcccggcctgggcatggagcgcggggtggcagagcctctggacgtttggggcgcgcccagtccgagcccccggcgcgcctgaagttgcgagcggcgagcggcgagcggcgagcggcccgcggagacccaggagctgccggcacgccgcggatgagccttcgcgccggcgggaagacgcggcggtggccagggccagagcaggcggcccgcgggggccgatccggcggagagcagagcccgaggcgaggcgaggcgcggcgccgctgcacacacgcacacggagccatggggcgccatgttgccaccagctgccacgtggcctggcttttggtgctgatctctggatgctggggccaggtgaaccggctgcccttcttcaccaaccacttctttgatacatacctgctgatcagcgaggacacgcctgtgggttcttctgtgacccagttgctggcccaagacatggacaatgaccccctggtgtttggcgtgtctggggaggaggcctctcgcttctttgcagtggagcctgacactggcgtggtgtggctccggcagccactggacagagagaccaagtcagagttcaccgtggagttctctgtcagcgaccaccagggggtgatcacacggaaggtgaacatccaggttggggatgtgaatgacaacgcgcccacatttcacaatcagccctacagcgtccgcatccctgaggtaggagccactgggaatacaccagtggggacgcccatcttcatcgtgaatgccacagaccccgacttgggggcagggggcagcgtcctctactccttccagcccccctcccaattcttcgccattgacagcgcccgcggtatcgtcacagtgatccgggagctggactacgagaccacacaggcctaccagctcacggtcaacgccacagatcaagacaagaccaggcctctgtccaccctggccaacttggccatcatcatcacagatgtccaggacatggaccccatcttcatcaacctgccttacagcaccaacatctacgagcattctcctccgggcacgacggtgcgcatcatcaccgccatagaccaggataaaggacgtccccggggcattggctacaccatcgtttcagggaataccaacagcatctttgccctggactacatcagcggagtgctgaccttgaatggcctgctggaccgggagaaccccctgtacagccatggcttcatcctgactgtgaagggcacggagctgaacgatgaccgcaccccatctgacgctacagtcaccacgaccttcaatatcctggttattgacatcaatgacaatgccccggagttcaacagctccgagtacagcgtggccatcactgagctggcacaggtcggctttgcccttccactcttcatccaggtggtggacaaggatgagggcctgaacagcatgtttgaggtgtacttggtggggaacaactcccaccacttcatcatctccccgacctccgtccaggggaaggcggacattcgtattcgggtggccatcccactggactacgagaccgtggaccgctacgactttgatctctttgccaatgagagtgtgcctgaccatgtgggctatgccaaggtgaagatcactctcatcaatgaaaatgacaaccggcccatcttcagccagccactgtacaacatcagcctgtacgagaacgtcaccgtggggacctctgtgctgacagtcctggcaactgacaatgatgcaggcacctttggggaagtcagctacttcttcagtgatgaccctgacaggttctcgctggacaaggacacgggactcatcatgctgattgccaggctggactatgagctcatccagcgcttcaccctgacgatcattgcccgggacgggggcggcgaggagaccacaggccgggtcaggatcaatgtgttggatgtcaacgacaacgtgcccaccttccagaaggatgcctacgtgggtgctctgcgggagaacgagccttctgtcacacagctggtgcggctccgggcaacagatgaagactcccctcccaacaaccagatcacctacagcattgtcagtgcatctgcctttggcagctacttcgacatcagcctgtacgagggctatggagtgatcagcgtcagtcgccccctggattatgaacagatatccaatgggctgatttatctgacggtcatggccatggatgctggcaacccccctctcaacagcaccgtccctgtcaccatcgaggtgtttgatgagaatgacaaccctcccaccttcagcaagcccgcctacttcgtctccgtggtggagaacatcatggcaggagccacggtgctgttcctgaatgccacagacctggaccgctcccgggagtacggccaggagtccatcatctactccttggaaggctccacccagtttcggatcaatgcccgctcaggggaaatcaccaccacgtctctgcttgaccgagagaccaagtctgaatacatcctcatcgttcgcgcagtggacgggggtgtgggccacaaccagaaaactggcatcgccaccgtaaacatcaccctcctggacatcaatgacaaccaccccacgtggaaggacgcaccctactacatcaacctggtggagatgacccctccagactctgatgtgaccacggtggtggctgttgacccagacctgggggagaatggcaccctggtgtacagcatccagccacccaacaagttctacagcctcaacagcaccacgggcaagatccgcaccacccacgccatgctggaccgggagaaccccgacccccatgaggccgagctgatgcgcaaaatcgtcgtctctgttactgactgtggcaggccccctctgaaagccaccagcagtgccacagtgtttgtgaacctcttggatctcaatgacaatgaccccacctttcagaacctgccttttgtggccgaggtgcttgaaggcatcccggcgggggtctccatctaccaagtggtggccatcgacctcgatgagggcctgaacggcctggtgtcctaccgcatgccggtgggcatgccccgcatggacttcctcatcaacagcagcagcggcgtggtggtcaccaccaccgagctggaccgcgagcgcatcgcggagtaccagctgcgggtggtggccagtgatgcaggcacgcccaccaagagctccaccagcacgctcaccatccatgtgctggatgtgaacgacgagacgcccaccttcttcccggccgtgtacaatgtgtctgtgtccgaggacgtgccacgcgagttccgggtggtctggctgaactgcacggacaacgacgtgggcctcaatgcagagctcagctacttcatcacaggtgctgccccggcctccgcccacctgtgcaggcctcctggggccctgcctccacccctcccagatggacagccagactaggtgggggcaggtgagggtggaaaagaggtcagggctctactgttgggctttagcctctggtggtgcctcccgaggatttgctcctggctcttcccaagggctttgcagctggatcactctggactggctccctggggacctcctgaacctgttggttgcagggacggggagcatctaccaaggttcattctagagggaggtaaggccccatgattcctagggaggagccctgagccccactccccgccccaagtctgggtgacagagcagtgacttggaggaatgtggcctcatccttccttggggacctgttgagaattcccacctgtttagaggcagatggttttgatctccctaaatgaaatggttttagctcaaaaa

SEQ ID NO: 4039 - DNA, 4329 bp, Homo sapiens
  source 1..4329: mol_type = unassigned DNA
ccctgctgcaccctgaactaactgatgttaaccctcttctctcttcctcatggctggcaggcccacaggtttgagctctgtttctctgtcacttcccacctcatctcttctctgcctcaccccattgccttcctccatgcccaccacacccccaccacccttcctgtcctgtggggcctgggccaaggccgtggcccagcctttgcagactgaatgcagccgccctctccccatcctcgctccccagcctgggggacagggagcgagagtaggaagaggaggaggaggaggaggaggaggcggcccagggatctgtaatggtgaagtcccccatgaatcgggagctggttgccacctatgaggtcactctctcagtgattgacaatgccagcgacctaccagagcgctctgtcagtgtgccaaatgccaagctgactgtcaacgtcctggacgtcaatgacaatacgccccagttcaagccctttgggatcacctactacatggagcggatcctggagggggccacccctgggaccacactcattgctgtggcagccgtggaccctgacaagggccttaatgggctggtcacctacaccctgctggacctggtgcccccagggtatgtccagctggaggactcctcggcagggaaggtcattgccaaccggacagtggactacgaggaggtgcactggctcaactttaccgtgagggcctcagacaacgggtccccgccccgggcagctgagatccctgtctacctggaaatcgtggacatcaatgacaacaaccccatctttgaccagccctcctaccaggaggctgtctttgaggatgtgcctgtgggcacaatcatcctgacagtcactgccactgatgctgactcaggcaactttgcactcattgagtacagccttggagatggagagagcaagtttgccatcaaccccaccacgggtgacatctatgtgctgtcttctctggaccgggagaagaaggaccactatatcctgactgccttggccaaagacaaccctggggatgtagccagcaaccgtcgcgaaaattcagtgcaggtggtgatccaagtgctggatgtcaatgactgccggccacagttctccaagccccagttcagcacaagcgtgtatgagaatgagccggcgggcacctcggtcatcaccatgatggccactgaccaggatgaaggtcccaatggagagttgacctactcacttgagggccctggcgtggaggccttccatgtggacatggactcgggcttggtgaccacacagcggccactgcagtcctacgagaagttcagtctgaccgtggtggccacagatggtggagagcccccactctggggcaccaccatgctcctggtggaggtcatcgacgtcaatgacaaccgccctgtctttgtgcgcccacccaacggcaccatcctccacatcagagaggagatcccgctgcgctccaacgtgtacgaggtctacgccacggacaaggatgagggcctcaacggggcggtgcgctacagcttcctgaagactgcgggcaaccgggactgggagttcttcatcatcgacccaatcagcggcctcatccagactgctcagcgcctggaccgcgagtcgcaggcggtgtacagcctcatcttggtggccagcgacctgggccagccagtgccatacgagactatgcagccgctgcaggtggccctggaggacatcgatgacaacgaaccccttttcgtgaggcctccaaaaggcagcccccagtaccagctgctgacagtgcctgagcactcaccacgcggcaccctcgtgggcaacgtgacaggcgcagtggatgcagatgagggccccaacgcgatcgtgtactacttcatcgcagccggcaacgaagagaagaacttccatctgcagcccgatgggtgtctgctggtgctgcgggacctggaccgggagcgagaagccatcttctccttcatcgtcaaggcctccagcaatcgcagctggacacctccccgtggaccctccccaaccctcgacctggttgctgacctcacactgcaggaggtgcgcgttgtgctagaggacatcaacgaccagccaccacgcttcaccaaggctgagtacactgcaggggtggccaccgacgccaaggtgggctcagagttgatccaggtgctggccctggatgcagacattggcaacaacagccttgtcttctacagcattctggccatccactacttccgggcccttgccaacgactctgaagatgtgggccaggtcttcaccatggggagcatggacggcattctgcgcaccttcgacctcttcatggcctacagccccggctacttcgtggtggacattgtggcccgagacctggcaggccacaacgacacggccatcatcggcatctacatcctgagggacgaccagcgcgtcaagatcgtcattaacgagatccccgaccgtgtgcgcggcttcgaggaggagttcatccacctgctctccaacatcactggggccattgtcaatactgacaatgtgcagttccatgtggacaagaagggccgggtgaactttgcgcagacagaactgcttatccacgtggtgaaccgcgataccaaccgcatcctggacgtggaccgggtgatccagatgatcgatgagaacaaggagcagctacggaatcttttccggaactacaacgtcctggacgtgcagcctgccatctctgtccggctgccggatgacatgtctgccctgcagatggcgatcatcgtcctggctatcctcctgttcctggccgccatgctctttgtcctcatgaactggtactacaggactgtacacaagaggaagctcaaggccattgtggctggctcagctgggaatcgtggcttcatcgacatcatggacatgcctaacaccaacaagtactcctttgatggagccaaccctgtgtggctggatcccttctgtcggaacctggagctggccgcccaggcggagcatgaggatgacctaccggagaacctgagtgagatcgccgacctgtggaacagccccacgcgcacccatggaacttttgggcgtgagccagcagctgtcaagcctgatgatgaccgatacctgcgggctgccatccaggagtatgacaacattgccaagctgggccagatcattcgtgaggggccaatcaagggctcgctgctgaaggtggtcctggaggattacctgcggctcaaaaagctctttgcacagcggatggtgcaaaaagcctcctcctgccactcctccatctctgagctgatacagactgagctggacgaggagccaggagaccacagcccagggcagggtagcctgcgcttccgccacaagccaccagtggagctcaaggggcccgatgggatccatgtggtgcacggcagcacgggcacgctgctggccaccgacctcaacagcctgcccgaggaagaccagaagggcctgggccgctcgctggagacgctgaccgctgccgaggccactgccttcgagcgcaacgcccgcacagaatccgccaaatccacacccctgcacaaacttcgcgacgtgatcatggagacccccctggagatcacagagctgtgactagacagggaagccttgtgggtgtgagcagcacccatccaccgtcccctcccagggagcaagggcagggacagggccggtcgggggggaccctccaaggccaggccttggggacaaccttggcttggccctggcagcccgcatcagctgctcagatcccacttttgccagacgctcattcagcatctgacctctaccttcataagatctgttatttttataagaaaaccaaacaaaaatgttaagcatctaaggacaaggtaaggagggtcactggggcccaagagtctggggaccagcttggctcaggctgagctgaaagaggccaaacaggccctcctccctcccagctccaccccgcaagcaccatcccctccggctaagcaggcgcaagggaggcccagcgcggacatcccctgctggccggacacccgactccagtccaagtctcgctacatttccgccacatccctctctgctggacgtccaggtggaggtggcatccccacgtggacaagaaagtcaatgtcaatgaacaagcattctctccatttcactggcttcccaaatgtgtgcccagcttataaacagaagtgactgatgttccctccggttttgaatgtggagtgtttgtgtgtgttccttttttaaattaagttattccctc

SEQ ID NO: 4040 - DNA, 1649 bp, Homo sapiens
  source 1..1649: mol_type = unassigned DNA
acaggaagtgtgcccctctctcaggcagctgctaacacctgtcttccttcaactcccacagacaacggccctgtagggaagcgacacacgggcacagccaccgtgttcgtcactgtcctggatgtgaatgacaaccggcccatctttctgcagagcagctatgaggccagcgtccctgaggacatccctgaaggccacagcatcttgcagctgaaagccacggacgcagatgagggcgagtttgggcgtgtgtggtaccgcatcctccatggtgattgtgtacgtggaggacatcaacgatgaggcccccgtgttcacacagcagcagtacagccgtctggggcttcgagagaccgcaggcattggaacgtcagtcatcgtggtccaagccacagaccgagactctggggatggtggcctggtgaactaccgcatcctgtcgggcgcagaggggaagtttgagattgacgagagcacagggcttatcatcaccgtgaattacctggactacgagaccaagaccagctacatgatgaatgtgtcggccactgaccaggccccgcccttcaaccagggcttctgcagcgtctacatcactctgctcaacgagctggacgaggccgtgcagttctccaatgcctcatacgaggctgccatcctggagaatctggcactgggtactgagattgtgcgggtccaggcctactccatcgacaacctcaaccaaatcacgtaccgcttcaacgcctacaccagcacccaggccaaagccctcttcaagatagacgccatcacgggtgtgatcacagtccagggcctggtggaccgtgagaagggcgacttctataccttgacagtggtggcagatgacggcggccccaaggtggactccaccgtggtctacatcactgtgctggacgagaatgacaacagcccccggtttgacttcacctccgactcggcggtcagcatacccgaggactgccctgtgggccagcgagtggctactgtcaaggcctgggaccctgatgctggcagcaatgggcaggtggtcttctccctggcctctggcaacatcgcgggggcctttgagatcgtcaccaccaatgactccattggcgaagtgtttgtggccaggcccctggacagagaagagctggatcactacatcctccaggttgtggcttctgaccgaggcacccctccacggaagaaggaccacatcctgcaggtgaccatcctggacatcaatgacaaccctccagtcatcgagagcccctttggatacaatgtcagtgtgaatgagaacgtgggtggaggtactgctgtggtccaggtgagagccactgaccgtgacatcgggatcaacagtgttctgtcctactacatcaccgagggcaacaaggacatggccttccgcatggaccgcatcagcggtgagatcgccacacggcctgccccgcctgaccgcgagcgccagagcttctaccacctggtggccactgtggaggacgagggcaccccaaccctgtcggtgagcgatgggggtggccacagggaggagcgggtgggccagggcagctccgcctccgagtgaggggaacaagatgggtgagaatggaattccacacagcaggcgaatccttgac

SEQ ID NO: 4041 - DNA, 2684 bp, Homo sapiens
  source 1..2684: mol_type = unassigned DNA
gcggcggcggcggctcgggagagagggacgcgggctgcaggcgcgatgcttggctagaggacgcgtccgacggcggccggacgctgaggtggtcggggctagtcagcccggcctgggcatggagcgcggggtggcagagcctctggacgtttggggcgcgcccagtccgagcccccggcgcgcctgaagttgcgagcggcgagcggcgagcggcgagcggcccgcggagacccaggagctgccggcacgccgcggatgagccttcgcgccggcgggaagacgcggcggtggccagggccagagcaggcggcccgcgggggccgatccggcggagagcagagcccgaggcgaggcgaggcgcggcgccgctgcacacacgcacacggagccatggggcgccatgttgccaccagctgccacgtggcctggcttttggtgctgatctctggatgctggggccaggtgaaccggctgcccttcttcaccaaccacttctttgatacatacctgctgatcagcgaggacacgcctgtgggttcttctgtgacccagttgctggcccaagacatggacaatgaccccctggtgtttggcgtgtctggggaggaggcctctcgcttctttgcagtggagcctgacactggcgtggtgtggctccggcagccactggacagagagaccaagtcagagttcaccgtggagttctctgtcagcgaccaccagggggtgatcacacggaaggtgaacatccaggttggggatgtgaatgacaacgcgcccacatttcacaatcagccctacagcgtccgcatccctgagaatacaccagtggggacgcccatcttcatcgtgaatgccacagaccccgacttgggggcagggggcagcgtcctctactccttccagcccccctcccaattcttcgccattgacagcgcccgcggtatcgtcacagtgatccgggagctggactacgagaccacacaggcctaccagctcacggtcaacgccacagatcaagacaagaccaggcctctgtccaccctggccaacttggccatcatcatcacagatgtccaggacatggaccccatcttcatcaacctgccttacagcaccaacatctacgagcattctcctccgggcacgacggtgcgcatcatcaccgccatagaccaggataaaggacgtccccggggcattggctacaccatcgtttcagggaataccaacagcatctttgccctggactacatcagcggagtgctgaccttgaatggcctgctggaccgggagaaccccctgtacagccatggcttcatcctgactgtgaagggcacggagctgaacgatgaccgcaccccatctgacgctacagtcaccacgaccttcaatatcctggttattgacatcaatgacaatgccccggagttcaacagctccgagtacagcgtggccatcactgagctggcacaggtcggctttgcccttccactcttcatccaggtggtggacaaggatgagaatttgggcctgaacagcatgtttgaggtgtacttggtggggaacaactcccaccacttcatcatctccccgacctccgtccaggggaaggcggacattcgtattcgggtggccatcccactggactacgagaccgtggaccgctacgactttgatctctttgccaatgagagtgtgcctgaccatgtgggctatgccaaggtgaagatcactctcatcaatgaaaatgacaaccggcccatcttcagccagccactgtacaacatcagcctgtacgagaacgtcaccgtggggacctctgtgctgacagtcctggtgagtccccgcttcactgcagggccactgagctctccagggccgactgtggtgaggcacccagagggattttgtccaagggacctcagcaatcagggaaggaggcacccccaaatccctgagctgtgtttgttggtgtattaaataaagtttttggactcttcaggaaggggctcccttgacctaggttgcaatatggaaaaggagccaacctgaggggtgacgagactgagctgaggacactggttttctgcctttccccgagagagactcagtgagggtgggctgggagccctggaagccccctcaaatgggtgggaaggtgccagccatccttgagaagggcaaccctctccatgtgagcacaggcaccagagaggggcaggcgcctggagggtaccggggcacccccagctgcccatggctggacttgccctttgacaaggggccctcccagtgtcatttgtatctgtcagtactcttggttgcaagggacagaaacccttaagtagttcaagcaaaaaaggattggctcatgtaactcaaaagtataagtgatttcaggccgggctcggtggctcacgcctgtcatccaacaccttgagaaagccgaggtgggcggatcacttgaggtcgggagtttgagaccagcctggccaacatggcaaaaccccgtctctactaaaaatacaaaaattagccgggtgtggtggcacacgcctgtagtcccagctactagggaggctgaggcaggagaatcgcttgaacccaggaggcggaggttgcagtgagccgagattgtgtcactgccctccagcctgggcgacagagccagattctgtctc

SEQ ID NO: 4042 - DNA, 4029 bp, Homo sapiens
  source 1..4029: mol_type = unassigned DNA
gcggcggcggcggctcgggagagagggacgcgggctgcaggcgcgatgcttggctagaggacgcgtccgacggcggccggacgctgaggtggtcggggctagtcagcccggcctgggcatggagcgcggggtggcagagcctctggacgtttggggcgcgcccagtccgagcccccggcgcgcctgaagttgcgagcggcgagcggcgagcggcgagcggcccgcggagacccaggagctgccggcacgccgcggatgagccttcgcgccggcgggaagacgcggcggtggccagggccagagcaggcggcccgcgggggccgatccggcggagagcagagcccgaggcgaggcgaggcgcggcgccgctgcacacacgcacacggagccatggggcgccatgttgccaccagctgccacgtggcctggcttttggtgctgatctctggatgctggggccaggtgaaccggctgcccttcttcaccaaccacttctttgatacatacctgctgatcagcgaggacacgcctgtgggttcttctgtgacccagttgctggcccaagacatggacaatgaccccctggtgtttggcgtgtctggggaggaggcctctcgcttctttgcagtggagcctgacactggcgtggtgtggctccggcagccactggacagagagaccaagtcagagttcaccgtggagttctctgtcagcgaccaccagggggtgatcacacggaaggtgaacatccaggttggggatgtgaatgacaacgcgcccacatttcacaatcagccctacagcgtccgcatccctgagaatacaccagtggggacgcccatcttcatcgtgaatgccacagaccccgacttgggggcagggggcagcgtcctctactccttccagcccccctcccaattcttcgccattgacagcgcccgcggtatcgtcacagtgatccgggagctggactacgagaccacacaggcctaccagctcacggtcaacgccacagatcaagacaagaccaggcctctgtccaccctggccaacttggccatcatcatcacagatgtccaggacatggaccccatcttcatcaacctgccttacagcaccaacatctacgagcattctcctccgggcacgacggtgcgcatcatcaccgccatagaccaggataaaggacgtccccggggcattggctacaccatcgtttcagggaataccaacagcatctttgccctggactacatcagcggagtgctgaccttgaatggcctgctggaccgggagaaccccctgtacagccatggcttcatcctgactgtgaagggcacggagctgaacgatgaccgcaccccatctgacgctacagtcaccacgaccttcaatatcctggttattgacatcaatgacaatgccccggagttcaacagctccgagtacagcgtggccatcactgagctggcacaggtcggctttgcccttccactcttcatccaggtggtggacaaggatgagacccagggcctgaacagcatgtttgaggtgtacttggtggggaacaactcccaccacttcatcatctccccgacctccgtccaggggaaggcggacattcgtattcgggtggccatcccactggactacgagaccgtggaccgctacgactttgatctctttgccaatgagagtgtgcctgaccatgtgggctatgccaaggtgaagatcactctcatcaatgaaaatgacaaccggcccatcttcagccagccactgtacaacatcagcctgtacgagaacgtcaccgtggggacctctgtgctgacagtcctggcaactgacaatgatgcaggcacctttggggaagtcagctacttcttcagtgatgaccctgacaggttctcgctggacaaggacacgggactcatcatgctgattgccaggctggactatgagctcatccagcgcttcaccctgacgatcattgcccgggacgggggcggcgaggagaccacaggccgggtcaggatcaatgtgttggatgtcaacgacaacgtgcccaccttccagaaggatgcctacgtgggtgctctgcgggagaacgagccttctgtcacacagctggtgcggctccgggcaacagatgaagactcccctcccaacaaccagatcacctacagcattgtcagtgcatctgcctttggcagctacttcgacatcagcctgtacgagggctatggagtgatcagcgtcagtcgccccctggattatgaacagatatccaatgggctgatttatctgacggtcatggccatggatgctggcaacccccctctcaacagcaccgtccctgtcaccatcgaggtgtttgatgagaatgacaaccctcccaccttcagcaagcccgcctacttcgtctccgtggtggagaacatcatggcaggagccacggtgctgttcctgaatgccacagacctggaccgctcccgggagtacggccaggagtccatcatctactccttggaaggctccacccagtttcggatcaatgcccgctcaggggaaatcaccaccacgtctctgcttgaccgagagaccaagtctgaatacatcctcatcgttcgcgcagtggacgggggtgtgggccacaaccagaaaactggcatcgccaccgtaaacatcaccctcctggacatcaatgacaaccaccccacgtggaaggacgcaccctactacatcaacctggtggagatgacccctccagactctgatgtgaccacggtggtggctgttgacccagacctgggggagaatggcaccctggtgtacagcatccagccacccaacaagttctacagcctcaacagcaccacgggcaagatccgcaccacccacgccatgctggaccgggagaaccccgacccccatgaggccgagctgatgcgcaaaatcgtcgtctctgttactgactgtggcaggccccctctgaaagccaccagcagtgccacagtgtttgtgaacctcttggatctcaatgacaatgaccccacctttcagaacctgccttttgtggccgaggtgcttgaaggcatcccggcgggggtctccatctaccaagtggtggccatcgacctcgatgagggcctgaacggcctggtgtcctaccgcatgccggtgggcatgccccgcatggacttcctcatcaacagcagcagcggcgtggtggtcaccaccaccgagctggaccgcgagcgcatcgcggagtaccagctgcgggtggtggccagtgatgcaggcacgcccaccaagagctccaccagcacgctcaccatccatgtgctggatgtgaacgacgagacgcccaccttcttcccggccgtgtacaatgtgtctgtgtccgaggacgtgccacgcgagttccgggtggtctggctgaactgcacggacaacgacgtgggcctcaatgcagagctcagctacttcatcacaggtggcaacgtggatgggaagttcagcgtgggttaccgcgatgccgttgtgagaaccgtggtgggcctggaccgggagaccacagccgcctacatgctcatcctggaggccatcgacaacggccctgtagggaagcgacacacgggcacagccaccgtgttcgtcactgtcctggatgtgaatgacaaccggcccatctttctgcagagcagctatgaggccagcgtccctgaggacatccctgaaggccacagcatcttgcaggaggaagacttggcctccccctgcatatctcccgccccacccagaagggcctttcagagtagcggggagaaagagacgtcacaatttcccggaaaggagttgagaagagagccagggcccagcaaggcccagaacagagctgctttcacagagcccttggccgaggctcccctcttgggaagtaaacaggcacaagaagaaagggctcctttgcccagggagcaggcgcaacagctccaaggctcagagggagagaagggaggaccctga

SEQ ID NO: 4043 - DNA, 1983 bp, Homo sapiens
  source 1..1983: mol_type = unassigned DNA
gcggcggcggcggctcgggagagagggacgcgggctgcaggcgcgatgcttggctagaggacgcgtccgacggcggccggacgctgaggtggtcggggctagtcagcccggcctgggcatggagcgcggggtggcagagcctctggacgtttggggcgcgcccagtccgagcccccggcgcgcctgaagttgcgagcggcgagcggcgagcggcgagcggcccgcggagacccaggagctgccggcacgccgcggatgagccttcgcgccggcgggaagacgcggcggtggccagggccagagcaggcggcccgcgggggccgatccggcggagagcagagcccgaggcgaggcgaggcgcggcgccgctgcacacacgcacacggagccatggggcgccatgttgccaccagctgccacgtggcctggcttttggtgctgatctctggatgctggggccaggtgaaccggctgcccttcttcaccaaccacttctttgatacatacctgctgatcagcgaggacacgcctgtgggttcttctgtgacccagttgctggcccaagacatggacaatgaccccctggtgtttggcgtgtctggggaggaggcctctcgcttctttgcagtggagcctgacactggcgtggtgtggctccggcagccactggacagagagaccaagtcagagttcaccgtggagttctctgtcagcgaccaccagggggtgatcacacggaaggtgaacatccaggttggggatgtgaatgacaacgcgcccacatttcacaatcagccctacagcgtccgcatccctgagaatacaccagtggggacgcccatcttcatcgtgaatgccacagaccccgacttgggggcagggggcagcgtcctctactccttccagcccccctcccaattcttcgccattgacagcgcccgcggtatcgtcacagtgatccgggagctggactacgagaccacacaggcctaccagctcacggtcaacgccacagatcaagacaagaccaggcctctgtccaccctggccaacttggccatcatcatcacagatgtccaggacatggaccccatcttcatcaacctgccttacagcaccaacatctacgagcattctcctccgggcacgacggtgcgcatcatcaccgccatagaccaggataaaggacgtccccggggcattggctacaccatcgtttcagggaataccaacagcatctttgccctggactacatcagcggagtgctgaccttgaatggcctgctggaccgggagaaccccctgtacagccatggcttcatcctgactgtgaagggcacggagctgaacgatgaccgcaccccatctgacgctacagtcaccacgaccttcaatatcctggttattgacatcaatgacaatgccccggagttcaacagctccgagtacagcgtggccatcactgagctggcacaggtcggctttgcccttccactcttcatccaggtggtggacaaggatgagacatggggcctgaacagcatgtttgaggtgtacttggtggggaacaactcccaccacttcatcatctccccgacctccgtccaggggaaggcggacattcgtattcgggtggccatcccactggactacgagaccgtggaccgctacgactttgatctctttgccaatgagagtgtgcctgaccatgtgggctatgccaaggtgaagatcactctcatcaatgaaaatgacaaccggcccatcttcagccagccactgtacaacatcagcctgtacgagaacgtcaccgtggggacctctgtgctgacagtcctggtgagtccccgcttcactgcagggccactgagctctccagggccgactgtggtgaggcacccagagggattttgtccaagggacctcagcaatcagggaaggaggcacccccaaatccctgagctgtgtttgttggtgtattaa

SEQ ID NO: 4044 - DNA, 11017 bp, Homo sapiens
  source 1..11017: mol_type = unassigned DNA
gcggcggcggcggctcgggagagagggacgcgggctgcaggcgcgatgcttggctagaggacgcgtccgacggcggccggacgctgaggtggtcggggctagtcagcccggcctgggcatggagcgcggggtggcagagcctctggacgtttggggcgcgcccagtccgagcccccggcgcgcctgaagttgcgagcggcgagcggcgagcggcgagcggcccgcggagacccaggagctgccggcacgccgcggatgagccttcgcgccggcgggaagacgcggcggtggccagggccagagcaggcggcccgcgggggccgatccggcggagagcagagcccgaggcgaggcgaggcgcggcgccgctgcacacacgcacacggagccatggggcgccatgttgccaccagctgccacgtggcctggcttttggtgctgatctctggatgctggggccaggtgaaccggctgcccttcttcaccaaccacttctttgatacatacctgctgatcagcgaggacacgcctgtgggttcttctgtgacccagttgctggcccaagacatggacaatgaccccctggtgtttggcgtgtctggggaggaggcctctcgcttctttgcagtggagcctgacactggcgtggtgtggctccggcagccactggacagagagaccaagtcagagttcaccgtggagttctctgtcagcgaccaccagggggtgatcacacggaaggtgaacatccaggttggggatgtgaatgacaacgcgcccacatttcacaatcagccctacagcgtccgcatccctgagaatacaccagtggggacgcccatcttcatcgtgaatgccacagaccccgacttgggggcagggggcagcgtcctctactccttccagcccccctcccaattcttcgccattgacagcgcccgcggtatcgtcacagtgatccgggagctggactacgagaccacacaggcctaccagctcacggtcaacgccacagatcaagacaagaccaggcctctgtccaccctggccaacttggccatcatcatcacagatgtccaggacatggaccccatcttcatcaacctgccttacagcaccaacatctacgagcattctcctccgggcacgacggtgcgcatcatcaccgccatagaccaggataaaggacgtccccggggcattggctacaccatcgtttcagggaataccaacagcatctttgccctggactacatcagcggagtgctgaccttgaatggcctgctggaccgggagaaccccctgtacagccatggcttcatcctgactgtgaagggcacggagctgaacgatgaccgcaccccatctgacgctacagtcaccacgaccttcaatatcctggttattgacatcaatgacaatgccccggagttcaacagctccgagtacagcgtggccatcactgagctggcacaggtcggctttgcccttccactcttcatccaggtggtggacaaggatgagacccagggcctgaacagcatgtttgaggtgtacttggtggggaacaactcccaccacttcatcatctccccgacctccgtccaggggaaggcggacattcgtattcgggtggccatcccactggactacgagaccgtggaccgctacgactttgatctctttgccaatgagagtgtgcctgaccatgtgggctatgccaaggtgaagatcactctcatcaatgaaaatgacaaccggcccatcttcagccagccactgtacaacatcagcctgtacgagaacgtcaccgtggggacctctgtgctgacagtcctggcaactgacaatgatgcaggcacctttggggaagtcagctacttcttcagtgatgaccctgacaggttctcgctggacaaggacacgggactcatcatgctgattgccaggctggactatgagctcatccagcgcttcaccctgacgatcattgcccgggacgggggcggcgaggagaccacaggccgggtcaggatcaatgtgttggatgtcaacgacaacgtgcccaccttccagaaggatgcctacgtgggtgctctgcgggagaacgagccttctgtcacacagctggtgcggctccgggcaacagatgaagactcccctcccaacaaccagatcacctacagcattgtcagtgcatctgcctttggcagctacttcgacatcagcctgtacgagggctatggagtgatcagcgtcagtcgccccctggattatgaacagatatccaatgggctgatttatctgacggtcatggccatggatgctggcaacccccctctcaacagcaccgtccctgtcaccatcgaggtgtttgatgagaatgacaaccctcccaccttcagcaagcccgcctacttcgtctccgtggtggagaacatcatggcaggagccacggtgctgttcctgaatgccacagacctggaccgctcccgggagtacggccaggagtccatcatctactccttggaaggctccacccagtttcggatcaatgcccgctcaggggaaatcaccaccacgtctctgcttgaccgagagaccaagtctgaatacatcctcatcgttcgcgcagtggacgggggtgtgggccacaaccagaaaactggcatcgccaccgtaaacatcaccctcctggacatcaatgacaaccaccccacgtggaaggacgcaccctactacatcaacctggtggagatgacccctccagactctgatgtgaccacggtggtggctgttgacccagacctgggggagaatggcaccctggtgtacagcatccagccacccaacaagttctacagcctcaacagcaccacgggcaagatccgcaccacccacgccatgctggaccgggagaaccccgacccccatgaggccgagctgatgcgcaaaatcgtcgtctctgttactgactgtggcaggccccctctgaaagccaccagcagtgccacagtgtttgtgaacctcttggatctcaatgacaatgaccccacctttcagaacctgccttttgtggccgaggtgcttgaaggcatcccggcgggggtctccatctaccaagtggtggccatcgacctcgatgagggcctgaacggcctggtgtcctaccgcatgccggtgggcatgccccgcatggacttcctcatcaacagcagcagcggcgtggtggtcaccaccaccgagctggaccgcgagcgcatcgcggagtaccagctgcgggtggtggccagtgatgcaggcacgcccaccaagagctccaccagcacgctcaccatccatgtgctggatgtgaacgacgagacgcccaccttcttcccggccgtgtacaatgtgtctgtgtccgaggacgtgccacgcgagttccgggtggtctggctgaactgcacggacaacgacgtgggcctcaatgcagagctcagctacttcatcacaggtggcaacgtggatgggaagttcagcgtgggttaccgcgatgccgttgtgagaaccgtggtgggcctggaccgggagaccacagccgcctacatgctcatcctggaggccatcgacaacggccctgtagggaagcgacacacgggcacagccaccgtgttcgtcactgtcctggatgtgaatgacaaccggcccatctttctgcagagcagctatgaggccagcgtccctgaggacatccctgaaggccacagcatcttgcagctgaaagccacggacgcagatgagggcgagtttgggcgtgtgtggtaccgcatcctccatggtaaccatggcaacaacttccggatccatgtcagcaatgggctcctgatgcgagggccccggcccctggaccgggagcggaactcatcccacgtgctgatagtggaggcctacaaccacgacctgggccccatgcggagctccgtcagggtgattgtgtacgtggaggacatcaacgatgaggcccccgtgttcacacagcagcagtacagccgtctggggcttcgagagaccgcaggcattggaacgtcagtcatcgtggtccaagccacagaccgagactctggggatggtggcctggtgaactaccgcatcctgtcgggcgcagaggggaagtttgagattgacgagagcacagggcttatcatcaccgtgaattacctggactacgagaccaagaccagctacatgatgaatgtgtcggccactgaccaggccccgcccttcaaccagggcttctgcagcgtctacatcactctgctcaacgagctggacgaggccgtgcagttctccaatgcctcatacgaggctgccatcctggagaatctggcactgggtactgagattgtgcgggtccaggcctactccatcgacaacctcaaccaaatcacgtaccgcttcaacgcctacaccagcacccaggccaaagccctcttcaagatagacgccatcacgggtgtgatcacagtccagggcctggtggaccgtgagaagggcgacttctataccttgacagtggtggcagatgacggcggccccaaggtggactccaccgtgcaggtctacatcactgtgctggacgagaatgacaacagcccccggtttgacttcacctccgactcggcggtcagcatacccgaggactgccctgtgggccagcgagtggctactgtcaaggcctgggaccctgatgctggcagcaatgggcaggtggtcttctccctggcctctggcaacatcgcgggggcctttgagatcgtcaccaccaatgactccattggcgaagtgtttgtggccaggcccctggacagagaagagctggatcactacatcctccaggttgtggcttctgaccgaggcacccctccacggaagaaggaccacatcctgcaggtgaccatcctggacatcaatgacaaccctccagtcatcgagagcccctttggatacaatgtcagtgtgaatgagaacgtgggtggaggtactgctgtggtccaggtgagagccactgaccgtgacatcgggatcaacagtgttctgtcctactacatcaccgagggcaacaaggacatggccttccgcatggaccgcatcagcggtgagatcgccacacggcctgccccgcctgaccgcgagcgccagagcttctaccacctggtggccactgtggaggacgagggcaccccaaccctgtcggccaccacgcacgtgtacgtgaccattgtggatgagaatgataacgcgcccatgttccagcagccccactatgaggtgctgctggatgagggcccagacacgctcaacaccagcctcatcaccatccaggcactggacctggatgagggtcccaacggcacagtcacctatgccatcgtcgcaggcaacatcgtcaacaccttccgcatcgacagacacatgggtgtcatcactgctgccaaagagctggactacgagatcagccacggccgctacaccctgatcgtcactgccacagaccagtgccccatcttatcccaccgcctcacctctaccaccacggtgcttgtgaatgtgaatgacatcaacgacaatgtgcctaccttcccccgggactatgagggaccatttgaagtcactgagggccagccggggcccagagtgtggaccttcctggcccatgaccgagactcaggacccaacgggcaggtggagtacagcatcatggatggagaccctctgggggagtttgtgatctctcctgtggagggggtgctaagggtccggaaggacgtggagctggaccgggagaccatcgccttctacaacctgaccatctgtgcccgtgaccgggggatgcccccactcagctccacaatgctggtggggatccgggtgctggacatcaacgacaacgaccctgtgctgctgaacctgcccatgaacatcaccatcagcgagaacagccctgtctccagctttgtcgcccatgtcctggccagtgacgctgacagtggctgcaatgcacgcctcaccttcaacatcactgcgggcaaccgcgagcgggccttcttcatcaatgccacgacagggatcgtcactgtgaaccggcccctggaccgcgagcggatcccagagtacaagctgaccatttctgtgaaggacaacccggagaatccacgcatagccaggagggattatgacttgcttctgatcttcctttctgatgagaatgacaaccaccccctcttcactaaaagcacctaccaggcagaggtgatggaaaactctcccgctggcacccctctcacggtgctcaatgggcccatcctggccctggatgcagaccaagacatctacgccgtggtgacctaccagctgctgggtgcccagagtggcctctttgacatcaacagcagcaccggtgtggtgaccgtgaggtcaggtgtcatcattgaccgggaggcattctcgccacccatcctggagctgctgctgctggctgaggacatcgggctgctcaacagcacggcccacctgctcatcaccatcctggatgacaatgacaaccggcccacctttagccctgccaccctcactgtccatctgctagagaactgcccgcctggattctcagtccttcaagtcacagccacagatgaggacagtggcctcaatggggagctggtctaccgaatagaagctggggctcaggaccgcttcctcattcatctggtcaccggggtcatccgtgttggtaatgccaccatcgacagagaggagcaggagtcctacaggctaacggtggtggccaccgaccggggcaccgttcctctctcgggcacagccattgtcaccattctgatcgatgacatcaatgactcccgccccgagttcctcaaccccatccagacagtgagcgtgctggagtcggctgagccaggcactgtcattgccaatatcacggccattgaccacgacctcaacccaaagctagagtaccacattgtcggcattgtggccaaggacgacactgatcgcctggtgcccaaccaggaggacgcctttgctgtgaatatcaacacaggatctgtaatggtgaagtcccccatgaatcgggagctggttgccacctatgaggtcactctctcagtgattgacaatgccagcgacctaccagagcgctctgtcagtgtgccaaatgccaagctgactgtcaacgtcctggacgtcaatgacaatacgccccagttcaagccctttgggatcacctactacatggagcggatcctggagggggccacccctgggaccacactcattgctgtggcagccgtggaccctgacaagggccttaatgggctggtcacctacaccctgctggacctggtgcccccagggtatgtccagctggaggactcctcggcagggaaggtcattgccaaccggacagtggactacgaggaggtgcactggctcaactttaccgtgagggcctcagacaacgggtccccgccccgggcagctgagatccctgtctacctggaaatcgtggacatcaatgacaacaaccccatctttgaccagccctcctaccaggaggctgtctttgaggatgtgcctgtgggcacaatcatcctgacagtcactgccactgatgctgactcaggcaactttgcactcattgagtacagccttggagatggagagagcaagtttgccatcaaccccaccacgggtgacatctatgtgctgtcttctctggaccgggagaagaaggaccactatatcctgactgccttggccaaagacaaccctggggatgtagccagcaaccgtcgcgaaaattcagtgcaggtggtgatccaagtgctggatgtcaatgactgccggccacagttctccaagccccagttcagcacaagcgtgtatgagaatgagccggcgggcacctcggtcatcaccatgatggccactgaccaggatgaaggtcccaatggagagttgacctactcacttgagggccctggcgtggaggccttccatgtggacatggactcgggcttggtgaccacacagcggccactgcagtcctacgagaagttcagtctgaccgtggtggccacagatggtggagagcccccactctggggcaccaccatgctcctggtggaggtcatcgacgtcaatgacaaccgccctgtctttgtgcgcccacccaacggcaccatcctccacatcagagaggagatcccgctgcgctccaacgtgtacgaggtctacgccacggacaaggatgagggcctcaacggggcggtgcgctacagcttcctgaagactgcgggcaaccgggactgggagttcttcatcatcgacccaatcagcggcctcatccagactgctcagcgcctggaccgcgagtcgcaggcggtgtacagcctcatcttggtggccagcgacctgggccagccagtgccatacgagactatgcagccgctgcaggtggccctggaggacatcgatgacaacgaaccccttttcgtgaggcctccaaaaggcagcccccagtaccagctgctgacagtgcctgagcactcaccacgcggcaccctcgtgggcaacgtgacaggcgcagtggatgcagatgagggccccaacgcgatcgtgtactacttcatcgcagccggcaacgaagagaagaacttccatctgcagcccgatgggtgtctgctggtgctgcgggacctggaccgggagcgagaagccatcttctccttcatcgtcaaggcctccagcaatcgcagctggacacctccccgtggaccctccccaaccctcgacctggttgctgacctcacactgcaggaggtgcgcgttgtgctagaggacatcaacgaccagccaccacgcttcaccaaggctgagtacactgcaggggtggccaccgacgccaaggtgggctcagagttgatccaggtgctggccctggatgcagacattggcaacaacagccttgtcttctacagcattctggccatccactacttccgggcccttgccaacgactctgaagatgtgggccaggtcttcaccatggggagcatggacggcattctgcgcaccttcgacctcttcatggcctacagccccggctacttcgtggtggacattgtggcccgagacctggcaggccacaacgacacggccatcatcggcatctacatcctgagggacgaccagcgcgtcaagatcgtcattaacgagatccccgaccgtgtgcgcggcttcgaggaggagttcatccacctgctctccaacatcactggggccattgtcaatactgacaatgtgcagttccatgtggacaagaagggccgggtgaactttgcgcagacagaactgcttatccacgtggtgaaccgcgataccaaccgcatcctggacgtggaccgggtgatccagatgatcgatgagaacaaggagcagctacggaatcttttccggaactacaacgtcctggacgtgcagcctgccatctctgtccggctgccggatgacatgtctgccctgcagatggcgatcatcgtcctggctatcctcctgttcctggccgccatgctctttgtcctcatgaactggtactacaggactgtacacaagaggaagctcaaggccattgtggctggctcagctgggaatcgtggcttcatcgacatcatggacatgcctaacaccaacaagtactcctttgatggagccaaccctgtgtggctggatcccttctgtcggaacctggagctggccgcccaggcggagcatgaggatgacctaccggagaacctgagtgagatcgccgacctgtggaacagccccacgcgcacccatggaacttttgggcgtgagccagcagctgtcaagcctgatgatgaccgatacctgcgggctgccatccaggagtatgacaacattgccaagctgggccagatcattcgtgaggggccaatcaagctgatacagactgagctggacgaggagccaggagaccacagcccagggcagggtagcctgcgcttccgccacaagccaccagtggagctcaaggggcccgatgggatccatgtggtgcacggcagcacgggcacgctgctggccaccgacctcaacagcctgcccgaggaagaccagaagggcctgggccgctcgctggagacgctgaccgctgccgaggccactgccttcgagcgcaacgcccgcacagaatccgccaaatccacacccctgcacaaacttcgcgacgtgatcatggagacccccctggagatcacagagctgtgactagacagggaagccttgtgggtgtgagcagcacccatccaccgtcccctcccagggagcaagggcagggacagggccggtcgggggggaccctccaaggccaggccttggggacaaccttggcttggccctggcagcccgcatcagctgctcagatcccacttttgccagacgctcattcagcatctgacctctaccttcataagatctgttatttttataagaaaaccaaacaaaaatgttaagcatctaaggacaaggtaaggagggtcactggggcccaagagtctggggaccagcttggctcaggctgagctgaaagaggccaaacaggccctcctccctcccagctccaccccgcaagcaccatcccctccggctaagcaggcgcaagggaggcccagcgcggacatcccctgctggccggacacccgactccagtccaagtctcgctacatttccgccacatccctctctgctggacgtccaggtggaggtggcatccccacgtggacaagaaagtcaatgtcaatgaacaagcattctctccatttcactggcttcccaaatgtgtgcccagcttataaacagaagtgactgatgttccctccggttttgaatgtggagtgtttgtgtgtgttccttttttaaattaagttattccctc

SEQ ID NO: 4045 - DNA, 11137 bp, Homo sapiens
  source 1..11137: mol_type = unassigned DNA
gcggcggcggcggctcgggagagagggacgcgggctgcaggcgcgatgcttggctagaggacgcgtccgacggcggccggacgctgaggtggtcggggctagtcagcccggcctgggcatggagcgcggggtggcagagcctctggacgtttggggcgcgcccagtccgagcccccggcgcgcctgaagttgcgagcggcgagcggcgagcggcgagcggcccgcggagacccaggagctgccggcacgccgcggatgagccttcgcgccggcgggaagacgcggcggtggccagggccagagcaggcggcccgcgggggccgatccggcggagagcagagcccgaggcgaggcgaggcgcggcgccgctgcacacacgcacacggagccatggggcgccatgttgccaccagctgccacgtggcctggcttttggtgctgatctctggatgctggggccaggtgaaccggctgcccttcttcaccaaccacttctttgatacatacctgctgatcagcgaggacacgcctgtgggttcttctgtgacccagttgctggcccaagacatggacaatgaccccctggtgtttggcgtgtctggggaggaggcctctcgcttctttgcagtggagcctgacactggcgtggtgtggctccggcagccactggacagagagaccaagtcagagttcaccgtggagttctctgtcagcgaccaccagggggtgatcacacggaaggtgaacatccaggttggggatgtgaatgacaacgcgcccacatttcacaatcagccctacagcgtccgcatccctgaggtaggagccactgggaatacaccagtggggacgcccatcttcatcgtgaatgccacagaccccgacttgggggcagggggcagcgtcctctactccttccagcccccctcccaattcttcgccattgacagcgcccgcggtatcgtcacagtgatccgggagctggactacgagaccacacaggcctaccagctcacggtcaacgccacagatcaagacaagaccaggcctctgtccaccctggccaacttggccatcatcatcacagatgtccaggacatggaccccatcttcatcaacctgccttacagcaccaacatctacgagcattctcctccgggcacgacggtgcgcatcatcaccgccatagaccaggataaaggacgtccccggggcattggctacaccatcgtttcagttgcagggaataccaacagcatctttgccctggactacatcagcggagtgctgaccttgaatggcctgctggaccgggagaaccccctgtacagccatggcttcatcctgactgtgaagggcacggagctgaacgatgaccgcaccccatctgacgctacagtcaccacgaccttcaatatcctggttattgacatcaatgacaatgccccggagttcaacagctccgagtacagcgtggccatcactgagctggcacaggtcggctttgcccttccactcttcatccaggtggtggacaaggatgagggcctgaacagcatgtttgaggtgtacttggtggggaacaactcccaccacttcatcatctccccgacctccgtccaggggaaggcggacattcgtattcgggtggccatcccactggactacgagaccgtggaccgctacgactttgatctctttgccaatgagagtgtgcctgaccatgtgggctatgccaaggtgaagatcactctcatcaatgaaaatgacaaccggcccatcttcagccagccactgtacaacatcagcctgtacgagaacgtcaccgtggggacctctgtgctgacagtcctggcaactgacaatgatgcaggcacctttggggaagtcagctacttcttcagtgatgaccctgacaggttctcgctggacaaggacacgggactcatcatgctgattgccaggctggactatgagctcatccagcgcttcaccctgacgatcattgcccgggacgggggcggcgaggagaccacaggccgggtcaggatcaatgtgttggatgtcaacgacaacgtgcccaccttccagaaggatgcctacgtgggtgctctgcgggagaacgagccttctgtcacacagctggtgcggctccgggcaacagatgaagactcccctcccaacaaccagatcacctacagcattgtcagtgcatctgcctttggcagctacttcgacatcagcctgtacgagggctatggagtgatcagcgtcagtcgccccctggattatgaacagatatccaatgggctgatttatctgacggtcatggccatggatgctggcaacccccctctcaacagcaccgtccctgtcaccatcgaggtgtttgatgagaatgacaaccctcccaccttcagcaagcccgcctacttcgtctccgtggtggagaacatcatggcaggagccacggtgctgttcctgaatgccacagacctggaccgctcccgggagtacggccaggagtccatcatctactccttggaaggctccacccagtttcggatcaatgcccgctcaggggaaatcaccaccacgtctctgcttgaccgagagaccaagtctgaatacatcctcatcgttcgcgcagtggacgggggtgtgggccacaaccagaaaactggcatcgccaccgtaaacatcaccctcctggacatcaatgacaaccaccccacgtggaaggacgcaccctactacatcaacctggtggagatgacccctccagactctgatgtgaccacggtggtggctgttgacccagacctgggggagaatggcaccctggtgtacagcatccagccacccaacaagttctacagcctcaacagcaccacgggcaagatccgcaccacccacgccatgctggaccgggagaaccccgacccccatgaggccgagctgatgcgcaaaatcgtcgtctctgttactgactgtggcaggccccctctgaaagccaccagcagtgccacagtgtttgtgaacctcttggatctcaatgacaatgaccccacctttcagaacctgccttttgtggccgaggtgcttgaaggcatcccggcgggggtctccatctaccaagtggtggccatcgacctcgatgagggcctgaacggcctggtgtcctaccgcatgccggtgggcatgccccgcatggacttcctcatcaacagcagcagcggcgtggtggtcaccaccaccgagctggaccgcgagcgcatcgcggagtaccagctgcgggtggtggccagtgatgcaggcacgcccaccaagagctccaccagcacgctcaccatccatgtgctggatgtgaacgacgagacgcccaccttcttcccggccgtgtacaatgtgtctgtgtccgaggacgtgccacgcgagttccgggtggtctggctgaactgcacggacaacgacgtgggcctcaatgcagagctcagctacttcatcacaggtggcaacgtggatgggaagttcagcgtgggttaccgcgatgccgttgtgagaaccgtggtgggcctggaccgggagaccacagccgcctacatgctcatcctggaggccatcgacaacggccctgtagggaagcgacacacgggcacagccaccgtgttcgtcactgtcctggatgtgaatgacaaccggcccatctttctgcagagcagctatgaggccagcgtccctgaggacatccctgaaggccacagcatcttgcagctgaaagccacggacgcagatgagggcgagtttgggcgtgtgtggtaccgcatcctccatggtaaccatggcaacaacttccggatccatgtcagcaatgggctcctgatgcgagggccccggcccctggaccgggagcggaactcatcccacgtgctgatagtggaggcctacaaccacgacctgggccccatgcggagctccgtcagggtgattgtgtacgtggaggacatcaacgatgaggcccccgtgttcacacagcagcagtacagccgtctggggcttcgagagaccgcaggcattggaacgtcagtcatcgtggtccaagccacagaccgagactctggggatggtggcctggtgaactaccgcatcctgtcgggcgcagaggggaagtttgagattgacgagagcacagggcttatcatcaccgtgaattacctggactacgagaccaagaccagctacatgatgaatgtgtcggccactgaccaggccccgcccttcaaccagggcttctgcagcgtctacatcactctgctcaacgagctggacgaggccgtgcagttctccaatgcctcatacgaggctgccatcctggagaatctggcactgggtactgagattgtgcgggtccaggcctactccatcgacaacctcaaccaaatcacgtaccgcttcaacgcctacaccagcacccaggccaaagccctcttcaagatagacgccatcacgggtgtgatcacagtccagggcctggtggaccgtgagaagggcgacttctataccttgacagtggtggcagatgacggcggccccaaggtggactccaccgtgcaggtctacatcactgtgctggacgagaatgacaacagcccccggtttgacttcacctccgactcggcggtcagcatacccgaggactgccctgtgggccagcgagtggctactgtcaaggcctgggaccctgatgctggcagcaatgggcaggtggtcttctccctggcctctggcaacatcgcgggggcctttgagatcgtcaccaccaatgactccattggcgaagtgtttgtggccaggcccctggacagagaagagctggatcactacatcctccaggttgtggcttctgaccgaggcacccctccacggaagaaggaccacatcctgcaggtgaccatcctggacatcaatgacaaccctccagtcatcgagagcccctttggatacaatgtcagtgtgaatgagaacgtgggtggaggtactgctgtggtccaggtgagagccactgaccgtgacatcgggatcaacagtgttctgtcctactacatcaccgagggcaacaaggacatggccttccgcatggaccgcatcagcggtgagatcgccacacggcctgccccgcctgaccgcgagcgccagagcttctaccacctggtggccactgtggaggacgagggcaccccaaccctgtcggccaccacgcacgtgtacgtgaccattgtggatgagaatgataacgcgcccatgttccagcagccccactatgaggtgctgctggatgagggcccagacacgctcaacaccagcctcatcaccatccaggcactggacctggatgagggtcccaacggcacagtcacctatgccatcgtcgcaggcaacatcgtcaacaccttccgcatcgacagacacatgggtgtcatcactgctgccaaagagctggactacgagatcagccacggccgctacaccctgatcgtcactgccacagaccagtgccccatcttatcccaccgcctcacctctaccaccacggtgcttgtgaatgtgaatgacatcaacgacaatgtgcctaccttcccccgggactatgagggaccatttgaagtcactgagggccagccggggcccagagtgtggaccttcctggcccatgaccgagactcaggacccaacgggcaggtggagtacagcatcatggatggagaccctctgggggagtttgtgatctctcctgtggagggggtgctaagggtccggaaggacgtggagctggaccgggagaccatcgccttctacaacctgaccatctgtgcccgtgaccgggggatgcccccactcagctccacaatgctggtggggatccgggtgctggacatcaacgacaacgaccctgtgctgctgaacctgcccatgaacatcaccatcagcgagaacagccctgtctccagctttgtcgcccatgtcctggccagtgacgctgacagtggctgcaatgcacgcctcaccttcaacatcactgcgggcaaccgcgagcgggccttcttcatcaatgccacgacagggatcgtcactgtgaaccggcccctggaccgcgagcggatcccagagtacaagctgaccatttctgtgaaggacaacccggagaatccacgcatagccaggagggattatgacttgcttctgatcttcctttctgatgagaatgacaaccaccccctcttcactaaaagcacctaccaggcagaggtgatggaaaactctcccgctggcacccctctcacggtgctcaatgggcccatcctggccctggatgcagaccaagacatctacgccgtggtgacctaccagctgctgggtgcccagagtggcctctttgacatcaacagcagcaccggtgtggtgaccgtgaggtcaggtgtcatcattgaccgggaggcattctcgccacccatcctggagctgctgctgctggctgaggacatcgggctgctcaacagcacggcccacctgctcatcaccatcctggatgacaatgacaaccggcccacctttagccctgccaccctcactgtccatctgctagagaactgcccgcctggattctcagtccttcaagtcacagccacagatgaggacagtggcctcaatggggagctggtctaccgaatagaagctggggctcaggaccgcttcctcattcatctggtcaccggggtcatccgtgttggtaatgccaccatcgacagagaggagcaggagtcctacaggctaacggtggtggccaccgaccggggcaccgttcctctctcgggcacagccattgtcaccattctgatcgatgacatcaatgactcccgccccgagttcctcaaccccatccagacagtgagcgtgctggagtcggctgagccaggcactgtcattgccaatatcacggccattgaccacgacctcaacccaaagctagagtaccacattgtcggcattgtggccaaggacgacactgatcgcctggtgcccaaccaggaggacgcctttgctgtgaatatcaacacaggatctgtaatggtgaagtcccccatgaatcgggagctggttgccacctatgaggtcactctctcagtgattgacaatgccagcgacctaccagagcgctctgtcagtgtgccaaatgccaagctgactgtcaacgtcctggacgtcaatgacaatacgccccagttcaagccctttgggatcacctactacatggagcggatcctggagggggccacccctgggaccacactcattgctgtggcagccgtggaccctgacaagggccttaatgggctggtcacctacaccctgctggacctggtgcccccagggtatgtccagctggaggactcctcggcagggaaggtcattgccaaccggacagtggactacgaggaggtgcactggctcaactttaccgtgagggcctcagacaacgggtccccgccccgggcagctgagatccctgtctacctggaaatcgtggacatcaatgacaacaaccccatctttgaccagccctcctaccaggaggctgtctttgaggatgtgcctgtgggcacaatcatcctgacagtcactgccactgatgctgactcaggcaactttgcactcattgagtacagccttggagatggagagagcaagtttgccatcaaccccaccacgggtgacatctatgtgctgtcttctctggaccgggagaagaaggaccactatatcctgactgccttggccaaagacaaccctggggatgtagccagcaaccgtcgcgaaaattcagtgcaggtggtgatccaagtgctggatgtcaatgactgccggccacagttctccaagccccagttcagcacaagcgtgtatgagaatgagccggcgggcacctcggtcatcaccatgatggccactgaccaggatgaaggtcccaatggagagttgacctactcacttgagggccctggcgtggaggccttccatgtggacatggactcgggcttggtgaccacacagcggccactgcagtcctacgagaagttcagtctgaccgtggtggccacagatggtggagagcccccactctggggcaccaccatgctcctggtggaggtcatcgacgtcaatgacaaccgccctgtctttgtgcgcccacccaacggcaccatcctccacatcagagaggagatcccgctgcgctccaacgtgtacgaggtctacgccacggacaaggatgagggcctcaacggggcggtgcgctacagcttcctgaagactgcgggcaaccgggactgggagttcttcatcatcgacccaatcagcggcctcatccagactgctcagcgcctggaccgcgagtcgcaggcggtgtacagcctcatcttggtggccagcgacctgggccagccagtgccatacgagactatgcagccgctgcaggtggccctggaggacatcgatgacaacgaaccccttttcgtgaggcctccaaaaggcagcccccagtaccagctgctgacagtgcctgagcactcaccacgcggcaccctcgtgggcaacgtgacaggcgcagtggatgcagatgagggccccaacgcgatcgtgtactacttcatcgcagccggcaacgaagagaagaacttccatctgcagcccgatgggtgtctgctggtgctgcgggacctggaccgggagcgagaagccatcttctccttcatcgtcaaggcctccagcaatcgcagctggacacctccccgtggaccctccccaaccctcgacctggttgctgacctcacactgcaggaggtgcgcgttgtgctagaggacatcaacgaccagccaccacgcttcaccaaggctgagtacactgcaggggtggccaccgacgccaaggtgggctcagagttgatccaggtgctggccctggatgcagacattggcaacaacagccttgtcttctacagcattctggccatccactacttccgggcccttgccaacgactctgaagatgtgggccaggtcttcaccatggggagcatggacggcattctgcgcaccttcgacctcttcatggcctacagccccggctacttcgtggtggacattgtggcccgagacctggcaggccacaacgacacggccatcatcggcatctacatcctgagggacgaccagcgcgtcaagatcgtcattaacgagatccccgaccgtgtgcgcggcttcgaggaggagttcatccacctgctctccaacatcactggggccattgtcaatactgacaatgtgcagttccatgtggacaagaagggccgggtgaactttgcgcagacagaactgcttatccacgtggtgaaccgcgataccaaccgcatcctggacgtggaccgggtgatccagatgatcgatgagaacaaggagcagctacggaatcttttccggaactacaacgtcctggacgtgcagcctgccatctctgtccggctgccggatgacatgtctgccctgcagatggcgatcatcgtcctggctatcctcctgttcctggccgccatgctctttgtcctcatgaactggtactacaggactgtacacaagaggaagctcaaggccattgtggctggctcagctgggaatcgtggcttcatcgacatcatggacatgcctaacaccaacaagtactcctttgatggagccaaccctgtgtggctggatcccttctgtcggaacctggagctggccgcccaggcggagcatgaggatgacctaccggagaacctgagtgagatcgccgacctgtggaacagccccacgcgcacccatggaacttttgggcgtgagccagcagctgtcaagcctgatgatgaccgatacctgcgggctgccatccaggagtatgacaacattgccaagctgggccagatcattcgtgaggggccaatcaagggctcgctgctgaaggtggtcctggaggattacctgcggctcaaaaagctctttgcacagcggatggtgcaaaaagcctcctcctgccactcctccatctctgagctgatacagactgagctggacgaggagccaggagaccacagcccagggcagggtagcctgcgcttccgccacaagccaccagtggagctcaaggggcccgatgggatccatgtggtgcacggcagcacgggcacgctgctggccaccgacctcaacagcctgcccgaggaagaccagaagggcctgggccgctcgctggagacgctgaccgctgccgaggccactgccttcgagcgcaacgcccgcacagaatccgccaaatccacacccctgcacaaacttcgcgacgtgatcatggagacccccctggagatcacagagctgtgactagacagggaagccttgtgggtgtgagcagcacccatccaccgtcccctcccagggagcaagggcagggacagggccggtcgggggggaccctccaaggccaggccttggggacaaccttggcttggccctggcagcccgcatcagctgctcagatcccacttttgccagacgctcattcagcatctgacctctaccttcataagatctgttatttttataagaaaaccaaacaaaaatgttaagcatctaaggacaaggtaaggagggtcactggggcccaagagtctggggaccagcttggctcaggctgagctgaaagaggccaaacaggccctcctccctcccagctccaccccgcaagcaccatcccctccggctaagcaggcgcaagggaggcccagcgcggacatcccctgctggccggacacccgactccagtccaagtctcgctacatttccgccacatccctctctgctggacgtccaggtggaggtggcatccccacgtggacaagaaagtcaatgtcaatgaacaagcattctctccatttcactggcttcccaaatgtgtgcccagcttataaacagaagtgactgatgttccctccggttttgaatgtggagtgtttgtgtgtgttccttttttaaattaagttattccctc

SEQ ID NO: 4046 - DNA, 1759 bp, Homo sapiens
  source 1..1759: mol_type = unassigned DNA
cgggagagagggacgcgggctgcaggcgcgatgcttggctagaggacgcgtccgacggcggccggacgctgaggtggtcggggctagtcagcccggcctgggcatggagcgcggggtggcagagcctctggacgtttggggcgcgcccagtccgagcccccggcgcgcctgaagttgcgagcggcgagcggcgagcggcgagcggcccgcggagacccaggagctgccggcacgccgcggatgagccttcgcgccggcgggaagacgcggcggtggccagggccagagcaggcggcccgcgggggccgatccggcggagagcagagcccgaggcgaggcgaggcgcggcgccgctgcacacacgcacacggttcttctgtgacccagttgctggcccaagacatggacaatgaccccctggtgtttggcgtgtctggggaggaggcctctcgcttctttgcagtggagcctgacactggcgtggtgtggctccggcagccactggacagagagaccaagtcagagttcaccgtggagttctctgtcagcgaccaccagggggtgatcacacggaaggtgaacatccaggttggggatgtgaatgacaacgcgcccacatttcacaatcagccctacagcgtccgcatccctgagaatacaccagtggggacgcccatcttcatcgtgaatgccacagaccccgacttgggggcagggggcagcgtcctctactccttccagcccccctcccaattcttcgccattgacagcgcccgcggtatcgtcacagtgatccgggagctggactacgagaccacacaggcctaccagctcacggtcaacgccttggccatcatcatcaccaacctgccttacagcaccaacatctacgagcattctcctccgggcacgacggtgcgcatcatcaccgccatagaccaggataaaggacgtccccggggcattggctacaccatcgtttcagggaataccaacagcatctttgccctggactacatcagcggagtgctgaccttgaatggcctgctggaccgggagaaccccctgtacagccatggcttcatcctgactgtgaagggcacggagctgaacgatgaccgcaccccatctgacgctacagtcaccacgaccttcaatatcctggttattgacatcaatgacaatgccccggagttcaacagctccgagtacagcgtggccatcactgagctggcacaggtcggctttgcccttccactcttcatccaggtggtggacaaggatgagggcctgaacagcatgtttgaggtgtacttggtggggaacaactcccaccacttcatcatctccccgacctccgtccaggggaaggcggacattcgtattcgggtggccatcccactggactacgagaccgtggaccgctacgactttgatctctttgccaatgagagtgtgcctgaccatgtgggctatgccaaggtgaagatcactctcatcaatgaaaatgacaaccggcccatcttcagccagccactgtacaacatcagcctgtacgagaacgtcaccgtggggacctctgtgctgacagtcctggtgagtccccgcttcactgcagggccactgagctctccagggccgactgtggtgaggcacccagagggattttgtccaagggacctcagcaatcagggaaggaggcacccccaaatccctgagctgtgtttgttggtgtattaaataaagtttttggactctt

SEQ ID NO: 4047 - DNA, 5747 bp, Homo sapiens
  source 1..5747: mol_type = unassigned DNA
gcaactgacaatgatgcaggcacctttggggaagtcagctacttcttcagtgatgaccctgacaggttctcgctggacaaggacacgggactcatcatgctgattgccaggctggactatgagctcatccagcgcttcaccctgacgatcattgcccgggacgggggcggcgaggagaccacaggccgggtcaggatcaatgtgttggatgtcaacgacaacgtgcccaccttccagaaggatgcctacgtgggtgctctgcgggagaacgagccttctgtcacacagctggtgcggctccgggcaacagatgaagactcccctcccaacaaccagatcacctacagcattgtcagtgcatctgcctttggcagctacttcgacatcagcctgtacgagggctatggagtgatcagcgtcagtcgccccctggattatgaacagatatccaatgggctgatttatctgacggtcatggccatggatgctggcaacccccctctcaacagcaccgtccctgtcaccatcgaggtgtttgatgagaatgacaaccctcccaccttcagcaagcccgcctacttcgtctccgtggtggagaacatcatggcaggagccacggtgctgttcctgaatgccacagacctggaccgctcccgggagtacggccaggagtccatcatctactccttggaaggctccacccagtttcggatcaatgcccgctcaggggaaatcaccaccacgtctctgcttgaccgagagaccaagtctgaatacatcctcatcgttcgcgcagtggacgggggtgtgggccacaaccagaaaactggcatcgccaccgtaaacatcaccctcctggacatcaatgacaaccaccccacgtggaaggacgcaccctactacatcaacctggtggagatgacccctccagactctgatgtgaccacggtggtggctgttgacccagacctgggggagaatggcaccctggtgtacagcatccagccacccaacaagttctacagcctcaacagcaccacgggcaagatccgcaccacccacgccatgctggaccgggagaaccccgacccccatgaggccgagctgatgcgcaaaatcgtcgtctctgttactgactgtggcaggccccctctgaaagccaccagcagtgccacagtgtttgtgaacctcttggatctcaatgacaatgaccccacctttcagaacctgccttttgtggccgaggtgcttgaaggcatcccggcgggggtctccatctaccaagtggtggccatcgacctcgatgagggcctgaacggcctggtgtcctaccgcatgccggtgggcatgccccgcatggacttcctcatcaacagcagcagcggcgtggtggtcaccaccaccgagctggaccgcgagcgcatcgcggagtaccagctgcgggtggtggccagtgatgcaggcacgcccaccaagagctccaccagcacgctcaccatccatgtgctggatgtgaacgacgagacgcccaccttcttcccggccgtgtacaatgtgtctgtgtccgaggacgtgccacgcgagttccgggtggtctggctgaactgcacggacaacgacgtgggcctcaatgcagagctcagctacttcatcacaggtggcaacgtggatgggaagttcagcgtgggttaccgcgatgccgttgtgagaaccgtggtgggcctggaccgggagaccacagccgcctacatgctcatcctggaggccatcgacaacggccctgtagggaagcgacacacgggcacagccaccgtgttcgtcactgtcctggatgtgaatgacaaccggcccatctttctgcagagcagctatgaggccagcgtccctgaggacatccctgaaggccacagcatcttgcaggaagacttggcctccccctgcatatctcccgccccacccagaagggcctttcagagtagcggggagaaagagacgtcacaatttcccggaaaggagttgagaagagagccagggcccagcaaggcccagaacagagctgctttcacagagcccttggccgaggctcccctcttgggaagtaaacaggcacaagaagaaagggctcctttgcccagggagcaggcgcaacagctccaaggctcagagggagagaagggaggaccctgaaaacaatttgggtgtgcacccacacctctgcccagaggcctcagttgctgggtggggagggaggcccggagtgaatgagtctctttaccaactatggggtttccgactcggaggctgagccaaacagggaatctgggcctgcccactggggcaggctcccgggcttgggagggacagaagcgtgggaggctggcaatgctcccctccctgcatcgggaccaggaggcgggcaggaaagggctggggagcagggagctgactcccagaaacacagagagcccagaaagccctgaggatttgcgagagtgtggtggctagctccagaaggaggaagtagagggttctctcgatcagggcctcagcttgtgaggacttggagcatacccccctggcctggtgcctgaaacccaattgagagccctccccctcctggacttttccttcttcaggcctcagggcagcctcaacccccaccccaacctccaggaagacagtgcctagtggccagcagggcctgctggtgaggtggatggctacaggctgaatccagcctaggatttgcagggaggccccaggggaagcaaaccaggaagaggttactgagcaggaagggaggaaggaacaaaacccttagggaggaggcctgccccactttctaaacccaaagacttggtttctatttacacaatactactcttactgaaatcctagagccagcgagttaatatagggcagccctgagttctcccatttctcagggagaaatgcagcgtctcaggatgacttctccaaggtcctcttggtaagtttcttgtgaagccggactcactttttgagatcagattgacttggaaggaagggacagtgggcttctccaatagagcctgcttggagagaaatctttctagagtcatctgagggaagatgaggctctgtgttatgccagcttccaccaagactcctgcctcagagggtggggacacacccaggctgggccacgcttcactctgtacacagaagcctcatacttctgtgcacagaactggggagtcaaagtgaggggctggacaatgtctggctctctgcaagctcccaagctggtaggaaagagaagacatagacaaaaaggacccatgctgccaagagaatgttccttttcctccccaagagaggtaggagacagtaggggcggctccaggcaggagggcttcacagagtgggtgtgtgtgaagcataagccacagttagtgggtgacaggtctttcagttttcctggagttttggatcaagatgaggctagaaagattaattggagccagctcccagagggcactgcacactgcgctgaggagctttggctatatccatttggcattagggagccagtgaaggttttggagctggggagtggcaagccagagctcactccttggggagacgtggctggctgcactgtgggtcacagcaggatgggggtggggcagctttgtggtgggatcctggccagctgactgggacaggagctgggcagcccaggtcctccctctgcccacccttcaaatttgggacctgaccaaagtgtttaaccctcgcgttgtgaggagaggtcaagggtttgggattctgagaagcccatcctggggtgggactgctttgacgggtcatcagcaaagcactcaccaaaaccacagatagcatccctagtgtgggcaggacttgggaccccacagctgtcctggagaggtccagaccatcccaccctcggggaggctgccgctttccctgggtgaggtgtggagctgctgtgagctgtcctcctccgagtccaggtggcatcacctccagctgctggaaatgccctgcctcttgccactctgtcacagcacccgccctggcctctgaagggagcctcctcgatcatcttcaatcccttcctgattgatcccaacgtgggtgccctgaagaggggccaccaagacggctgccaagaccatgcttggagagccctgtttgctcctcctcccagctggcacccaggcatctgttccaccaggagggaggcagctgctcccacagggcaccaggcagatgctggcagcacccgggaaacccaaggaagagagccccgaggttttgccccagcactgggccagcacagatgccaggacagtgtcttggccccggtgtaggctgagcatttcacttgactaaagggaacctttgccatttggcaacttctccatgctgggctttggcacctggagggcaaggcttctgtggcgagcgagggtgctgcttctaggaggtggttacgagccccaggttgtaccctgtggagcctcaggccaaaggcccagatgaccacgagtgcacatctcttgaccagaagtctttcatcaagcagcagcgagggggtctgcagagaggaaggtgctcttctgaggatcatctttgggaaagggcgctggcctgggcatgcaaggagcttcggggggtgagtgtgtgtcccagactgcttgggccactgtcttcctgcagcctgcagcaccggtctctgaagcaggaggatctacaggtagacctagggggatgtgggggcatgtttgtggacaccccattacatcttggtagattccatgtagtcacagtggctgcggttgtcctcggggcccggcaggggctgtcgagggacggtgggccggccatggcggaagctgtgcagggagaggcgcaaggagcccaggcgcttccagagccggagctggggctcactggggctcccagggtggtggggcatgcactcgtgagccctgcggcggctcgggtccagcgcggccggcttgcagagcgtcatgaacagcagacaggtggccagcaggaggaagatgcaggccagggcgatgagcatggggagggggtcagttgcctctgcaagggtcccgggagtgacgggagctgagagaaaggcgagggggctgatggctggggagctggcgaggctggggccctctgtgctcatggctcctgcaacagcaacaagacagaagctcaaaggcagatcagctggacccagggcagcgggtatagggaagacttacctagggaatgtggatgggggcaaggcactgttaaactggacagcatcatggccacatcacaggttaagacagcaaggtccagagacatcacaagtctaagtgtacacacagctgagcagtgatggagctgggcccaagctcaggccctcttcctgttccaccctgtgcccatctgccatgcagacaagagggcggtggcctgtccgcattttcaaatcaatcctcatgaatcatcacagggtcttaggcctggaaacttaagaccaactctgtcaataacttgctctgtggccaggaacgagttatggatggtaagaggccgcagctgccagggtccctagcagtaatctaataccaaagctgcaaactgggggcccacgggtgtgtttagttgggtccttgccatgtttttatcaatgtaattatgaatattttcaaaataataacagatttcacaaaaat

SEQ ID NO: 4048 - DNA, 2690 bp, Homo sapiens
  source 1..2690: mol_type = unassigned DNA
ccgctacccccattgtggtctctgccctccccgcgggcccagggcatgctccgtgcccctgcgcccggtctcggcggcggcaggcgacactccgcgccggcggagacatgaggcgctgccggtgggccgccctggccctggggctgctgcgcctctgcttggctcaggccaacttcgccccgcacttcttcgacaacggggtcggcagcaccaacggaaacatggctctgttcagcctcccagaggacacccctgtaggctctcacgtatacaccctgaatgggacagaccctgagggagaccccatctcctaccacatcagctttgaccccagcactagaagcgtcttttctgttgaccccacttttggaaacatcaccctggttgaagagctggacagagagagggaagatgagattgaagccatcatcagcatttctgatggcctgaatctggtggccgaaaaagtcgtgatcctggtgaccgatgccaatgatgaggcgcccaggttcatccaggagccttatgttgccctggttcccgaggacatacctgctgggagcatcatctttaaggtccatgcagtggacagggacacaggctctggagggagtgtcacctacttcctgcagaacctgcactccccatttgccgtggaccgccacagcggtgtgctgcgcctccaggctggggccactctggactacgagaggtcccggacccactacatcaccgtggtcgccaaggatggcggtgggaggcttcatggggctgatgtggtgttctcagccaccaccacggtcacggtcaatgtggaggatgttcaggacatggcccctgtcttcgtgggcacaccctactatggctatgtgtacgaggacacccttccgggctcggaggtactgaaggtggtcgccatggatggagaccggggcaaacccaatcgaattctctacagccttgtaaatgggaacgatggagcctttgaaattaatgagacatctggagccatctccatcactcagagcccggcccagctccagagagaggtgtatgagctgcatgtacaggtgactgaaatgagccctgcggggagcccagctgcccaggccaccgtcccagtcaccatcaggattgtggacctcaacaaccacccgccaacattctatggagagagcggaccccaaaacaggtttgagctgtccatgaatgagcacccaccccagggagagatcctgcggggcctcaagatcaccgtcaatgactccgaccagggagccaatgccaaattcaacttgcagctggtgggacccaggggcatcttccgagtggttccacagacagtcctgaatgaagcccaagtcacaatcattgtggagaactcagctgccattgactttgaaaagtccaaagtattaaccttcaagctcctggctgttgaagtgaacaccccagagaagttcagttccacagcggatgttgtgatccagctcctggacaccaatgacaatgtccccaagttcgactccctctactacgttgccaggattcctgagaacgccccagggggctccagcgtggtggctgtcacagctgtggatccagatacaggaccctggggcgaagtgaaatattccacctatgggactggggcagacctcttcctgatccacccatccactgggcttatctacacccagccctgggctagcctggacgctgaggccactgccaggtacaacttctatgtgaaggcagaggacatggaaggcaagtacagcgtagctgaggtgtttatcacactgctggatgtcaatgaccacccccctcagtttggaaagagcgttcagaagaagacgatggtgctagggaccccagtgaaaattgaggccatagacgaggatgcagaggaacccaacaacctggtggactattccatcacccatgcagagcccgccaacgtgttcgacatcaattcccacacgggggagatctggctcaagaattccatccgctccctggatgccctgcacaacatcacacctggaagggactgcctatggtccctagaggtgcaggccaaggaccggggctccccatccttcagcaccacagccttactcaagattgacatcacagatgctgaggtgagaagactaaggtacatgaaaaatagtaacttccctggtacaacaaagtcagtaagaaaaccaaaatttaagcccaagaaaccacattccagccagggtctgttcttgcatccccactgcgaaattgccttattcaatctgagtaatgtgaatctgtactctagagtttttcaaggggcagcccaagcatcttaaaaagtatcagattctcagaaatcctccctagaccattttccctctccctaaatttctatgtttacagaagcaactgaatacttccctacccaccaacatgctcctggctctcccctgcactgcttgctgctcttccacagcccttctctcatcctgacccctctgtctcatgtgcaccaccaagcttcttttgcttggcttgaaggtctgaacatccactctcaccttcatggtagcccaggctatttcatgatggtgacaccctcaagatccgtagaccactgtattagttcgttctcatgctgctaataaagatacccgagactgggtaatttatagaggaaa

SEQ ID NO: 4049 - DNA, 5428 bp, Homo sapiens
  source 1..5428: mol_type = unassigned DNA
tacccccattgtggtctctgccctccccgcgggcccagggcatgctccgtgcccctgcgcccggtctcggcggcggcaggcgacactccgcgccggcggagacatgaggcgctgccggtgggccgccctggccctggggctgctgcgcctctgcttggctcaggccaacttcgccccgcacttcttcgacaacggggtcggcagcaccaacggaaacatggctctgttcagcctcccagaggacacccctgtaggctctcacgtatacaccctgaatgggacagaccctgagggagaccccatctcctaccacatcagctttgaccccagcactagaagcgtcttttctgttgaccccacttttggaaacatcaccctggttgaagagctggacagagagagggaagatgagattgaagccatcatcagcatttctgatggcctgaatctggtggccgaaaaagtcgtgatcctggtgaccgatgccaatgatgaggcgcccaggttcatccaggagccttatgttgccctggttcccgaggacatacctgctgggagcatcatctttaaggtccatgcagtggacagggacacaggctctggagggagtgtcacctacttcctgcagaacctgcactccccatttgccgtggaccgccacagcggtgtgctgcgcctccaggctggggccactctggactacgagaggtcccggacccactacatcaccgtggtcgccaaggatggcggtgggaggcttcatggggctgatgtggtgttctcagccaccaccacggtcacggtcaatgtggaggatgttcaggacatggcccctgtcttcgtgggcacaccctactatggctatgtgtacgaggacacccttccgggctcggaggtactgaaggtggtcgccatggatggagaccggggcaaacccaatcgaattctctacagccttgtaaatgggaacgatggagcctttgaaattaatgagacatctggagccatctccatcactcagagcccggcccagctccagagagaggtgtatgagctgcatgtacaggtgactgaaatgagccctgcggggagcccagctgcccaggccaccgtcccagtcaccatcaggattgtggacctcaacaaccacccgccaacattctatggagagagcggaccccaaaacaggtttgagctgtccatgaatgagcacccaccccagggagagatcctgcggggcctcaagatcaccgtcaatgactccgaccagggagccaatgccaaattcaacttgcagctggtgggacccaggggcatcttccgagtggttccacagacagtcctgaatgaagcccaagtcacaatcattgtggagaactcagctgccattgactttgaaaagtccaaagtattaaccttcaagctcctggctgttgaagtgaacaccccagagaagttcagttccacagcggatgttgtgatccagctcctggacaccaatgacaatgtccccaagttcgactccctctactacgttgccaggattcctgagaacgccccagggggctccagcgtggtggctgtcacagctgtggatccagatacaggaccctggggcgaagtgaaatattccacctatgggactggggcagacctcttcctgatccacccatccactgggcttatctacacccagccctgggctagcctggacgctgaggccactgccaggtacaacttctatgtgaaggcagaggacatggaaggcaagtacagcgtagctgaggtgtttatcacactgctggatgtcaatgaccacccccctcagtttggaaagagcgttcagaagaagacgatggtgctagggaccccagtgaaaattgaggccatagacgaggatgcagaggaacccaacaacctggtggactattccatcacccatgcagagcccgccaacgtgttcgacatcaattcccacacgggggagatctggctcaagaattccatccgctccctggatgccctgcacaacatcacacctggaagggactgcctatggtccctagaggtgcaggccaaggaccggggctccccatccttcagcaccacagccttactcaagattgacatcacagatgctgagaccctctcccggagccccatggctgccttcctgatacagaccaaggacaaccccatgaaggccgtgggtgtgctggccggcaccatggccaccgtcgtggccatcactgtcctcatctccaccgccaccttctggcgcaacaagaagtctaacaaggtcctgccaatgcggcgggtgctccgcaagcggcccagccctgcgccccgcaccatccgcattgagtggctcaagtccaagagcaccaaagccgctaccaagttcatgctcaaagagaaacctcccaatgagaactgtaacaacaacagcccagaaagctctctgctcccgagagctccggctctccctccaccacccagcgtggcgcccagcactggcgcagcccagtggaccgtgcctactgtctctggctctctcactccgcagccgacccaacccccgccaaaacccaaaactatgggaagccccgtccagtcaactctgatctctgagctcaagcaaaagtttgagaagaagagtgtgcacaacaaggcttacttctagtgtatgccctatgaccccccatctttcctccgcccctgacccccaccaccctgctgctcggactatgctccccttcctctgctccttaaggtcactgacccctgttttgcacaatggtataatccccactgtcctcatctctaccgccaccttctggcgcaacaagaagttgcgctctgacagggctctagtcagggccttgggcaagacattgggctctaggatgcaattggcaaatacgtccccgttactcaaatccttggcactactacaatgccctccattcttcagggctgagaattgacgagaagccagctcacccatcccagacctcacagtccctcaggttctactgggatctcatcatcatccttagtcaagcagcagggccctggccacgtggagcaacactgactagaatctggatcctgacgcctgcagctgagagcaggagcaggaaaaggaggctcagcactgtctcaggctggaggtcagcgaacctcgtgggctgtaggaaagcaaatgtaggtaaggggagagcaaggatgcacagaaaacacactgactgtgggactgtgccaggatgcatttggaaagatagagcattctgtctgggcagagactgtggaccctggtatgcccacgtgggacagaggacacagaggtggaagattgatcttgccaagagtgagggcagatgtctccagccaggactgccctgagccgcaaaatgtcaaagctggagctatagaggtagccctaaaggcaactagaagagcatcagggctgctctctgaggagctgccccaccagccatccttgaagagacaattcagggcagttgatgaatatcagggctgagatgtggtgagacttccgtttttatccagctcttttgctcacatcgcgtaaccttgggaaagctgtttaaagtcgctgatcatcctcttcctcatctgtaaatgaagaaagtaggccctgtctacctcacatgcaggtctagggtgaggattgaagaaaatagtggtgatgagggctttaaccaagtgcaaagcggcatgaatgcaaagtatttttctgcagcccagttctgtgggtgcagctcttccagaaagtattaggagcctcacatctactctgccaagcgccccagcaggcactgtgctgggcttaggggctaccactggatgatggcattgccgtgactcacacacctctacttctgttcttccctcactccatccccgctaccgtcctggccagctaccgtcagagagaaccagagctccaagtctttaatttgccaagatgaagaaaatgagttctcaaggagggaatgctttgcttgaggccacacagcaggttggtagcaaagatcttgtctagccagggcagcccttatcagcttgtgacaaccttccccaggacagaagtcatacaaggcctctggggttaatacaaataggttgtgccctgctttaaggaacctgctatcaggaaatctacatgtgtgcacagagagagaaaagtagaacagttctttgcatttggctctacttactaacaacccctctagaatacattggtgatttcatttaaagagattgtatgcatttgtggctttcctgatttctgagtctgtgtttggaggtgttactgagatgtgccagtgtgcagaatccttgctggggtttctacagtccccaacgtgaacagtattaagcaagaggtggactcgagcaatccaggagcccagactgagcaaataagtactttccagcctgtgtttcaggagaggactgtgctggatcatgcttgccctccacagggaatacagcatccttacagcttgcatgcaatcaacctcttttgtaaatggaaaataaagtctgttacccaaaggccatgctgatcccctgctccctgctttcatttatgtttgctgacctgtggagaccagtctttctgacacacagtgaagctcaacttgcctcctggctgcttcagcaggtggatccattcttcgacccccagatgtgactctaaagaaggctgaaaatttttgtccaaattgccatgcagatatcttgaacagcaggacatttgcaggccttgtctactggacttttctcccaaacaggacaagcccaggcagggctgcatggagaggaatggaacctggagctagaattaattgcccactctcccaccctaccagtgcagcccggcaagggcaggaattgggaggcctagggtgggcatgaaagcttgggaagcactgtcgtctctcagacaggcgtcctaaagacctctaggctggaagcttgggcttgcaagtggatccgggaccgagggtggtctcttggacaaccccaggaacttggaccaaggcagagccaatcttgcaaactggccatggatggggaagtgcccggtagccagcatgagccacactaggaaagaggaggagggtgcagccaaacttaaggcaccggcaagtgttgtcagcactggaggagaccccgccagtggggtgaggccagccaagtccctgtgttacgaatggtgggccaaggggctgtctgctaggtcccagtaggacaggcagagctccaggctggcaccatggtaggcctccagggaaagagctgggaggcaggaatggcacactgggcaggcttgcccattcctggccctgagaatggagctgtagcctcatggacaataaatggatgtgacaccaaa

SEQ ID NO: 4050 - DNA, 4537 bp, Homo sapiens
  source 1..4537: mol_type = unassigned DNA
catcaccgtggtcgccaaggatggcggtgggaggcttcatggggctgatgtggtgttctcagccaccaccacggtcacggtcaatgtggaggatgttcaggacatggcccctgtcttcgtgggcacaccctactatggctatgtgtacgaggacacccttccgggctcggaggtactgaaggtggtcgccatggatggagaccggggcaaacccaatcgaattctctacagccttgtaaatgggaacgatggagcctttgaaattaatgagacatctggagccatctccatcactcagagcccggcccagctccagagagaggtgtatgagctgcatgtacaggtgactgaaatgagccctgcggggagcccagctgcccaggccaccgtcccagtcaccatcaggattgtggacctcaacaaccacccgccaacattctatggagagagcggaccccaaaacaggtttgagctgtccatgaatgagcacccaccccagggagagatcctgcggggcctcaagatcaccgtcaatgactccgaccagggagccaatgccaaattcaacttgcagctggtgggacccaggggcatcttccgagtggttccacagacagtcctgaatgaagcccaagtcacaatcattgtggagaactcagctgccattgactttgaaaagtccaaagtattaaccttcaaggctgtggatccagatacaggaccctggggcgaagtgaaatattccacctatgggactggggcagacctcttcctgatccacccatccactgggcttatctacacccagccctgggctagcctggacgctgaggccactgccaggtacaacttctatgtgaaggcagaggacatggaaggcaagtacagcgtagctgaggtgtttatcacactgctggatgtcaatgaccacccccctcagtttggaaagagcgttcagaagaagacgatggtgctagggaccccagtgaaaattgaggccatagacgaggatgcagaggaacccaacaacctggtggactattccatcacccatgcagagcccgccaacgtgttcgacatcaattcccacacgggggagatctggctcaagaattccatccgctccctggatgccctgcacaacatcacacctggaagggactgcctatggtccctagaggtgcaggccaaggaccggggctccccatccttcagcaccacagccttactcaagattgacatcacagatgctgagaccctctcccggagccccatggctgccttcctgatacagaccaaggacaaccccatgaaggccgtgggtgtgctggccggcaccatggccaccgtcgtggccatcactgtcctcatctccaccgccaccttctggcgcaacaagaagtctaacaaggtcctgccaatgcggcgggtgctccgcaagcggcccagccctgcgccccgcaccatccgcattgagtggctcaagtccaagagcaccaaagccgctaccaagttcatgctcaaagagaaacctcccaatgagaactgtaacaacaacagcccagaaagctctctgctcccgagagctccggctctccctccaccacccagcgtggcgcccagcactggcgcagcccagtggaccgtgcctactgtctctggctctctcactccgcagccgacccaacccccgccaaaacccaaaactatgggaagccccgtccagtcaactctgatctctgagctcaagcaaaagtttgagaagaagagtgtgcacaacaaggcttacttctagtgtatgccctatgaccccccatctttcctccgcccctgacccccaccaccctgctgctcggactatgctccccttcctctgctccttaaggtcactgacccctgttttgcacaatggtataatccccactgtcctcatctctaccgccaccttctggcgcaacaagaagttgcgctctgacagggctctagtcagggccttgggcaagacattgggctctaggatgcaattggcaaatacgtccccgttactcaaatccttggcactactacaatgccctccattcttcagggctgagaattgacgagaagccagctcacccatcccagacctcacagtccctcaggttctactgggatctcatcatcatccttagtcaagcagcagggccctggccacgtggagcaacactgactagaatctggatcctgacgcctgcagctgagagcaggagcaggaaaaggaggctcagcactgtctcaggctggaggtcagcgaacctcgtgggctgtaggaaagcaaatgtaggtaaggggagagcaaggatgcacagaaaacacactgactgtgggactgtgccaggatgcatttggaaagatagagcattctgtctgggcagagactgtggaccctggtatgcccacgtgggacagaggacacagaggtggaagattgatcttgccaagagtgagggcagatgtctccagccaggactgccctgagccgcaaaatgtcaaagctggagctatagaggtagccctaaaggcaactagaagagcatcagggctgctctctgaggagctgccccaccagccatccttgaagagacaattcagggcagttgatgaatatcagggctgagatgtggtgagacttccgtttttatccagctcttttgctcacatcgcgtaaccttgggaaagctgtttaaagtcgctgatcatcctcttcctcatctgtaaatgaagaaagtaggccctgtctacctcacatgcaggtctagggtgaggattgaagaaaatagtggtgatgagggctttaaccaagtgcaaagcggcatgaatgcaaagtatttttctgcagcccagttctgtgggtgcagctcttccagaaagtattaggagcctcacatctactctgccaagcgccccagcaggcactgtgctgggcttaggggctaccactggatgatggcattgccgtgactcacacacctctacttctgttcttccctcactccatccccgctaccgtcctggccagctaccgtcagagagaaccagagctccaagtctttaatttgccaagatgaagaaaatgagttctcaaggagggaatgctttgcttgaggccacacagcaggttggtagcaaagatcttgtctagccagggcagcccttatcagcttgtgacaaccttccccaggacagaagtcatacaaggcctctggggttaatacaaataggttgtgccctgctttaaggaacctgctatcaggaaatctacatgtgtgcacagagagagaaaagtagaacagttctttgcatttggctctacttactaacaacccctctagaatacattggtgatttcatttaaagagattgtatgcatttgtggctttcctgatttctgagtctgtgtttggaggtgttactgagatgtgccagtgtgcagaatccttgctggggtttctacagtccccaacgtgaacagtattaagcaagaggtggactcgagcaatccaggagcccagactgagcaaataagtactttccagcctgtgtttcaggagaggactgtgctggatcatgcttgccctccacagggaatacagcatccttacagcttgcatgcaatcaacctcttttgtaaatggaaaataaagtctgttacccaaaggccatgctgatcccctgctccctgctttcatttatgtttgctgacctgtggagaccagtctttctgacacacagtgaagctcaacttgcctcctggctgcttcagcaggtggatccattcttcgacccccagatgtgactctaaagaaggctgaaaatttttgtccaaattgccatgcagatatcttgaacagcaggacatttgcaggccttgtctactggacttttctcccaaacaggacaagcccaggcagggctgcatggagaggaatggaacctggagctagaattaattgcccactctcccaccctaccagtgcagcccggcaagggcaggaattgggaggcctagggtgggcatgaaagcttgggaagcactgtcgtctctcagacaggcgtcctaaagacctctaggctggaagcttgggcttgcaagtggatccgggaccgagggtggtctcttggacaaccccaggaacttggaccaaggcagagccaatcttgcaaactggccatggatggggaagtgcccggtagccagcatgagccacactaggaaagaggaggagggtgcagccaaacttaaggcaccggcaagtgttgtcagcactggaggagaccccgccagtggggtgaggccagccaagtccctgtgttacgaatggtgggccaaggggctgtctgctaggtcccagtaggacaggcagagctccaggctggcaccatggtaggcctccagggaaagagctgggaggcaggaatggcacactgggcaggcttgcccattcctggccctgagaatggagctgtagcctcatggacaataaatggatgtgacacc

SEQ ID NO: 4051 - DNA, 1629 bp, Homo sapiens
  source 1..1629: mol_type = unassigned DNA
tgggctggaccagccggccagcgggagcccccttggcagaagccggtcgtaaaggatcataaactgggcggcgtctggctggggcgaaggtcgctgaggtaggaactgcgccagtcctagacgccagacccgctcagaccctcctgccaggtgacagccgccaagatggggtcttgggccctgctgtggcctcccctgctgttcaccgggctgctcgtccgacccccggggaccatggcccaggcccagtactgctctgtgaacaaggacatctttgaagtagaggagaacacaaatgtcaccgagccgctggtggacatccacgtcccggagggccaggaggtgaccctcggagccttgtccaccccctttgcatttcggatccagggaaaccagctgtttctcaacgtgactcctgattacgaggagaagtcactgcttgaggctcagctgctgtgtcagagcggaggcacattggtgacccagctaagggtgttcgtgtcagtgctggacgtcaatgacaatgcccccgaattcccctttaagaccaaggagataagggtggaggaggacacgaaagtgaactccaccgtcatccccgagacgcaactgcaggctgaggaccgcgacaaggacgacattctgttctacaccctccaggaaatgacagcaggtgccagtgactacttctccctggtgagtgtaaaccgtcccgccctgaggctggaccggcccctggacttctacgagcggccgaacatgaccttctggctgctggtgcgggacactccgggggagaatgtggaacccagccacactgccaccgccacactagtgctgaacgtggtgcccgccgacctgcggcccccgtggttcctgccctgcaccttctcagatggctacgtctgcattcaagctcagtaccacggggctgtccccacggggcacatactgccatctcccctcgtcctgcgtcccggacccatctacgctgaggacggagaccgcggcatcaaccagcccatcatctacagcatctttaggggaaacgtgaatggtacattcatcatccacccagactcgggcaacctcaccgtggccaggagtgtccccagccccatgaccttccttctgctggtgaagggccaacaggccgaccttgcccgctactcagtgacccaggtcaccgtggaggctgtggctgcggccgggagcccgccccgcttcccccagagactgtatcgtggcaccgtggcgcgtggcgctggagcgggcgttgtggtcaaggatgcagctgccccttctcagcctctgaggatccaggctcaggacccggagttctcggacctcaactcggccatcacatatcgaattaccaaccactcacacttccggatggagggagaggttgtgctgaccaccaccacactggcacaggcgggagccttctacgcagagcccccgacctgcaccggagatctcaggcacccggctcatctcagacctcccgctcccgaccctacacagagattgcctggggaggctgaggagccgatgcaaacccccaaggcgacgcacttgggagccggtggtctcaaacacctgccgggggtcctagtccccttctga

SEQ ID NO: 4052 - DNA, 2318 bp, Homo sapiens
  source 1..2318: mol_type = unassigned DNA
agtcccttctgccctgtgcctcggtgcctgtgacctgagccccctggttgacccctgcactcagtccaacttgggccaaacgactgcccctccttctggcagtgggctggaccagccggccagcgggagcccccttggcagaagccggtcgtaaaggatcataaactgggcggcgtctggctggggcgaaggtcgctgaggtaggaactgcgccagtcctagacgccagacccgctcagaccctcctgccaggtgacagccgccaagatggggtcttgggccctgctgtggcctcccctgctgttcaccgggctgctcgtccgacccccggggaccatggcccaggcccagtactgctctgtgaacaaggacatctttgaagtagaggagaacacaaatgtcaccgagccgctggtggacatccacgtcccggagggccaggaggtgaccctcggagccttgtccaccccctttgcatttcggatccagggaaaccagctgtttctcaacgtgactcctgattacgaggagaagtcactgcttgaggctcagctgctgtgtcagagcggaggcacattggtgacccagctaagggtgttcgtgtcagtgctggacgtcaatgacaatgcccccgaattcccctttaagaccaaggagataagggtggaggaggacacgaaagtgaactccaccgtcatccccgagacgcaactgcaggctgaggaccgcgacaaggacgacattctgttctacaccctccaggaaatgacagcaggtgccagtgactacttctccctggtgagtgtaaaccgtcccgccctgaggctggaccggcccctggacttctacgagcggccgaacatgaccttctggctgctggtgcgggacactccgggggagaatgtggaacccagccacactgccaccgccacactagtgctgaacgtggtgcccgccgacctgcggcccccgtggttcctgccctgcaccttctcagatggctacgtctgcattcaagctcagtaccacggggctgtccccacggggcacatactgccatctcccctcgtcctgcgtcccggacccatctacgctgaggacggagaccgcggcatcaaccagcccatcatctacagcatctttaggggaaacgtgaatggtacattcatcatccacccagactcgggcaacctcaccgtggccaggagtgtccccagccccatgaccttccttctgctggtgaagggccaacaggccgaccttgcccgctactcagtgacccaggtcaccgtggaggctgtggctgcggccgggagcccgccccgcttcccccagagactgtatcgtggcaccgtggcgcgtggcgctggagcgggcgttgtggtcaaggatgcagctgccccttctcagcctctgaggatccaggctcaggacccggagttctcggacctcaactcggccatcacatatcgaattaccaaccactcacacttccggatggagggagaggttgtgctgaccaccaccacactggcacaggcgggagccttctacgcagaggttgaggcccacaacacggtgacctctggcaccgcaaccacagtcattgagatacaagtttccgaacaggagcccccctccacaggtggcggcccctcggaggacaagcgcttctcggtggtggatatggcggccctgggcggggtgctgggtgcgctgctgctgctggctctccttggcctcgccgtccttgtccacaagcactatggcccccggctcaagtgctgctgtggcaaagctccggagccccagccccaaggctttgacaaccaggcgttcctccctgaccacaaggccaactgggcgcccgtccccagccccacgcacgaccccaagcccgcggaggcaccgatgcccgcagagcccgcaccccccggccctgcctccccaggcggtgcccctgagccccccgcagcggcccgagctggcggaagccccacggcggtgaggtccatcctgaccaaggagcggcggccggagggcgggtacaaggctgtctggtttggcgaggacatcgggacggaggcagacgtggtcgttctcaacgcgcccaccctggacgtggatggcgccagtgactccggcagcggcgatgagggcgagggcgcggggaggggtgggggtccctacgatgcgcccggtggtgatgactcctacatctaagtggcccctccaccctctcccccagccgcacgggcactggaggtctcgctcccccagcctccgacccgaggcagaataaagcaaggctcccgaaa

SEQ ID NO: 4053 - DNA, 3635 bp, Homo sapiens
  source 1..3635: mol_type = unassigned DNA
attctggggctcgggggatcccggacaccctctcagctcctgcccgggggcccatgtgtcccttctgccctgtgcctcggtgcctgtgacctgagccccctggttgacccctgcactcagtccaacttgggccaaacgactgcccctccttctggcagtgggctggaccagccggccagcgggagcccccttggcagaagccggtcgtaaaggatcataaactgggcggcgtctggctggggcgaaggtcgctgaggtaggaactgcgccagtcctagacgccagacccgctcagaccctcctgccaggtgacagccgccaagatggggtcttgggccctgctgtggcctcccctgctgttcaccgggctgctcgtccgacccccggggaccatggcccaggcccagtactgctctgtgaacaaggacatctttgaagtagaggagaacacaaatgtcaccgagccgctggtggacatccacgtcccggagggccaggaggtgaccctcggagccttgtccaccccctttgcatttcggatccagggaaaccagctgtttctcaacgtgactcctgattacgaggagaagtcactgcttgaggctcagctgctgtgtcagagcggaggcacattggtgacccagctaagggtgttcgtgtcagtgctggacgtcaatgacaatgcccccgaattcccctttaagaccaaggagataagggtggaggaggacacgaaagtgaactccaccgtcatccccgagacgcaactgcaggctgaggaccgcgacaaggacgacattctgttctacaccctccaggaaatgacagcaggtgccagtgactacttctccctggtgagtgtaaaccgtcccgccctgaggctggaccggcccctggacttctacgagcggccgaacatgaccttctggctgctggtgcgggacactccgggggagaatgtggaacccagccacactgccaccgccacactagtgctgaacgtggtgcccgccgacctgcggcccccgtggttcctgccctgcaccttctcagatggctacgtctgcattcaagctcagtaccacggggctgtccccacggggcacatactgccatctcccctcgtcctgcgtcccggacccatctacgctgaggacggagaccgcggcatcaaccagcccatcatctacagcatctttaggggaaacgtgaatggtacattcatcatccacccagactcgggcaacctcaccgtggccaggagtgtccccagccccatgaccttccttctgctggtgaagggccaacaggccgaccttgcccgctactcagtgacccaggtcaccgtggaggctgtggctgcggccgggagcccgccccgcttcccccagagactgtatcgtggcaccgtggcgcgtggcgctggagcgggcgttgtggtcaaggatgcagctgccccttctcagcctctgaggatccaggctcaggacccggagttctcggacctcaactcggccatcacatatcgaattaccaaccactcacacttccggatggagggagaggttgtgctgaccaccaccacactggcacaggcgggagccttctacgcagaggttgaggcccacaacacggtgacctctggcaccgcaaccacagtcattgagatacaagtttccgaacaggagcccccctccacagatgtccccccatccccagaggctggaggaacaactgggccctggaccagcaccacttccgaggtccccagaccccctgagccctcccagggaccctccacgaccagctctgggggaggcacaggccctcatccaccctctggcacaactctgaggccaccaacctcgtccacacccggggggcccccgggtgcagaaaacagcacctcccaccaaccagccactcccggtggggacacagcacagaccccaaagccaggaacctctcagccgatgccccccggtgtgggaaccagcacctcccaccaaccagccacacccagtgggggcacagcacagaccccagagccaggaacctctcagccgatgccccccagtatgggaaccagcacctcccaccaaccagccacacccggtgggggcacagcacagaccccagaggcaggaacctctcagccgatgccccccggtatgggaaccagcacctcccaccaaccaaccacacccggtgggggcacagcacagaccccagagccaggaacctctcagccgatgcccctcagcaagagcaccccatcttcaggtggcggcccctcggaggacaagcgcttctcggtggtggatatggcggccctgggcggggtgctgggtgcgctgctgctgctggctctccttggcctcgccgtccttgtccacaagcactatggcccccggctcaagtgctgctgtggcaaagctccggagccccagccccaaggctttgacaaccaggcgttcctccctgaccacaaggccaactgggcgcccgtccccagccccacgcacgaccccaagcccgcggaggcaccgatgcccgcagagcccgcaccccccggccctgcctccccaggcggtgcccctgagccccccgcagcggcccgagctggcggaagccccacggcggtgaggtccatcctgaccaaggagcggcggccggagggcgggtacaaggctgtctggtttggcgaggacatcgggacggaggcagacgtggtcgttctcaacgcgcccaccctggacgtggatggcgccagtgactccggcagcggcgatgagggcgagggcgcggggaggggtgggggtccctacgatgcgcccggtggtgatgactcctacatctaagtggcccctccaccctctcccccagccgcacgggcactggaggtctcgctcccccagcctccgacccgaggcagaataaagcaaggctcccgaaacccaggccatggcgtggggcaggcgcgcgggtccatgggggtcccattcactcagtcccctgtcgtcattagcgcttgagcccaggtgtgcagatgaggcggtgggtctggccacgctgtccccaccccaaggctgcagcacttcccgtaaaccacctgcagtgcccgccgccttcccgaggctctgtgccagctagtctgggaagttcctctcccgctctaaccacagcccgaggggggctcccctcccccgacctgcaccggagatctcaggcacccggctcatctcagacctcccgctcccgaccctacacagagattgcctggggaggctgaggagccgatgcaaacccccaaggcgacgcacttgggagccggtggtctcaaacacctgccgggggtcctagtccccttctgaaatctacatgcttgggttggagcgcagcagtaaacaccctgcccagtgacctggactgaggcgcgctgggggtgggtgcgccgtgtggcctgagcaggagccagaccaggaggcctaggggtgagagacacattcccctcgctgctcccaaagccagagcccaggctgggcgcccatgcccagaaccatcaagggatcccttgcggcttgtcagcactttccctaatggaaatacaccattaattcctttccaaatgtttt

SEQ ID NO: 4054 - DNA, 3489 bp, Homo sapiens
  source 1..3489: mol_type = unassigned DNA
tgggctggaccagccggccagcgggagcccccttggcagaagccggtcgtaaaggatcataaactgggcggcgtctggctggggcgaaggtcgctgaggtaggaactgcgccagtcctagacgccagacccgctcagaccctcctgccaggtgacagccgccaagatggggtcttgggccctgctgtggcctcccctgctgttcaccgggctgctcgtccgacccccggggaccatggcccaggcccagtactgctctgtgaacaaggacatctttgaagtagaggagaacacaaatgtcaccgagccgctggtggacatccacgtcccggagggccaggaggtgaccctcggagccttgtccaccccctttgcatttcggatccagggaaaccagctgtttctcaacgtgactcctgattacgaggagaagtcactgcttgaggctcagctgctgtgtcagagcggaggcacattggtgacccagctaagggtgttcgtgtcagtgctggacgtcaatgacaatgcccccgaattcccctttaagaccaaggagataagggtggaggaggacacgaaagtgaactccaccgtcatccccgagacgcaactgcaggctgaggaccgcgacaaggacgacattctgttctacaccctccaggaaatgacagcaggtgccagtgactacttctccctggtgagtgtaaaccgtcccgccctgaggctggaccggcccctggacttctacgagcggccgaacatgaccttctggctgctggtgcgggacactccgggggagaatgtggaacccagccacactgccaccgccacactagtgctgaacgtggtgcccgccgacctgcggcccccgtggttcctgccctgcaccttctcagatggctacgtctgcattcaagctcagtaccacggggctgtccccacggggcacatactgccatctcccctcgtcctgcgtcccggacccatctacgctgaggacggagaccgcggcatcaaccagcccatcatctacagcatctttaggggaaacgtgaatggtacattcatcatccacccagactcgggcaacctcaccgtggccaggagtgtccccagccccatgaccttccttctgctggtgaagggccaacaggccgaccttgcccgctactcagtgacccaggtcaccgtggaggctgtggctgcggccgggagcccgccccgcttcccccagagactgtatcgtggcaccgtggcgcgtggcgctggagcgggcgttgtggtcaaggatgcagctgccccttctcagcctctgaggatccaggctcaggacccggagttctcggacctcaactcggccatcacatatcgaattaccaaccactcacacttccggatggagggagaggttgtgctgaccaccaccacactggcacaggcgggagccttctacgcagaggttgaggcccacaacacggtgacctctggcaccgcaaccacagtcattgagatacaagtttccgaacaggagcccccctccacagatgtccccccatccccagaggctggaggaacaactgggccctggaccagcaccacttccgaggtccccagaccccctgagccctcccagggaccctccacgaccagctctgggggaggcacaggccctcatccaccctctggcacaactctgaggccaccaacctcgtccacacccggggggcccccgggtgcagaaaacagcacctcccaccaaccagccactcccggtggggacacagcacagaccccaaagccaggaacctctcagccgatgccccccggtgtgggaaccagcacctcccaccaaccagccacacccagtgggggcacagcacagaccccagagccaggaacctctcagccgatgccccccagtatgggaaccagcacctcccaccaaccagccacacccggtgggggcacagcacagaccccagaggcaggaacctctcagccgatgccccccggtatgggaaccagcacctcccaccaaccaaccacacccggtgggggcacagcacagaccccagagccaggaacctctcagccgatgcccctcagcaagagcaccccatcttcaggtggcggcccctcggaggacaagcgcttctcggtggtggatatggcggccctgggcggggtgctgggtgcgctgctgctgctggctctccttggcctcgccgtccttgtccacaagcactatggcccccggctcaagtgctgctgtggcaaagctccggagccccagccccaaggctttgacaaccaggcgttcctccctgaccacaaggccaactgggcgcccgtccccagccccacgcacgaccccaagcccgcggaggcaccgatgcccgcagagcccgcaccccccggccctgcctccccaggcggtgcccctgagccccccgcagcggcccgagctggcggaagccccacggcggtgaggtccatcctgaccaaggagcggcggccggagggcgggtacaaggctgtctggtttggcgaggacatcgggacggaggcagacgtggtcgttctcaacgcgcccaccctggacgtggatggcgccagtgactccggcagcggcgatgagggcgagggcgcggggaggggtgggggtccctacgatgcgcccggtggtgatgactcctacatctaagtggcccctccaccctctcccccagccgcacgggcactggaggtctcgctcccccagcctccgacccgaggcagaataaagcaaggctcccgaaacccaggccatggcgtggggcaggcgcgcgggtccatgggggtcccattcactcagtcccctgtcgtcattagcgcttgagcccaggtgtgcagatgaggcggtgggtctggccacgctgtccccaccccaaggctgcagcacttcccgtaaaccacctgcagtgcccgccgccttcccgaggctctgtgccagctagtctgggaagttcctctcccgctctaaccacagcccgaggggggctcccctcccccgacctgcaccggagatctcaggcacccggctcatctcagacctcccgctcccgaccctacacagagattgcctggggaggctgaggagccgatgcaaacccccaaggcgacgcacttgggagccggtggtctcaaacacctgccgggggtcctagtccccttctgaaatctacatgcttgggttggagcgcagcagtaaacaccctgcccagtgacctggactgaggcgcgctgggggtgggtgcgccgtgtggcctgagcaggagccagaccaggaggcctaggggtgagagacacattcccctcgctgctcccaaagccagagcccaggctgggcgcccatgcccagaaccatcaagggatcccttgcggcttgtcagcactttccctaatggaaatacaccattaattcctttccaaatgttttaattgtgagagt

SEQ ID NO: 4055 - DNA, 2533 bp, Homo sapiens
  source 1..2533: mol_type = unassigned DNA
agggagagaactctggaggaacgctgagctgagcagcaccgaggacagcgcccggcagcgcccgcgcccaggtctccctccgcagccctgactcgcgcacacgctgagcttttgctcactccccctcgcgcggacacagacacacgcatattcacacacccagacacacaccccgctgtacaatggcagaatcccacctgcagtcatccctcatcacagcctcacagtttttcgagatctggctccatttcgacgctgacggaagtggttacctggaaggaaaggagctgcagaacttgatccaggagctccagcaggcgcgaaagaaggctggattggagttatcacctgaaatgaaaacttttgtggatcagtatgggcaaagagatgatggaaaaataggaattgtagagttggctcacgtattacccacagaagagaatttcctgctgctcttccgatgccagcagctgaagtcctgtgaggaattcatgaagacatggagaaaatatgatactgaccacagtggcttcatagaaactgaggagcttaagaactttctaaaggacctgctagaaaaagcaaacaagactgttgatgacacaaaattagccgagtatacagacctaatgctgaaactatttgattcaaataatgatgggaagctggaattaactgagatggccaggttactaccagtgcaggagaattttcttcttaaattccagggaatcaaaatgtgtgggaaagagttcaataaggcttttgagctgtatgatcaggacggcaatggatacatagatgaaaatgaactggatgctttactgaaggatctgtgcgagaagaataaacaggatctggatattaataatattacaacatacaagaagaacataatggctttgtcggatggagggaagctgtaccgaacggatcttgctcttattctctgtgctggggataactagagttggtggccgcaaccacttgctagtgatacactgtatctaaaaaataactgtgcactataagggagtaggctgtattttcttttatatctgtaaatttaactgcatatagataattatccaggatgtgtggctcattcttttcagcttgtttctatactgtttgtaatatacagtttttgtaaccatatgattgaaaagaagaaagtctatgcttaggccagtcagtacacccaattttaaaaaataacatattcttgctttcacaaatatagttgaacaagatttccctaaaaattccaccaggattaatctctaaaattctagtctctgatttgcaaatgcacatttgtcactgaataatggaattatgtataacaagccaaacattcttattttagacaaccatagaactgtcccacaaaatatttctaagcttatttctaactattaggaggaatgtgcttttccatctaaaatactcaccaaaatatagttaattgtggctttatgaagttaacagtctcattacagatttagtttaccaatcaacagcatgtctactgcttggatccatacaaaactatcggttcaagttgatgtgacaagggaagggagcaccagatgacacataaatctgtctgattctatgcctgtatttccaacaaacttactgtcagagaatatgacctaaatccattttctaaactgttttcatgtgttgcaaattattctagtcaactgctgttttatgtcatactctgtgtaatctctgattaaatttaatatactgcatatcctggtgtctagtttgcatacttcctggattttctttctatgtagaactgttcatttccaccaagggtatctgctgcctctgaaaatatttttttctagctataacaactctattttttactacataattaaattttaatgtaaaattcatagcatcctgattattgaatgttatatcatcaatacttttgtgtattctgtggattctatatttcatattgagatcagcattcaaaatagttctatttctatctgcaaatagtttcaaatgagtttaaaaaaataacatctgaaaagaaatgctaatgtaatcatttatcttatctagcaagaagattctaaaacattctttaacatacatctaagtcagtttcacatatttgtagctagaatatcctatactggttatagttgatatgtaacagttggtgattttagatttctttgattgtgaaacagggagctatgagagatgtgtccatgtgaaatttacagttactgcctaggagttaatgatcgttctgggtcagcttgaatgtccccattctataaattcaacacttattttctgaattcataaaaataaccaaaaaatgtgagctataatgtttccctcaagaacaaacagaaacgagatttgccaaaaactaaaattcaacaaatgatgttgagtgggagattggctttgcctttagcgtgtaaatggaagcactgccattagactgaatttaactactaagaataaataaagaagaaaataaccttaa

SEQ ID NO: 4056 - DNA, 1490 bp, Homo sapiens
  source 1..1490: mol_type = unassigned DNA
aagaaacagatctgcagattatggatctcttactctatcaccaattattattgttgtgatgttgatgtagttggggagatgagaaaacatcttgtcctcactaagggagttatcacctgaaatgaaaacttttgtggatcagtatgggcaaagagatgatggaaaaataggaattgtagagttggctcacgtattacccacagaagagaatttcctgctgctcttccgatgccagcagctgaagtcctgtgaggaattcatgaagacatggagaaaatatgatactgaccacagtggcttcatagaaactgaggagcttaagaactttctaaaggacctgctagaaaaagcaaacaagactgttgatgacacaaaattagccgagtatacagacctaatgctgaaactatttgattcaaataatgatgggaagctggaattaactgagatggccaggttactaccagtgcaggagaattttcttcttaaattccagggaatcaaaatgtgtgggaaagagttcaataaggcttttgagctgtatgatcaggacggcaatggatacatagatgaaaatgaactggatgctttactgaaggatctgtgcgagaagaataaacaggatctggatattaataatattacaacatacaagaagaacataatggctttgtcggatggagggaagctgtaccgaacggatcttgctcttattctctgtgctggggataactagagttggtggccgcaaccacttgctagtgatacactgtatctaaaaaataactgtgcactataagggagtaggctgtattttcttttatatctgtaaatttaactgcatatagataattatccaggatgtgtggctcattcttttcagcttgtttctatactgtttgtaatatacagtttttgtaaccatatgattgaaaagaagaaagtctatgcttaggccagtcagtacacccaattttaaaaaataacatattcttgctttcacaaatatagttgaacaagatttccctaaaaattccaccaggattaatctctaaaattctagtctctgatttgcaaatgcacatttgtcactgaataatggaattatgtataacaagccaaacattcttattttagacaaccatagaactgtcccacaaaatatttctaagcttatttctaactattaggaggaatgtgcttttccatctaaaatactcaccaaaatatagttaattgtggctttatgaagttaacagtctcattacagatttagtttaccaatcaacagcatgtctactgcttggatccatacaaaactatcggttcaagttgatgtgacaagggaagggagcaccagatgacacataaatctgtctgattctatgcctgtatttccaacaaacttactgtcagagaatatgacctaaatccattttctaaactgttttcatgtgttgcaaattattctagtcaactgctgttttatg

SEQ ID NO: 4057 - DNA, 1466 bp, Homo sapiens
  source 1..1466: mol_type = unassigned DNA
caaccccagcgcgagtgccagagcccagccggcgcggagcgggagcggtgcaggctgaggtctccgagcggctcgccatggctggcccgcagcagcagcccccttacctgcacctggccgagctgacggcgtcccagttcctggaaatatggaagcactttgacgcagacggaaatgggtatattgaaggtaaagagctagaaaactttttccaagagctggagaaggcaaggaaaggctctggcatgatgtcaaagagtgacaactttggagaaaagatgaaggagttcatgcagaagtatgataaaaactcagatgggaaaatcgagatggcagagctggcgcagatcctgccaaccgaagagaacttccttctgtgcttcaggcagcacgtgggctccagcgccgagtttatggaggcttggcggaagtacgacacagacaggagtggctacatcgaagccaatgagctcaagggattcctgtcagacctgctgaagaaggcgaaccggccgtacgatgagcccaagctccaggaatacacccaaaccatactacggatgtttgacttgaacggggatggcaaattgggcctctcagagatgtcccgactcctgcctgtccaggaaaacttcctgcttaaatttcagggcatgaagctgacctcagaggagtttaacgcgatcttcacattttacgacaaggatagaagcggctacattgacgagcatgagctggatgcccttttgaaggatctgtacgagaaaaacaaaaaggaaatgaatattcaacagctcaccaactacagaaagagcgtcatgtccttggcagaggcagggaagctctaccgcaaggacctggagattgtgctctgcagcgagccccccatgtaaagtggggacgggggctgcttctccacctcccccaaaccctgcttctgctgccctgatgcgtctacccagactcagagaccgtgagcgccccgcccccacccctacagcctgcacacacctgcctgcagagcaggaaatgagagatagaggatgggcagctggggggctgtcctgagccccctgcacccacccctgcccaggcagtctttgctcagtggatcacacacatggaaggtgatgggggcatgggtggagggtccctaattctcttcgctgtgatgcatgagctccctcgctgtatgatttaggcttctatgtccaacagagtggactcttccctctcgctcccctctgccggtcccccatgccaccacccaccccaaacttccaggttccatccaccaccttgccaatggtgtagctgtcctctcagaactcctgtgtgtggaaggcacccgccctttccttgccttctttactcggcgtgctccttttctctttgggtttcttgtttaccaaagaagagtttacagacaataaaatggaaaggtcctgctgtggaaacttacccaa

SEQ ID NO: 4058 - DNA, 1373 bp, Homo sapiens
  source 1..1373: mol_type = unassigned DNA
gcacaaccccagcgcgagtgccagagcccagccggcgcggagcgggagcggtgcaggctgaggtctccgagcggctcgccatggctggcccgcagcagcagcccccttacctgcacctggccgagctgacggcgtcccagttcctggaaatatggaagcactttgacgcagacggaaatgggtatattgaaggtaaagagctagaaaactttttccaagagctggagaaggcaaggaaaggctctggcatgatgtcaaagagtgacaactttggagaaaagatgaaggagttcatgcagaagtatgataaaaactcagatgggaaaatcgagatggcagagctggcgcagatcctgccaaccgaagagaacttccttctgtgcttcaggcagcacgtgggctccagcgccgagtttatggaggcttggcggaagtacgacacagacaggagtggctacatcgaagccaatgagctcaagggattcctgtcagacctgctgaagaaggcgaaccggccgtacgatgagcccaagctccaggaatacacccaaaccatactacggatgtttgacttgaacggggatggcaaattgggcctctcagagatgtcccggatagaagcggctacattgacgagcatgagctggatgcccttttgaaggatctgtacgagaaaaacaaaaaggaaatgaatattcaacagctcaccaactacagaaagagcgtcatgtccttggcagaggcagggaagctctaccgcaaggacctggagattgtgctctgcagcgagccccccatgtaaagtggggacgggggctgcttctccacctcccccaaaccctgcttctgctgccctgatgcgtctacccagactcagagaccgtgagcgccccgcccccacccctacagcctgcacacacctgcctgcagagcaggaaatgagagatagaggatgggcagctggggggctgtcctgagccccctgcacccacccctgcccaggcagtctttgctcagtggatcacacacatggaaggtgatgggggcatgggtggagggtccctaattctcttcgctgtgatgcatgagctccctcgctgtatgatttaggcttctatgtccaacagagtggactcttccctctcgctcccctctgccggtcccccatgccaccacccaccccaaacttccaggttccatccaccaccttgccaatggtgtagctgtcctctcagaactcctgtgtgtggaaggcacccgccctttccttgccttctttactcggcgtgctccttttctctttgggtttcttgtttaccaaagaagagtttacagacaataaaatggaaaggtcctgctgtggaaacttaccc

SEQ ID NO: 4059 - DNA, 7222 bp, Homo sapiens
  source 1..7222: mol_type = unassigned DNA
agccggacggcgcggtggtcgggacagactggccgttgctgtggagacgcctggagagttgtggactggggcaacctttgccagtgatgagaagtgatgctcgtggcagtgctgaatctctctgaatatgattcgaattgcagccttaaatgccagctccaccattgaggatgatcatgaaggaagctttaaaagtcacaaaacccagacaaaggaggctcaggaagcagaggcttttgcattgtaccacaaggcccttgatctgcagaaacatgaccggtttgaggagtctgccaaagcctaccatgagctcttggaggcgagcctgctgcgggaggcagtttcatccggtgatgagaaagaggggttgaaacaccctgggctgatactgaaatattccacttataagaacttggcccagctggcagcccagcgggaggatctggagacagccatggagttctacttagaggcagtgatgctggactccacagatgtcaacctctggtataagattggacatgtggccctgaggctcatccggatccccctggctcgccatgcttttgaggaagggctgcggtgcaatcctgaccactggccctgtttggataacctaatcactgtcctgtacaccctcagtgattacacaacatgtctgtacttcatctgcaaagctttggagaaggattgccggtacagcaaagggctggtcctcaaggagaagatttttgaggagcagccttgtctccggaaggactctctcagaatgttcctcaaatgtgacatgtcgattcacgatgtttcggtgagtgcagctgagacacaggcgattgtagatgaggccttggggctgcgaaaaaagaggcaagcgctgattgtgcgggagaaggagccggacctgaaacttgtgcagcccattcctttcttcacctggaagtgcctcggagagagcttgctggccatgtacaatcatctcaccacctgtgagcccccacgtcccagccttggcaaaaggattgatttgtcggactaccaggaccccagccagcctcttgagtcctccatggtggtgacgccagttaacgtgatccagccaagcactgtcagcaccaacccagctgtggctgtcgccgagcctgtggtctcctacacctctgtggctacaaccagcttcccactgcacagtcctggtctgttggagacaggcgctcctgtgggtgatatttctgggggagataaatccaagaaaggggtaaaacggaagaagatttcagaagagagtggagaaacagcaaagcggcggtctgcccgtgtccgaaacaccaagtgcaaaaaagaagagaaagtagacttccaggagcttctgatgaagttcttgccgtccaggttaagaaagctggaccctgaggaggaagatgattcctttaataactatgaagtccagtcagaagccaaactggaaagcttcccaagcattgggcctcaaaggctgtcatttgactcagccacattcatggaatctgaaaagcaggacgtgcatgagttcctgctggagaacctaaccaacgggggcatcctggagctgatgatgcgctacctgaaagccatgggccacaagttcttggtaaggtggcctccaggcttggcggaggtcgtgctcagcgtctaccacagctggaggaggcacagcaccagcctgcccaacccgctgctgagggactgcagcaacaagcacatcaaggacatgatgctgatgtctctctcctgcatggaactccagctggaccagtggctgctgaccaaaggcagaagctctgcagtgtctcctcggaactgtcctgctggtatggtgaatggcagatttggacctgacttcccagggacccactgcctgggtgacctcctacagctgtcatttgcctcgtcccagcgcgacctgttcgaggatggttggctggagtttgtggtccgtgtttactggctgaaggctcgcttcctggcgctgcagggagacatggagcaggccctggagaactatgacatctgcacagaaatgctccagagttccaccgccatccaggtggaggcaggggctgaacgaagagacattgtcatccggctgcccaacctccataatgactctgtggtttccctggaggagattgataagaacctgaagtcgctggagcggtgccagtccctggaggagattcagcggctgtatgaagcaggcgactacaaggctgttgtgcatctgctccgccccactttgtgcaccagtgggtttgaccgggccaaacacctggagtttatgacttccattcctgagaggccagcccagctgcttcttctgcaggactccttgctccggctgaaggactatcggcagtgttttgagtgttccgatgtggctctgaacgaggctgtccagcagatggtgaactcaggtgaggctgccgccaaggaggagtgggtggccacagtgacccaactgctgatgggcatcgagcaggccctctctgcggacagcagtggtagcatcctgaaggtatcatcctccaccactggccttgtgcggctcaccaacaacctcatccaggtcattgactgcagcatggctgtgcaggaggaggccaaggagccccacgtctcttcagtgctaccctggatcattctacaccggatcatctggcaggaggaagacaccttccattctctgtgccaccagcagcagctccaaaacccagcggaggaagggatgtcagagacgcccatgctcccatcctccctcatgctgctgaacacagcccacgagtatttgggcagaaggtcctggtgctgcaattcagatggggctctgctgcgattctatgtgcgagtactccagaaggaactggctgcatccacctctgaagacacgcacccttacaaggaggagctggagacagccttggagcagtgcttctactgcctgtacagcttccccagcaagaagagtaaggccaggtacctggaggaacactcggcccagcaggtggatcttatatgggaggatgcactgttcatgtttgagtattttaagcccaagacccttcctgaatttgacagctataagaccagcaccgtgtctgctgacttggccaacctactgaagagaattgccaccattgtgcctcgcacagagaggccagcccttagcctggacaaagtctctgcctacattgagggaacttcaactgaggtaccctgcctcccagagggggctgacccctcccctccagtggtgaacgagctttactacctcctggctgattatcatttcaaaaacaaggagcagtccaaggccatcaagttctacatgcatgacatctgcatctgccccaataggtttgattcctgggcaggcatggctctggcccgggccagccgcattcaggacaagctgaactccaatgagctgaagagtgatgggcccatttggaagcatgccacgcccgtcttgaactgcttccgtcgggccctggagattgacagctccaacttgtccctatggattgagtatggcaccatgtcctatgccttgcactcattcgcctcacgtcaattgaagcagtggagaggcgagctgccccctgagctcgtgcagcagatggagggccggcgcgacagcatgctagagacagccaagcactgtttcacatcagcagcccgctgcgagggtgatggtgacgaggaggagtggctcatccactacatgctgggcaaggtggctgagaagcagcagcagccacccaccgtttacttgctgcactacaggcaggctggccactacctgcacgaggaggctgcccgctaccccaagaagatccactaccacaacccacctgagctggccatggaggccctggaggtgtactttcggctccatgcttccatcctgaagctcctggggaagcccgattctggggttggtgcagaggtcctggtcaactttatgaaggaggctgcagaaggaccctttgccaggggcgaggagaagaacacacccaaagcttcagaaaaggagaaggcctgcctggtggacgaggactcccactcttcagctgggacactgccgggccccggagcctccctcccctcctcctctggcccaggtctgacatccccaccttacacagccactccgattgaccacgattacgtcaaatgtaaaaaaccccaccagcaggcaacgccggacgaccgaagccaggacagcacagccgtagcactctcagactctagctcaacgcaggacttctttaatgagcccaccagcttactggaaggctccaggaaatcctacacagagaagaggctgcccattctcagttcccaagcaggagcgacgggtaaagatcttcagggggccacagaagaaagaggaaaaaacgaggagtcattggagagtacagaaggcttccgggctgcagagcaaggtgtccagaagcctgctgcagaaaccccagcctctgcttgcatccctggcaagccctcagcatccacacccaccctgtgggatgggaagaagagaggggacctcccaggggagccagtggccttcccccaggggctgccggctggtgctgaggagcagcggcagtttctcacagagcagtgcatcgcctccttccgcctgtgcctgagccgcttcccccagcactataagagtctctaccgtctggccttcctctacacctacagcaagacccaccggaacctccagtgggcccgcgacgtgttgctaggcagcagtatcccgtggcaacaactgcagcacatgccggcacaggggctcttctgcgagaggaacaagaccaatttcttcaacggcatctggcggatccccgtggacgagattgaccggccgggcagctttgcctggcacatgaaccgctccatcgtgctgctgctcaaggtgctggcccagctgcgggaccacagcaccctgctgaaggtgtcctccatgcttcagcggaccccagaccagggcaagaagtatctgcgagatgctgaccgccaggtcctggcgcagcgggccttcatcctcactgtgaaggtgctcgaagacacgctgagcgagctcgcagaggggtcagaacgcccagggcccaaggtctgtggcctccccggagccaggatgaccaccgatgtctcacacaaggccagtcctgaggatggccaggagggcctcccccagccgaagaagccccctctggctgatggctcagggccagggcccgagccaggaggcaaagtgggcctcctcaaccaccggcctgtggccatggatgcaggagacagtgcagaccaaagcggggagcggaaggataaagagagcccacgggcagggcccactgagcccatggacacgagtgaggccactgtttgccactcagacttggagcggacaccacccctgctgccaggtcgccccgcaagggaccggggccccgagagccggcccactgagctgtccctggaggagctgagcatcagtgcccggcagcagcccaccccgctcaccccagcccagccagcccccgcccccgcccccgccaccaccacagggaccagggcagggggccacccggaggagccgctctcccggctcagccgcaagaggaagctcctggaggacacagagtcaggcaagacacttctgttggatgcctaccgtgtgtggcagcagggccagaagggtgtggcctatgacctgggccgtgtggagaggatcatgtcggagacctacatgctcatcaagcaggtggatgaggaggctgcgctggagcaggctgtgaagttctgccaggtccatcttggggctgccgcccagagacaggcctcgggggacacccccaccactccaaagcaccccaaagacagccgagagaacttctttcctgtgacagtggtgcccacagcccctgaccctgtgccagctgactctgtccagcggcccagtgatgctcacaccaagcctcgccctgcactagctgccgccacaactattatcacctgccctccgtcagcatcagcttccaccctggaccagtccaaggaccctgggcctccccggccacacaggcctgaagctacccccagcatggcctctctgggcccagagggagaagagctggcgagagtggcagagggcaccagcttcccgcctcaggagccacggcacagtccgcaggtgaagatggcccccacaagttccccggcagagccacactgctggccggcagaggctgccctgggcacaggcgctgagcccacctgcagccaggaggggaaactgaggcctgagccgagaagggatggggaggctcaggaggctgcgagtgagactcagcccctgagctctcccccaacagctgccagctccaaggcccccagcagtgggagtgcccagccaccagagggtcacccaggcaagcctgagcccagccgggctaagtcccgccccctgcccaacatgccaaagctggtcatcccctccgccgccaccaagttcccccctgagatcaccgtcacgccacccaccccaaccctgctctcccccaaaggcagcatctcggaggagaccaagcagaagctgaagtcagccatcctttctgcccagtctgctgccaacgtgaggaaggagagcctatgccagccagccctggaggtcctggagacatccagccaggagtcctcgctggagagcgagacagacgaggacgacgactacatggacatttgaggggccactgcagccccaccgccacgccccaggggaccagccaggcctggaatgccccctgggcaggaccctgggcaggaccagaggcccacatggatgccactccccacacagcccccaggcctgcccagcccacctcctcatggcatcctccctgtacccaggtcaggctgtccacaccacatgggagcccagaggaggaggggcccgccttagccatgtgaaggtggattggtcgccatctgcacgccaggcggcatccttttctatgaagtgttgactttgtaaatctgcccacacccagctggccatatccacccctcgacgccgggatgagccggctctgcctgtgtcacagtggaggggtcctttagggccaggctcacccctcaccctttttttggttgcttttctaataaagatggaacagtt

SEQ ID NO: 4060 - DNA, 7480 bp, Homo sapiens
  source 1..7480: mol_type = unassigned DNA
ctcagcagagcccggggcacaggccggaggggctgcaggcgcgaggctgggttacgtgaggaagctgggggtttcgcgggcagctttagagccccagtcagggaaaccgaggccgggcttcctggctgcctcgcgagcctcttcatggctctcgccgccgccctgaggtgcctagaatgggttccggcctccggggaggttcccagtaaccgcaggagccaccattgatttggcgtctgctgggtgcaaagcccagcgcgctaaccctttactcgcgacctttcgcttcaccttcacagcagccctgcgaggagagttgtggactggggcaacctttgccagtgatgagaagtgatgctcgtggcagtgctgaatctctctgaatatgattcgaattgcagccttaaatgccagctccaccattgaggatgatcatgaaggaagctttaaaagtcacaaaacccagacaaaggaggctcaggaagcagaggcttttgcattgtaccacaaggcccttgatctgcagaaacatgaccggtttgaggagtctgccaaagcctaccatgagctcttggaggcgagcctgctgcgggaggcagtttcatccggtgatgagaaagaggggttgaaacaccctgggctgatactgaaatattccacttataagaacttggcccagctggcagcccagcgggaggatctggagacagccatggagttctacttagaggcagtgatgctggactccacagatgtcaacctctggtataagattggacatgtggccctgaggctcatccggatccccctggctcgccatgcttttgaggaagggctgcggtgcaatcctgaccactggccctgtttggataacctaatcactgtcctgtacaccctcagtgattacacaacatgtctgtacttcatctgcaaagctttggagaaggattgccggtacagcaaagggctggtcctcaaggagaagatttttgaggagcagccttgtctccggaaggactctctcagaatgttcctcaaatgtgacatgtcgattcacgatgtttcggtgagtgcagctgagacacaggcgattgtagatgaggccttggggctgcgaaaaaagaggcaagcgctgattgtgcgggagaaggagccggacctgaaacttgtgcagcccattcctttcttcacctggaagtgcctcggagagagcttgctggccatgtacaatcatctcaccacctgtgagcccccacgtcccagccttggcaaaaggattgatttgtcggactaccaggaccccagccagcctcttgagtcctccatggtggtgacgccagttaacgtgatccagccaagcactgtcagcaccaacccagctgtggctgtcgccgagcctgtggtctcctacacctctgtggctacaaccagcttcccactgcacagtcctggtctgttggagacaggcgctcctgtgggtgatatttctgggggagataaatccaagaaaggggtaaaacggaagaagatttcagaagagagtggagaaacagcaaagcggcggtctgcccgtgtccgaaacaccaagtgcaaaaaagaagagaaagtagacttccaggagcttctgatgaagttcttgccgtccaggttaagaaagctggaccctgaggaggaagatgattcctttaataactatgaagtccagtcagaagccaaactggaaagcttcccaagcattgggcctcaaaggctgtcatttgactcagccacattcatggaatctgaaaagcaggacgtgcatgagttcctgctggagaacctaaccaacgggggcatcctggagctgatgatgcgctacctgaaagccatgggccacaagttcttggtaaggtggcctccaggcttggcggaggtcgtgctcagcgtctaccacagctggaggaggcacagcaccagcctgcccaacccgctgctgagggactgcagcaacaagcacatcaaggacatgatgctgatgtctctctcctgcatggaactccagctggaccagtggctgctgaccaaaggcagaagctctgcagtgtctcctcggaactgtcctgctggtatggtgaatggcagatttggacctgacttcccagggacccactgcctgggtgacctcctacagctgtcatttgcctcgtcccagcgcgacctgttcgaggatggttggctggagtttgtggtccgtgtttactggctgaaggctcgcttcctggcgctgcagggagacatggagcaggccctggagaactatgacatctgcacagaaatgctccagagttccaccgccatccaggtggaggcaggggctgaacgaagagacattgtcatccggctgcccaacctccataatgactctgtggtttccctggaggagattgataagaacctgaagtcgctggagcggtgccagtccctggaggagattcagcggctgtatgaagcaggcgactacaaggctgttgtgcatctgctccgccccactttgtgcaccagtgggtttgaccgggccaaacacctggagtttatgacttccattcctgagaggccagcccagctgcttcttctgcaggactccttgctccggctgaaggactatcggcagtgttttgagtgttccgatgtggctctgaacgaggctgtccagcagatggtgaactcaggtgaggctgccgccaaggaggagtgggtggccacagtgacccaactgctgatgggcatcgagcaggccctctctgcggacagcagtggtagcatcctgaaggtatcatcctccaccactggccttgtgcggctcaccaacaacctcatccaggtcattgactgcagcatggctgtgcaggaggaggccaaggagccccacgtctcttcagtgctaccctggatcattctacaccggatcatctggcaggaggaagacaccttccattctctgtgccaccagcagcagctccaaaacccagcggaggaagggatgtcagagacgcccatgctcccatcctccctcatgctgctgaacacagcccacgagtatttgggcagaaggtcctggtgctgcaattcagatggggctctgctgcgattctatgtgcgagtactccagaaggaactggctgcatccacctctgaagacacgcacccttacaaggaggagctggagacagccttggagcagtgcttctactgcctgtacagcttccccagcaagaagagtaaggccaggtacctggaggaacactcggcccagcaggtggatcttatatgggaggatgcactgttcatgtttgagtattttaagcccaagacccttcctgaatttgacagctataagaccagcaccgtgtctgctgacttggccaacctactgaagagaattgccaccattgtgcctcgcacagagaggccagcccttagcctggacaaagtctctgcctacattgagggaacttcaactgaggtaccctgcctcccagagggggctgacccctcccctccagtggtgaacgagctttactacctcctggctgattatcatttcaaaaacaaggagcagtccaaggccatcaagttctacatgcatgacatctgcatctgccccaataggtttgattcctgggcaggcatggctctggcccgggccagccgcattcaggacaagctgaactccaatgagctgaagagtgatgggcccatttggaagcatgccacgcccgtcttgaactgcttccgtcgggccctggagattgacagctccaacttgtccctatggattgagtatggcaccatgtcctatgccttgcactcattcgcctcacgtcaattgaagcagtggagaggcgagctgccccctgagctcgtgcagcagatggagggccggcgcgacagcatgctagagacagccaagcactgtttcacatcagcagcccgctgcgagggtgatggtgacgaggaggagtggctcatccactacatgctgggcaaggtggctgagaagcagcagcagccacccaccgtttacttgctgcactacaggcaggctggccactacctgcacgaggaggctgcccgctaccccaagaagatccactaccacaacccacctgagctggccatggaggccctggaggtgtactttcggctccatgcttccatcctgaagctcctggggaagcccgattctggggttggtgcagaggtcctggtcaactttatgaaggaggctgcagaaggaccctttgccaggggcgaggagaagaacacacccaaagcttcagaaaaggagaaggcctgcctggtggacgaggactcccactcttcagctgggacactgccgggccccggagcctccctcccctcctcctctggcccaggtctgacatccccaccttacacagccactccgattgaccacgattacgtcaaatgtaaaaaaccccaccagcaggcaacgccggacgaccgaagccaggacagcacagccgtagcactctcagactctagctcaacgcaggacttctttaatgagcccaccagcttactggaaggctccaggaaatcctacacagagaagaggctgcccattctcagttcccaagcaggagcgacgggtaaagatcttcagggggccacagaagaaagaggaaaaaacgaggagtcattggagagtacagaaggcttccgggctgcagagcaaggtgtccagaagcctgctgcagaaaccccagcctctgcttgcatccctggcaagccctcagcatccacacccaccctgtgggatgggaagaagagaggggacctcccaggggagccagtggccttcccccaggggctgccggctggtgctgaggagcagcggcagtttctcacagagcagtgcatcgcctccttccgcctgtgcctgagccgcttcccccagcactataagagtctctaccgtctggccttcctctacacctacagcaagacccaccggaacctccagtgggcccgcgacgtgttgctaggcagcagtatcccgtggcaacaactgcagcacatgccggcacaggggctcttctgcgagaggaacaagaccaatttcttcaacggcatctggcggatccccgtggacgagattgaccggccgggcagctttgcctggcacatgaaccgctccatcgtgctgctgctcaaggtgctggcccagctgcgggaccacagcaccctgctgaaggtgtcctccatgcttcagcggaccccagaccagggcaagaagtatctgcgagatgctgaccgccaggtcctggcgcagcgggccttcatcctcactgtgaaggtgctcgaagacacgctgagcgagctcgcagaggggtcagaacgcccagggcccaaggtctgtggcctccccggagccaggatgaccaccgatgtctcacacaaggccagtcctgaggatggccaggagggcctcccccagccgaagaagccccctctggctgatggctcagggccagggcccgagccaggaggcaaagtgggcctcctcaaccaccggcctgtggccatggatgcaggagacagtgcagaccaaagcggggagcggaaggataaagagagcccacgggcagggcccactgagcccatggacacgagtgaggccactgtttgccactcagacttggagcggacaccacccctgctgccaggtcgccccgcaagggaccggggccccgagagccggcccactgagctgtccctggaggagctgagcatcagtgcccggcagcagcccaccccgctcaccccagcccagccagcccccgcccccgcccccgccaccaccacagggaccagggcagggggccacccggaggagccgctctcccggctcagccgcaagaggaagctcctggaggacacagagtcaggcaagacacttctgttggatgcctaccgtgtgtggcagcagggccagaagggtgtggcctatgacctgggccgtgtggagaggatcatgtcggagacctacatgctcatcaagcaggtggatgaggaggctgcgctggagcaggctgtgaagttctgccaggtccatcttggggctgccgcccagagacaggcctcgggggacacccccaccactccaaagcaccccaaagacagccgagagaacttctttcctgtgacagtggtgcccacagcccctgaccctgtgccagctgactctgtccagcggcccagtgatgctcacaccaagcctcgccctgcactagctgccgccacaactattatcacctgccctccgtcagcatcagcttccaccctggaccagtccaaggaccctgggcctccccggccacacaggcctgaagctacccccagcatggcctctctgggcccagagggagaagagctggcgagagtggcagagggcaccagcttcccgcctcaggagccacggcacagtccgcaggtgaagatggcccccacaagttccccggcagagccacactgctggccggcagaggctgccctgggcacaggcgctgagcccacctgcagccaggaggggaaactgaggcctgagccgagaagggatggggaggctcaggaggctgcgagtgagactcagcccctgagctctcccccaacagctgccagctccaaggcccccagcagtgggagtgcccagccaccagagggtcacccaggcaagcctgagcccagccgggctaagtcccgccccctgcccaacatgccaaagctggtcatcccctccgccgccaccaagttcccccctgagatcaccgtcacgccacccaccccaaccctgctctcccccaaaggcagcatctcggaggagaccaagcagaagctgaagtcagccatcctttctgcccagtctgctgccaacgtgaggaaggagagcctatgccagccagccctggaggtcctggagacatccagccaggagtcctcgctggagagcgagacagacgaggacgacgactacatggacatttgaggggccactgcagccccaccgccacgccccaggggaccagccaggcctggaatgccccctgggcaggaccctgggcaggaccagaggcccacatggatgccactccccacacagcccccaggcctgcccagcccacctcctcatggcatcctccctgtacccaggtcaggctgtccacaccacatgggagcccagaggaggaggggcccgccttagccatgtgaaggtggattggtcgccatctgcacgccaggcggcatccttttctatgaagtgttgactttgtaaatctgcccacacccagctggccatatccacccctcgacgccgggatgagccggctctgcctgtgtcacagtggaggggtcctttagggccaggctcacccctcaccctttttttggttgcttttctaataaagatggaacagtt

SEQ ID NO: 4061 - DNA, 2253 bp, Homo sapiens
  source 1..2253: mol_type = unassigned DNA
gaacgagcctccgcggccatggcccggcgctcgccctagctccactgcacagatgccacggcggagccggcggggcatctggcggatccccgtggacgagattgaccggccgggcagctttgcctggcacatgaaccgctccatcgtgctgctgctcaaggtgctggcccagctgcgggaccacagcaccctgctgaaggtgtcctccatgcttcagcggaccccagaccagggcaagaagtatctgcgagatgctgaccgccaggtcctggcgcagcgggccttcatcctcactgtgaaggtgctcgaagacacgctgagcgagctcgcagaggggtcagaacgcccagggcccaaggtctgtggcctccccggagccaggatgaccaccgatgtctcacacaaggccagtcctgaggatggccaggagggcctcccccagccgaagaagccccctctggctgatggctcagggccagggcccgagccaggaggcaaagtgggcctcctcaaccaccggcctgtggccatggatgcaggagacagtgcagaccaaagcggggagcggaaggataaagagagcccacgggcagggcccactgagcccatggacacgagtgaggccactgtttgccactcagacttggagcggacaccacccctgctgccaggtcgccccgcaagggaccggggccccgagagccggcccactgagctgtccctggaggagctgagcatcagtgcccggcagcagcccaccccgctcaccccagcccagccagcccccgcccccgcccccgccaccaccacagggaccagggcagggggccacccggaggagccgctctcccggctcagccgcaagaggaagctcctggaggacacagagtcaggcaagacacttctgttggatgcctaccgtgtgtggcagcagggccagaagggtgtggcctatgacctgggccgtgtggagaggatcatgtcggagacctacatgctcatcaagcaggtggatgaggaggctgcgctggagcaggctgtgaagttctgccaggtccatcttgggctgccgcccagagacaggcctcgggacacccccaccactccaaagcaccccaaagacagccgagagaacttctttcctgtgacagtggtgcccacagcccctgaccctgtgccagctgactctgtccagcggcccagtgatgctcacaccaagcctcgccctgcactagctgccgccacaactattatcacctgccctccgtcagcatcagcttccaccctggaccagtccaaggaccctgggcctccccggccacacaggcctgaagctacccccagcatggcctctctgggcccagaggggaaactgaggcctgagccgagaagggatggggaggctcaggaggctgcgagtgagactcagcccctgagctctcccccaacagctgccagctccaaggcccccagcagtgggagtgcccagccaccagagggtcacccaggcaagcctgagcccagccgggctaagtcccgccccctgcccaacatgccaaagctggtcatcccctccgccgccaccaagttcccccctgagatcaccgtcacgccacccaccccaaccctgctctcccccaaaggcagcatctcggaggagaccaagcagaagctgaagtcagccatcctttctgcccagtctgctgccaacgtgaggaaggagagcctatgccagccagccctggaggtcctggagacatccagccaggagtcctcgctggagagcgagacagacgaggacgacgactacatggacatttgaggggccactgcagccccaccgccacgccccaggggaccagccaggcctggaatgccccctgggcaggaccctgggcaggaccagaggcccacatggatgccactccccacacagcccccaggcctgcccagcccacctcctcatggcatcctccctgtacccaggtcaggctgtccacaccacatgggagcccagaggaggaggggcccgccttagccatgtgaaggtggattggtcgccatctgcacgccaggcggcatccttttctatgaagtgttgactttgtaaatctgcccacacccagctggccatatccacccctcgacgccgggatgagccggctctgcctgtgtcacagtggaggggtcctttagggccaggctcacccctcaccctttttttggttgcttttctaataaagatggaacagt

SEQ ID NO: 4062 - DNA, 1606 bp, Homo sapiens
  source 1..1606: mol_type = unassigned DNA
ctcagcagagcccggggcacaggccggaggggctgcaggcgcgaggctgggttacgtgaggaagctgggggtttcgcgggcagctttagagccccagtcagggaaaccgaggccgggcttcctggctgcctcgcgagcctcttcatggctctcgccgccgccctgaggtgcctagaatgggttccggcctccggggaggttcccagtaaccgcaggagccaccattgatttggcgtctgctgggtgcaaagcccagcgcgctaaccctttactcgcgacctttcgcttcaccttcacagcagccctgcgaggagagttgtggactggggcaacctttgccagtgatgagaagtgatgctcgtggcagtgctgaatctctctgaatatgattcgaattgcagccttaaatgccagctccaccattgaggatgatcatgaaggaagctttaaaagtcacaaaacccagacaaaggaggctcaggaagcagaggcttttgcattgtaccacaaggcccttgatctgcagaaacatgaccggtttgaggagtctgccaaagcctaccatgagctcttggaggcgagcctgctgcgggaggcagtttcatccggtgatgagaaagaggggttgaaacaccctgggctgatactgaaatattccacttataagaacttggcccagctggcagcccagcgggaggatctggagacagccatggagttctacttagaggcagtgatgctggactccacagatgtcaacctctggtataagattggacatgtggccctgaggctcatccggatccccctggctcgccatgcttttgaggaagggctgcggtgcaatcctgaccactggccctgtttggataacctaatcactgtcctgtacaccctcagtgattacacaacatgtctgtacttcatctgcaaagctttggagaaggattgccggtacagcaaagggctggtcctcaaggagaagatttttgaggagcagccttgtctccggaaggactctctcagaatgttcctcaaatgtgacatgtcgattcacgatgtttcggtgagtgcagctgagacacaggcgattgtagatgaggccttggggctgcgaaaaaagaggcaagcgctgattgtgcgggagaaggagccggacctgaaacttgtgcagcccattcctttcttcacctggaagtgcctcggagagagcttgctggccatgtacaatcatctcaccacctgtgagcccccacgtcccagccttggcaaaaggattgatttgtcggactaccaggaccccagccagcctcttgagtcctccatggtggtgacgccagttaacgtgatccagccaagcactgtcagcaccaacccagctgtggctgtcgccgagcctgtggtctcctacacctctgtggctacaaccagcttcccactgcacagtcctggtctgttggagacaggcgctcctgtgggtgatatttctgggggagataaatccaagaaaggggtaaaacggaagaagatttcagaagagagtggagaaacagcaaagcggcggtctgcccgtgtccgaaacaccaagtgcaaaaaagaagagaaa

SEQ ID NO: 4063 - DNA, 3696 bp, Homo sapiens
  source 1..3696: mol_type = unassigned DNA
agcttcacagctgggagagcgcaggaaggcgccgggaaggaaagccagcccaccagcgtctgggtgggctgcgccgcgcggctggcggaccttcccgggttggagaagtgcgcacgtccgcacctcaccctgcggctgacatctcctgcccaggagatgggcgctgaagcttgagcgcctgagtccctggagccacacctgcgaacaccctttgcttctattgagctgtgcccagccgcccagtgacagaattccagaataaatgattcccactgatccacccacttttgccaccccaggatgcaattttctggagagaagattagtggacaaagagatcttcaaaaatcaaaaatgaggttcacatttacaagccggtgcttggcactgtttcttcttctaaatcacccaaccccaattcttcctgccttttcaaatcaaacctatccaacaatagagcccaagccatttctttacgtcgtaggacgaaagaagatgatggatgcacagtacaaatgctatgaccgaatgcagcagttacccgcataccaaggagaaggtccatattgcaatcgcacctgggatggatggctgtgctgggatgacacaccggctggagtattgtcctatcagttctgcccagattattttccggattttgatccatcagaaaaggttacaaaatactgtgatgaaaaaggtgtttggtttaaacatcctgaaaacaatcgaacctggtccaactatactatgtgcaatgctttcactcctgagaaactgaagaatgcatatgttctgtactatttggctattgtgggtcattctttgtcaattttcaccctagtgatttccctggggattttcgtgtttttcagaaaattgacaactatttttcctttgaattggaaatataggaaggcattgagccttggctgccaaagggtaaccctgcacaagaacatgtttcttacttacattctgaattctatgattatcatcatccacctggttgaagtagtacccaatggagagctcgtgcgaagggacccggtgagctgcaagattttgcattttttccaccagtacatgatggcctgcaactatttctggatgctctgtgaagggatctatcttcatacactcattgtcgtggctgtgtttactgagaagcaacgcttgcggtggtattatctcttgggctgggggttcccgctggtgccaaccactatccatgctattaccagggccgtgtacttcaatgacaactgctggctgagtgtggaaacccatttgctttacataatccatggacctgtcatggcggcacttgtggtcaatttcttctttttgctcaacattgtccgggtgcttgtgaccaaaatgagggaaacccatgaggcggaatcccacatgtacctgaaggctgtgaaggccaccatgatccttgtgcccctgctgggaatccagtttgtcgtctttccctggagaccttccaacaagatgcttgggaagatatatgattacgtgatgcactctctgattcatttccagggcttctttgttgcgaccatctactgcttctgcaacaatgaggtccaaaccaccgtgaagcgccaatgggcccaattcaaaattcagtggaaccagcgttgggggaggcgcccctccaaccgctctgctcgcgctgcagccgctgctgcggaggctggcgacatcccaatttacatctgccatcaggagctgaggaatgaaccagccaacaaccaaggcgaggagagtgctgagatcatccctttgaatatcatagagcaagagtcatctgcttgaatgtgaagcaaacacagcatcgtgatcactgagccatcatttcctgggagaaagaccatgcatttaaagtattctccatcctcccaggaaccgaacatatcatttgtgaagaattattcagtgaatttgtccattgtaaatctgaagaaagttattcttggtactgttgctttgggagacagtctaggaatggagtctcccactgcaacttgtgaactccatcattcatccaggactgagatgcaaatgtcacagtaatgcaagcaaagtatcaaagaaaaacaatgaaattgacctagttcagatacagggtgctccttgtcaatactgagccatttatacctttgaaatattaaaatcactgtcaatatttttatttttaactctggattttgaattagattatttctgtatttggctatggatctgatttttaatttttttaaatttcagtcaattctgatgttactgagatgttttaccatccttacaatgtaaaccacatgaactacgtgacctctgcaagacaaagcggctttctaatagagagattagtaaatatgtgaagaaaaagacctgcatttggcaggaagatgtatgctttgaatgcaaaagaaatttagagtcaatttgctgaaaacattacatgctcagcttggttttggacaagcctgtccattgggcaggacctagctgttgtaaagaattggtcttaatgttgaatgtattttggttgctgatgtttataaactgagaggtcacaaagaatctatcactaaaaatttttacaaaactgccaaaaatataattcttagtggaagacaatactccctttaaagagagtttgccactcccctaaactccaggatttataaagcaaattactccaaggtttataaagcagattacctcttgcccttgggtgctatctagcagtaaaagataaatttgttgaatattggtaattaaaagactccacataagtccattaactgctttccacccagcttcaaagcttaaaaagagctcaggcttttccaggaagatccaggagggctaattagaaatcaacttgtggttgaccgcttgtttcttgttattaccaaaacaggaggggaaaaaattaactgctccaaatttaaccataaatcaattcatgtttaacgtttctcattaaaatccagtattatattatcatatctctctttacttcccagtataagatttttgaaaatcctgaataaaccagtatcgttactggcacctgaaattaatttgtgaatttgcaacagtaatcagagttaccattatttaatttgtatgctaaatgaggaggtacattgaaaccctccaaatctccagtctcatctatgtcatattttgccactgcctttcagaagtgatttagttgtggaaagataataaattgatttgttatggttacatatttagcgcacccagagaaaattaattatatttctacagagaaaatgaatttgggatactaaagtagtttaagtctcctttactgaatgtaagggggggatcgaaaagaaggtatttttccaatcacagtgttatgtagtattgttctatttttgtttacaaacatggaaaacagagtatttctggcagctgtggtacaaatgtgataatatattgctaaaatattttagatgttattatgctaatatagtaggggttgaagaaaacaaaatagcttattatagaattgcacatagttctgcccaaattatgtgaaatgcttatgcttgtgtatatgtataaattaatacagagtacgttaaaagcaaaaagatgtatatttgcatatttttctaaagaaatatattattcatcttttcattc

SEQ ID NO: 4064 - DNA, 3625 bp, Homo sapiens
  source 1..3625: mol_type = unassigned DNA
agcttcacagctgggagagcgcaggaaggcgccgggaaggaaagccagcccaccagcgtctgggtgggctgcgccgcgcggctggcggaccttcccgggttggagaagtgcgcacgtccgcacctcaccctgcggctgacatctcctgcccaggagatgggcgctgaagcttgagcgcctgagtccctggagccacacctgcgaacaccctttgcttctattgagctgtgcccagccgcccagtgacagaattccaggacaaagagatcttcaaaaatcaaaaatgaggttcacatttacaagccggtgcttggcactgtttcttcttctaaatcacccaaccccaattcttcctgccttttcaaatcaaacctatccaacaatagagcccaagccatttctttacgtcgtaggacgaaagaagatgatggatgcacagtacaaatgctatgaccgaatgcagcagttacccgcataccaaggagaaggtccatattgcaatcgcacctgggatggatggctgtgctgggatgacacaccggctggagtattgtcctatcagttctgcccagattattttccggattttgatccatcagaaaaggttacaaaatactgtgatgaaaaaggtgtttggtttaaacatcctgaaaacaatcgaacctggtccaactatactatgtgcaatgctttcactcctgagaaactgaagaatgcatatgttctgtactatttggctattgtgggtcattctttgtcaattttcaccctagtgatttccctggggattttcgtgtttttcagaaaattgacaactatttttcctttgaattggaaatataggaaggcattgagccttggctgccaaagggtaaccctgcacaagaacatgtttcttacttacattctgaattctatgattatcatcatccacctggttgaagtagtacccaatggagagctcgtgcgaagggacccggtgagctgcaagattttgcattttttccaccagtacatgatggcctgcaactatttctggatgctctgtgaagggatctatcttcatacactcattgtcgtggctgtgtttactgagaagcaacgcttgcggtggtattatctcttgggctgggggttcccgctggtgccaaccactatccatgctattaccagggccgtgtacttcaatgacaactgctggctgagtgtggaaacccatttgctttacataatccatggacctgtcatggcggcacttgtggtcaatttcttctttttgctcaacattgtccgggtgcttgtgaccaaaatgagggaaacccatgaggcggaatcccacatgtacctgaaggctgtgaaggccaccatgatccttgtgcccctgctgggaatccagtttgtcgtctttccctggagaccttccaacaagatgcttgggaagatatatgattacgtgatgcactctctgattcatttccagggcttctttgttgcgaccatctactgcttctgcaacaatgaggtccaaaccaccgtgaagcgccaatgggcccaattcaaaattcagtggaaccagcgttgggggaggcgcccctccaaccgctctgctcgcgctgcagccgctgctgcggaggctggcgacatcccaatttacatctgccatcaggagctgaggaatgaaccagccaacaaccaaggcgaggagagtgctgagatcatccctttgaatatcatagagcaagagtcatctgcttgaatgtgaagcaaacacagcatcgtgatcactgagccatcatttcctgggagaaagaccatgcatttaaagtattctccatcctcccaggaaccgaacatatcatttgtgaagaattattcagtgaatttgtccattgtaaatctgaagaaagttattcttggtactgttgctttgggagacagtctaggaatggagtctcccactgcaacttgtgaactccatcattcatccaggactgagatgcaaatgtcacagtaatgcaagcaaagtatcaaagaaaaacaatgaaattgacctagttcagatacagggtgctccttgtcaatactgagccatttatacctttgaaatattaaaatcactgtcaatatttttatttttaactctggattttgaattagattatttctgtatttggctatggatctgatttttaatttttttaaatttcagtcaattctgatgttactgagatgttttaccatccttacaatgtaaaccacatgaactacgtgacctctgcaagacaaagcggctttctaatagagagattagtaaatatgtgaagaaaaagacctgcatttggcaggaagatgtatgctttgaatgcaaaagaaatttagagtcaatttgctgaaaacattacatgctcagcttggttttggacaagcctgtccattgggcaggacctagctgttgtaaagaattggtcttaatgttgaatgtattttggttgctgatgtttataaactgagaggtcacaaagaatctatcactaaaaatttttacaaaactgccaaaaatataattcttagtggaagacaatactccctttaaagagagtttgccactcccctaaactccaggatttataaagcaaattactccaaggtttataaagcagattacctcttgcccttgggtgctatctagcagtaaaagataaatttgttgaatattggtaattaaaagactccacataagtccattaactgctttccacccagcttcaaagcttaaaaagagctcaggcttttccaggaagatccaggagggctaattagaaatcaacttgtggttgaccgcttgtttcttgttattaccaaaacaggaggggaaaaaattaactgctccaaatttaaccataaatcaattcatgtttaacgtttctcattaaaatccagtattatattatcatatctctctttacttcccagtataagatttttgaaaatcctgaataaaccagtatcgttactggcacctgaaattaatttgtgaatttgcaacagtaatcagagttaccattatttaatttgtatgctaaatgaggaggtacattgaaaccctccaaatctccagtctcatctatgtcatattttgccactgcctttcagaagtgatttagttgtggaaagataataaattgatttgttatggttacatatttagcgcacccagagaaaattaattatatttctacagagaaaatgaatttgggatactaaagtagtttaagtctcctttactgaatgtaagggggggatcgaaaagaaggtatttttccaatcacagtgttatgtagtattgttctatttttgtttacaaacatggaaaacagagtatttctggcagctgtggtacaaatgtgataatatattgctaaaatattttagatgttattatgctaatatagtaggggttgaagaaaacaaaatagcttattatagaattgcacatagttctgcccaaattatgtgaaatgcttatgcttgtgtatatgtataaattaatacagagtacgttaaaagcaaaaagatgtatatttgcatatttttctaaagaaatatattattcatcttttcattc

SEQ ID NO: 4065 - DNA, 1774 bp, Homo sapiens
  source 1..1774: mol_type = unassigned DNA
agttataagagacaggaataccagtgagaagtatgagagagtgggtgggagataatgtttagaatctcttttgctgcccgcaatttatgaaaatggcttgaaaatatttatggtcaaagaccgaaatatttcttcaaagaagattagctttgctccattaaaagtaatgagtagaaatattaaaaaaaaaaaaagttttaagtacctgagtatcttgccagcaactgaccaccactgctaaaagtgaggagagacacagctttcatcattgggactgcagtttatttcaggacaaagagatcttcaaaaatcaaaaatgaggttcacatttacaagccggtgcttggcactgtttcttcttctaaatcacccaaccccaattcttcctgccttttcaaatcaaacctatccaacaatagagcccaagccatttctttacgtcgtaggacgaaagaagatgatggatgcacagtacaaatgctatgaccgaatgcagcagttacccgcataccaaggagaaggtccatattgcaatcgcacctgggatggatggctgtgctgggatgacacaccggctggagtattgtcctatcagttctgcccagattattttccggattttgatccatcagaaaaggttacaaaatactgtgatgaaaaaggtgtttggtttaaacatcctgaaaacaatcgaacctggtccaactatactatgtgcaatgctttcactcctgagaaactgaagaatgcatatgttctgtactatttggctattgtgggtcattctttgtcaattttcaccctagtgatttccctggggattttcgtgtttttcaggagccttggctgccaaagggtaaccctgcacaagaacatgtttcttacttacattctgaattctatgattatcatcatccacctggttgaagtagtacccaatggagagctcgtgcgaagggacccggtgagctgcaagattttgcattttttccaccagtacatgatggcctgcaactatttctggatgctctgtgaagggatctatcttcatacactcattgtcgtggctgtgtttactgagaagcaacgcttgcggtggtattatctcttgggctgggggttcccgctggtgccaaccactatccatgctattaccagggccgtgtacttcaatgacaactgctggctgagtgtggaaacccatttgctttacataatccatggacctgtcatggcggcacttgtggtcaatttcttctttttgctcaacattgtccgggtgcttgtgaccaaaatgagggaaacccatgaggcggaatcccacatgtacctgaaggctgtgaaggccaccatgatccttgtgcccctgctgggaatccagtttgtcgtctttccctggagaccttccaacaagatgcttgggaagatatatgattacgtgatgcactctctgattcatttccagggcttctttgttgcgaccatctactgcttctgcaacaatgaggtccaaaccaccgtgaagcgccaatgggcccaattcaaaattcagtggaaccagcgttgggggaggcgcccctccaaccgctctgctcgcgctgcagccgctgctgcggaggctggcgacatcccaatttacatctgccatcaggagctgaggaatgaaccagccaacaaccaaggcgaggagagtgctgagatcatccctttgaatatcatagagcaagagtcatctgcttgaatgtgaagcaaacacagcatcgtgatcactgag

SEQ ID NO: 4066 - DNA, 1475 bp, Homo sapiens
  source 1..1475: mol_type = unassigned DNA
atgaggttcacatttacaagccggtgcttggcactgtttcttcttctaaatcacccaaccccaattcttcctgccttttcaaatcaaacctatccaacaatagagcccaagccatttctttacgtcgtaggacgaaagaagatgatggatgcacagtacaaatgctatgaccgaatgcagcagttacccgcataccaaggagaaggtccatattgcaatcgcacctgggatggatggctgtgctgggatgacacaccggctggagtattgtcctatcagttctgcccagattattttccggattttgatccatcagaaaaggttacaaaatactgtgatgaaaaaggtgtttggtttaaacatcctgaaaacaatcgaacctggtccaactatactatgtgcaatgctttcactcctgagaaactgaagaatgcatatgttctgtactatttggctattgtgggtcattctttgtcaattttcaccctagtgatttccctggggattttcgtgtttttcaggagccttggctgccaaagggtaaccctgcacaagaacatgtttcttacttacattctgaattctatgattatcatcatccacctggttgaagtagtacccaatggagagctcgtgcgaagggacccggtgagctgcaagattttgcattttttccaccagtacatgatggcctgcaactatttctggatgctctgtgaagggatctatcttcatacactcattgtcgtggctgtgtttactgagaagcaacgcttgcggtggtattatctcttgggctgggccccagccttccacagagactaatctttcctttccctggccttctcatccggttcccgctggtgccaaccactatccatgctattaccagggccgtgtacttcaatgacaactgctggctgagtgtggaaacccatttgctttacataatccatggacctgtcatggcggcacttgtggtcaatttcttctttttgctcaacattgtccgggtgcttgtgaccaaaatgagggaaacccatgaggcggaatcccacatgtacctgaaggctgtgaaggccaccatgatccttgtgcccctgctgggaatccagtttgtcgtctttccctggagaccttccaacaagatgcttgggaagatatatgattacgtgatgcactctctgattcatttccagggcttctttgttgcgaccatctactgcttctgcaacaatgaggtccaaaccaccgtgaagcgccaatgggcccaattcaaaattcagtggaaccagcgttgggggaggcgcccctccaaccgctctgctcgcgctgcagccgctgctgcggaggctggcgacatcccaatttacatctgccatcaggagctgaggaatgaaccagccaacaaccaaggcgaggagagtgctgagatcatccctttgaatatcatagagcaagagtcatctgcttga

SEQ ID NO: 4067 - DNA, 3626 bp, Homo sapiens
  source 1..3626: mol_type = unassigned DNA
gggctgcgccgcgcggctggcggaccttcccgggttggagaagtgcgcacgtccgcacctcaccctgcggctgacatctcctgcccaggagatgggcgctgaagcttgagcgcctgagtccctggagccacacctgcgaacaccctttgcttctattgagctgtgcccagccgcccagtgacagaattccagaataaatgattcccactgatccacccacttttgccaccccaggatgcaattttctggagagaagattagtggacaaagagatcttcaaaaatcaaaaatgaggttcacatttacaagccggtgcttggcactgtttcttcttctaaatcacccaaccccaattcttcctgccttttcaaatcaaacctatccaacaatagagcccaagccatttctttacgtcgtaggacgaaagaagatgatggatgcacagtacaaatgctatgaccgaatgcagcagttacccgcataccaaggagaaggtccatattgcaatcgcacctgggatggatggctgtgctgggatgacacaccggctggagtattgtcctatcagttctgcccagattattttccggattttgatccatcagaaaaggttacaaaatactgtgatgaaaaaggtgtttggtttaaacatcctgaaaacaatcgaacctggtccaactatactatgtgcaatgctttcactcctgagaaactgaagaatgcatatgttctgtactatttggctattgtgggtcattctttgtcaattttcaccctagtgatttccctggggattttcgtgtttttcagaaaattgacaactatttttcctttgaattggaaatataggaaggcattgagccttggctgccaaagggtaaccctgcacaagaacatgtttcttacttacattctgaattctatgattatcatcatccacctggttgaagtagtacccaatggagagctcgtgcgaagggacccggtgagctgcaagattttgcattttttccaccagtacatgatggcctgcaactatttctggatgctctgtgaagggatctatcttcatacactcattgtcgtggctgtgtttactgagaagcaacgcttgcggtggtattatctcttgggctgggggttcccgctggtgccaaccactatccatgctattaccagggccgtgtacttcaatgacaactgctggctgagtgtggaaacccatttgctttacataatccatggacctgtcatggcggcacttgtggtcaatttcttctttttgctcaacattgtccgggtgcttgtgaccaaaatgagggaaacccatgaggcggaatcccacatgtacctgaaggctgtgaaggccaccatgatccttgtgcccctgctgggaatccagtttgtcgtctttccctggagaccttccaacaagatgcttgggaagatatatgattacgtgatgcactctctgattcatttccagggcttctttgttgcgaccatctactgcttctgcaacaatgaggtccaaaccaccgtgaagcgccaatgggcccaattcaaaattcagtggaaccagcgttgggggaggcgcccctccaaccgctctgctcgcgctgcagccgctgctgcggaggctggcgacatcccaatttacatctgccatcaggagctgaggaatgaaccagccaacaaccaaggcgaggagagtgctgagatcatccctttgaatatcatagagcaagagtcatctgcttgaatgtgaagcaaacacagcatcgtgatcactgagccatcatttcctgggagaaagaccatgcatttaaagtattctccatcctcccaggaaccgaacatatcatttgtgaagaattattcagtgaatttgtccattgtaaatctgaagaaagttattcttggtactgttgctttgggagacagtctaggaatggagtctcccactgcaacttgtgaactccatcattcatccaggactgagatgcaaatgtcacagtaatgcaagcaaagtatcaaagaaaaacaatgaaattgacctagttcagatacagggtgctccttgtcaatactgagccatttatacctttgaaatattaaaatcactgtcaatatttttatttttaactctggattttgaattagattatttctgtatttggctatggatctgatttttaatttttttaaatttcagtcaattctgatgttactgagatgttttaccatccttacaatgtaaaccacatgaactacgtgacctctgcaagacaaagcggctttctaatagagagattagtaaatatgtgaagaaaaagacctgcatttggcaggaagatgtatgctttgaatgcaaaagaaatttagagtcaatttgctgaaaacattacatgctcagcttggttttggacaagcctgtccattgggcaggacctagctgttgtaaagaattggtcttaatgttgaatgtattttggttgctgatgtttataaactgagaggtcacaaagaatctatcactaaaaatttttacaaaactgccaaaaatataattcttagtggaagacaatactccctttaaagagagtttgccactcccctaaactccaggatttataaagcaaattactccaaggtttataaagcagattacctcttgcccttgggtgctatctagcagtaaaagataaatttgttgaatattggtaattaaaagactccacataagtccattaactgctttccacccagcttcaaagcttaaaaagagctcaggcttttccaggaagatccaggagggctaattagaaatcaacttgtggttgaccgcttgtttcttgttattaccaaaacaggaggggaaaaaattaactgctccaaatttaaccataaatcaattcatgtttaacgtttctcattaaaatccagtattatattatcatatctctctttacttcccagtataagatttttgaaaatcctgaataaaccagtatcgttactggcacctgaaattaatttgtgaatttgcaacagtaatcagagttaccattatttaatttgtatgctaaatgaggaggtacattgaaaccctccaaatctccagtctcatctatgtcatattttgccactgcctttcagaagtgatttagttgtggaaagataataaattgatttgttatggttacatatttagcgcacccagagaaaattaattatatttctacagagaaaatgaatttgggatactaaagtagtttaagtctcctttactgaatgtaagggggggatcgaaaagaaggtatttttccaatcacagtgttatgtagtattgttctatttttgtttacaaacatggaaaacagagtatttctggcagctgtggtacaaatgtgataatatattgctaaaatattttagatgttattatgctaatatagtaggggttgaagaaaacaaaatagcttattatagaattgcacatagttctgcccaaattatgtgaaatgcttatgcttgtgtatatgtataaattaatacagagtacgttaaaagcaaaaagatgtatatttgcatatttttctaaagaaatatattattcatctttt

SEQ ID NO: 4068 - DNA, 1523 bp, Homo sapiens
  source 1..1523: mol_type = unassigned DNA
atgaggttcacatttacaagccggtgcttggcactgtttcttcttctaaatcacccaaccccaattcttcctgccttttcaaatcaaacctatccaacaatagagcccaagccatttctttacgtcgtaggacgaaagaagatgatggatgcacagtacaaatgctatgaccgaatgcagcagttacccgcataccaaggagaaggtccatattgcaatcgcacctgggatggatggctgtgctgggatgacacaccggctggagtattgtcctatcagttctgcccagattattttccggattttgatccatcagaaaaggttacaaaatactgtgatgaaaaaggtgtttggtttaaacatcctgaaaacaatcgaacctggtccaactatactatgtgcaatgctttcactcctgagaaactgaagaatgcatatgttctgtactatttggctattgtgggtcattctttgtcaattttcaccctagtgatttccctggggattttcgtgtttttcagaaaattgacaactatttttcctttgaattggaaatataggaaggcattgagccttggctgccaaagggtaaccctgcacaagaacatgtttcttacttacattctgaattctatgattatcatcatccacctggttgaagtagtacccaatggagagctcgtgcgaagggacccggtgagctgcaagattttgcattttttccaccagtacatgatggcctgcaactatttctggatgctctgtgaagggatctatcttcatacactcattgtcgtggctgtgtttactgagaagcaacgcttgcggtggtattatctcttgggctgggccccagccttccacagagactaatctttcctttccctggccttctcatccggttcccgctggtgccaaccactatccatgctattaccagggccgtgtacttcaatgacaactgctggctgagtgtggaaacccatttgctttacataatccatggacctgtcatggcggcacttgtggtcaatttcttctttttgctcaacattgtccgggtgcttgtgaccaaaatgagggaaacccatgaggcggaatcccacatgtacctgaaggctgtgaaggccaccatgatccttgtgcccctgctgggaatccagtttgtcgtctttccctggagaccttccaacaagatgcttgggaagatatatgattacgtgatgcactctctgattcatttccagggcttctttgttgcgaccatctactgcttctgcaacaatgaggtccaaaccaccgtgaagcgccaatgggcccaattcaaaattcagtggaaccagcgttgggggaggcgcccctccaaccgctctgctcgcgctgcagccgctgctgcggaggctggcgacatcccaatttacatctgccatcaggagctgaggaatgaaccagccaacaaccaaggcgaggagagtgctgagatcatccctttgaatatcatagagcaagagtcatctgcttga

SEQ ID NO: 4069 - DNA, 1741 bp, Homo sapiens
  source 1..1741: mol_type = unassigned DNA
agcttcacagctgggagagcgcaggaaggcgccgggaaggaaagccagcccaccagcgtctgggtgggctgcgccgcgcggctggcggaccttcccgggttggagaagtgcgcacgtccgcacctcaccctgcggctgacatctcctgcccaggagatgggcgctgaagcttgagcgcctgagtccctggagccacacctgcgaacaccctttgcttctattgagctgtgcccagccgcccagtgacagaattccaggacaaagagatcttcaaaaatcaaaaatgaggttcacatttacaagccggtgcttggcactgtttcttcttctaaatcacccaaccccaattcttcctgccttttcaaatcaaacctatccaacaatagagcccaagccatttctttacgtcgtaggacgaaagaagatgatggatgcacagtacaaatgctatgaccgaatgcagcagttacccgcataccaaggagaaggtccatattgcaatcgcacctgggatggatggctgtgctgggatgacacaccggctggagtattgtcctatcagttctgcccagattattttccggattttgatccatcagaaaaggttacaaaatactgtgatgaaaaaggtgtttggtttaaacatcctgaaaacaatcgaacctggtccaactatactatgtgcaatgctttcactcctgagaaactgaagaatgcatatgttctgtactatttggctattgtgggtcattctttgtcaattttcaccctagtgatttccctggggattttcgtgtttttcaggagccttggctgccaaagggtaaccctgcacaagaacatgtttcttacttacattctgaattctatgattatcatcatccacctggttgaagtagtacccaatggagagctcgtgcgaagggacccggtgagctgcaagattttgcattttttccaccagtacatgatggcctgcaactatttctggatgctctgtgaagggatctatcttcatacactcattgtcgtggctgtgtttactgagaagcaacgcttgcggtggtattatctcttgggctgggggttcccgctggtgccaaccactatccatgctattaccagggccgtgtacttcaatgacaactgctggctgagtgtggaaacccatttgctttacataatccatggacctgtcatggcggcacttgtggtcaatttcttctttttgctcaacattgtccgggtgcttgtgaccaaaatgagggaaacccatgaggcggaatcccacatgtacctgaaggctgtgaaggccaccatgatccttgtgcccctgctgggaatccagtttgtcgtctttccctggagaccttccaacaagatgcttgggaagatatatgattacgtgatgcactctctgattcatttccagggcttctttgttgcgaccatctactgcttctgcaacaatgaggtccaaaccaccgtgaagcgccaatgggcccaattcaaaattcagtggaaccagcgttgggggaggcgcccctccaaccgctctgctcgcgctgcagccgctgctgcggaggctggcgacatcccaatttacatctgccatcaggagctgaggaatgaaccagccaacaaccaaggcgaggagagtgctgagatcatccctttgaatatcatagagcaagagtcatctgcttgaatgtgaagcaaacacagcatcgtgatcactgag

SEQ ID NO: 4070 - DNA, 1502 bp, Homo sapiens
  source 1..1502: mol_type = unassigned DNA
ttctaggacaaagagatcttcaaaaatcaaaaatgaggttcacatttacaagccggtgcttggcactgtttcttcttctaaatcacccaaccccaattcttcctgccttttcaaatcaaacctatccaacaatagagcccaagccatttctttacgtcgtaggacgaaagaagatgatggatgcacagtacaaatgctatgaccgaatgcagcagttacccgcataccaaggagaaggtccatattgcaatcgcacctgggatggatggctgtgctgggatgacacaccggctggagtattgtcctatcagttctgcccagattattttccggattttgatccatcagaaaaggttacaaaatactgtgatgaaaaaggtgtttggtttaaacatcctgaaaacaatcgaacctggtccaactatactatgtgcaatgctttcactcctgagaaactgaagaatgcatatgttctgtactatttggctattgtgggtcattcttgtcaattttcaccctagtgatttccctggggattttcgtgtttttcaggagccttggctgccaaagggtaaccctgcacaagaacatgtttcttacttacattctgaattctatgattatcatcatccacctggttgaagtagtacccaatggagagctcgtgcgaagggacccggtgagctgcaagattttgcattttttccaccagtacatgatggcctgcaactatttctggatgctctgtgaagggatctatcttcatacactcattgtcgtggctgtgtttactgagaagcaacgcttgcggtggtattatctcttgggctgggggttcccgctggtgccaaccactatccatgctattaccagggccgtgtacttcaatgacaactgctggctgagtgtggaaacccatttgctttacataatccatggacctgtcatggcggcacttgtggtcaatttcttctttttgctcaacattgtccgggtgcttgtgaccaaaatgagggaaacccatgaggcggaatcccacatgtacctgaaggctgtgaaggccaccatgatccttgtgcccctgctgggaatccagtttgtcgtctttccctggagaccttccaacaagatgcttgggaagatatatgattacgtgatgcactctctgattcatttccagggcttctttgttgcgaccatctactgcttctgcaacaatgaggtccaaaccaccgtgaagcgccaatgggcccaattcaaaattcagtggaaccagcgttgggggaggcgcccctccaaccgctctgctcgcgctgcagccgctgctgcggaggctggcgacatcccaatttacatctgccatcaggagctgaggaatgaaccagccaacaaccaaggcgaggagagtgctgagatcatccctttgaatatcatagagcaagagtcatctgcttgaatgtgaagcaaacacagcatcgtgatcactgagccatcatttcctg

SEQ ID NO: 4071 - DNA, 5155 bp, Homo sapiens
  source 1..5155: mol_type = unassigned DNA
acacagcctatgatctctctctgttcaggctgcttcttgctcttgtctcacaataagaaaggagtgctgctttcctggggtatgctatttgagaaagaaagtaacctaacactaactgcaggcggggtcagagtgatgtaacaggaagctctgatgtttcccttctgctgctgatcacttacaatctgacaacacttacaatctactcagaacaacctctctctctccagcagagagtgtcacctcctgctttaggaccatcaagctctgctaactgaatctcatcctaattgcaggatcacattgcaaagctttcactctttcccaccttgcttgtgggtaaatctcttctgcggaatctcagaaagtaaagttccatcctgagaatatttcacaaagaatttccttaagagctggactgggtcttgacccctgaatttaagaaattcttaaagacaatgtcaaatatgatccaagagaaaatgtgatttgagactggagacaattgtgcatatcgtctaataataaaaacccatactagcctatagaaaacaatatttgaaagattgctaccactaaaaagaaaactactacaacttgacaagactgctgcaaacttcaatttgtcaaccacaacttgacaaggttgctataaaacaagattgctacaacttctagtttatgttatacagcatatttcattttggcttaatgatggagaaaaagtgtaccctgaattttctggttctcttgcctttttttatgattcttgttacagcagaattagaagagagtcctgaggactcaattcagttgggagttactagaaataaaatcatgacagctcaatatgaatgttaccaaaagattatgcaagaccccattcaacaagcagaaggcgtttactgcaacagaacctgggatggatggctctgctggaacgatgttgcagcaggaactgaatcaatgcagctctgccctgattactttcaggactttgatccatcagaaaaagttacaaagatctgtgaccaagatggaaactggtttagacatccagcaagcaacagaacatggacaaattatacccagtgtaatgttaacacccacgagaaagtgaagactgcactaaatttgttttacctgaccataattggacacggattgtctattgcatcactgcttatctcgcttggcatattcttttatttcaagagcctaagttgccaaaggattaccttacacaaaaatctgttcttctcatttgtttgtaactctgttgtaacaatcattcacctcactgcagtggccaacaaccaggccttagtagccacaaatcctgttagttgcaaagtgtcccagttcattcatctttacctgatgggctgtaattacttttggatgctctgtgaaggcatttacctacacacactcattgtggtggccgtgtttgcagagaagcaacatttaatgtggtattattttcttggctggggatttccactgattcctgcttgtatacatgccattgctagaagcttatattacaatgacaattgctggatcagttctgatacccatctcctctacattatccatggcccaatttgtgctgctttactggtgaatctttttttcttgttaaatattgtacgcgttctcatcaccaagttaaaagttacacaccaagcggaatccaatctgtacatgaaagctgtgagagctactcttatcttggtgccattgcttggcattgaatttgtgctgattccatggcgacctgaaggaaagattgcagaggaggtatatgactacatcatgcacatccttatgcacttccagggtcttttggtctctaccattttctgcttctttaatggagaggttcaagcaattctgagaagaaactggaatcaatacaaaatccaatttggaaacagcttttccaactcagaagctcttcgtagtgcgtcttacacagtgtcaacaatcagtgatggtccaggttatagtcatgactgtcctagtgaacacttaaatggaaaaagcatccatgatattgaaaatgttctcttaaaaccagaaaatttatataattgaaaatagaaggatggttgtctcactgttttgtgcttctcctaactcaaggacttggacccatgactctgtagccagaagacttcaatattaaatgactttttgaatgtcataaagaagagccttcacatgaaattagtagtgtgttgataagagtgtaacatccagctctatgtgggaaaaaagaaatcctggtttgtaatgtttgtcagtaaatactcccactatgcctgatgtgacgctactaacctgacatcaccaagtgtggaattggagaaaagcacaatcaacttttctgagctggtgtaagccagttccagcacaccattgcatgaattcacaaacaaatggctgtaaaactaaacatacatgttgggcatgattctacccttattgccccaagagacctagctaaggtctataaacatgaagggaaaattagcttttagttttaaaactctttatcccatcttgattggggcagttgactttttttttgcccagagtgccgtagtcctttttgtaactaccctctcaaatggacaataccagaagtgaattatccctgctggctttcttttctctatgaaaagcaactgagtacaattgttatgatctactcatttgctgacacatcagttatatcttgtggcatatccattgtggaaactggatgaacaggatgtataatatgcaatcctacttctatatcattaggaaaacatcttagttgatgctacaaaacaccttgtcaacctcttcctgtcttaccaaacagtgggagggaattcctagctgtaaatataaattttgtcccttccatttctactgtataaacaaattagcaatcattttatataaagaaaatcaatgaaggatttcttattttcttggaattttgtaaaaagaaattgtgaaaaatgagcttgtaaatactccattattttattttatagtctcaaatcaaatacatacaacctatgtaatttttaaagcaaatatataatgcaacaatgtgtgtatgttaatatctgatactgtatctgggctgattttttaaataaaatagagtctggaatgctatatttggtaaatattttaaagacaaccagatgccagcatcagaagtctgtttgagaactaagagaacagaaacatctatcataagatatatttattttaaaaacacaaggtcactattttattgaatatatttgttttgataactcataccttaataataggtgtgtttgacatatttcttttttcattttgacaatgaactcacattctaatccagaaattttaaacaactactgtgataaataccaatctgctacttttatagattttaccccattaaaatattactttactgacttttactatgtgaagatatatagctttggaaatgtcccaggctattcaagaaatataaaaaactagaaggatactatatataccatatacaatgctttaatattttaatagagctactgtatataatacaaattagggaaatacttgaatatatcattgagaaaaaattattgtcagatcttactgaattattgtcagactttattaaataaagatagaagaaaaccttgctaatgaattaaagtgaaatttgcatgggattcagtttctctaatgttattttccgctgaaatctctaaagaacaagaatgacttcaattagtaaaagtcaattttgggaaaagtcatgggtatctgttttttaagtgtgtcaatctgattaaaatggatgaaacaaattactcatcataagttgtttcttaagctgtcaatatgtcaatagatggtgagttcagaacttatttcaaattgctaagacaaattatctaaattcgtaagaattaacatatagaatggtctggtcagtacatttataatttatctatgcatgaaaaagtattgttttgtttgaaacatgaatttcatagcaagctgccatagaaaggaacgcaggctgttctagaccttcaactgcctaaattatacaaaaattcattttaataaactcaattattagctatttattattcaaagacccatatttaaatcctttgctgaccatgttgacatatatcagccttcttctagacaaactgtcaactctcaaccatcttgacagtagaagtgacagtaaaaaatgttgaatgatcagagattatattaaaataaacatgtaattttcaagtatttttgttgtgcttttataatattaattctagatcagatttattttatagccagggtttgtctgttgtagagtcttgaggcgtagcagtcattcatgattaatcactgttagttttgtacccatatatttttagaatagttttaaatgttagatttctcaaaagctaaatgctacttaatatctttgtatcatactcataaagcaaagtaaatctgacactttttttaaagcaaacttctttgctgtcaaaaaaataaatttggggaaatttctagcttttaaaatgtagatctgcattttactgtgattacttgtgaaagtcatattttaattttctaaattctaatttgtcattttatttcctaaagttaatttccaatgcatttattcataaaatattcattctggaatgcagtgtttgtttaaatgtaatccaatgtatatagaattagtggtggctgtagtgctgtatttattgcttataattttttttaaatgtgaacttacttttaattttctcttggttttaatctgctagtagaaaccactagttatctgtaaaaatatattcaagatattctgatcaattataacaatttatgttatgcctagagtatatctctattttttgattgtatgaaaatattaaagttatgagttaaagtttattttcactgatatttactacagtgccaaataatctaatttataaacataattcttacagtaatcaatgggatacttctcaaaattaacaaatctcttaacaaaatatatcttttgccctctttaaagtcttcagtaaaccagtaaatgaattcaataaaccaa

SEQ ID NO: 4072 - DNA, 5223 bp, Homo sapiens
  source 1..5223: mol_type = unassigned DNA
acacagcctatgatctctctctgttcaggctgcttcttgctcttgtctcacaataagaaaggagtgctgctttcctggggtatgctatttgagaaagaaagtaacctaacactaactgcaggcggggtcagagtgatgtaacaggaagctctgatgtttcccttctgctgctgatcacttacaatctgacaacacttacaatctactcagaacaacctctctctctccagcagagagtgtcacctcctgctttaggaccatcaagctctgctaactgaatctcatcctaattgcaggatcacattgcaaagctttcactctttcccaccttgcttgtgggtaaatctcttctgcggaatctcagaaagtaaagttccatcctgagaatatttcacaaagaatttccttaagagctggactggggtcctacgatgatacaccaaccacttgtgctaccatctgtcaaaactttggatggccctactttcaggtcttgacccctgaatttaagaaattcttaaagacaatgtcaaatatgatccaagagaaaatgtgatttgagactggagacaattgtgcatatcgtctaataataaaaacccatactagcctatagaaaacaatatttgaaagattgctaccactaaaaagaaaactactacaacttgacaagactgctgcaaacttcaatttgtcaaccacaacttgacaaggttgctataaaacaagattgctacaacttctagtttatgttatacagcatatttcattttggcttaatgatggagaaaaagtgtaccctgaattttctggttctcttgcctttttttatgattcttgttacagcagaattagaagagagtcctgaggactcaattcagttgggagttactagaaataaaatcatgacagctcaatatgaatgttaccaaaagattatgcaagaccccattcaacaagcagaaggcgtttactgcaacagaacctgggatggatggctctgctggaacgatgttgcagcaggaactgaatcaatgcagctctgccctgattactttcaggactttgatccatcagaaaaagttacaaagatctgtgaccaagatggaaactggtttagacatccagcaagcaacagaacatggacaaattatacccagtgtaatgttaacacccacgagaaagtgaagactgcactaaatttgttttacctgaccataattggacacggattgtctattgcatcactgcttatctcgcttggcatattcttttatttcaagagcctaagttgccaaaggattaccttacacaaaaatctgttcttctcatttgtttgtaactctgttgtaacaatcattcacctcactgcagtggccaacaaccaggccttagtagccacaaatcctgttagttgcaaagtgtcccagttcattcatctttacctgatgggctgtaattacttttggatgctctgtgaaggcatttacctacacacactcattgtggtggccgtgtttgcagagaagcaacatttaatgtggtattattttcttggctggggatttccactgattcctgcttgtatacatgccattgctagaagcttatattacaatgacaattgctggatcagttctgatacccatctcctctacattatccatggcccaatttgtgctgctttactggtgaatctttttttcttgttaaatattgtacgcgttctcatcaccaagttaaaagttacacaccaagcggaatccaatctgtacatgaaagctgtgagagctactcttatcttggtgccattgcttggcattgaatttgtgctgattccatggcgacctgaaggaaagattgcagaggaggtatatgactacatcatgcacatccttatgcacttccagggtcttttggtctctaccattttctgcttctttaatggagaggttcaagcaattctgagaagaaactggaatcaatacaaaatccaatttggaaacagcttttccaactcagaagctcttcgtagtgcgtcttacacagtgtcaacaatcagtgatggtccaggttatagtcatgactgtcctagtgaacacttaaatggaaaaagcatccatgatattgaaaatgttctcttaaaaccagaaaatttatataattgaaaatagaaggatggttgtctcactgttttgtgcttctcctaactcaaggacttggacccatgactctgtagccagaagacttcaatattaaatgactttttgaatgtcataaagaagagccttcacatgaaattagtagtgtgttgataagagtgtaacatccagctctatgtgggaaaaaagaaatcctggtttgtaatgtttgtcagtaaatactcccactatgcctgatgtgacgctactaacctgacatcaccaagtgtggaattggagaaaagcacaatcaacttttctgagctggtgtaagccagttccagcacaccattgcatgaattcacaaacaaatggctgtaaaactaaacatacatgttgggcatgattctacccttattgccccaagagacctagctaaggtctataaacatgaagggaaaattagcttttagttttaaaactctttatcccatcttgattggggcagttgactttttttttgcccagagtgccgtagtcctttttgtaactaccctctcaaatggacaataccagaagtgaattatccctgctggctttcttttctctatgaaaagcaactgagtacaattgttatgatctactcatttgctgacacatcagttatatcttgtggcatatccattgtggaaactggatgaacaggatgtataatatgcaatcctacttctatatcattaggaaaacatcttagttgatgctacaaaacaccttgtcaacctcttcctgtcttaccaaacagtgggagggaattcctagctgtaaatataaattttgtcccttccatttctactgtataaacaaattagcaatcattttatataaagaaaatcaatgaaggatttcttattttcttggaattttgtaaaaagaaattgtgaaaaatgagcttgtaaatactccattattttattttatagtctcaaatcaaatacatacaacctatgtaatttttaaagcaaatatataatgcaacaatgtgtgtatgttaatatctgatactgtatctgggctgattttttaaataaaatagagtctggaatgctatatttggtaaatattttaaagacaaccagatgccagcatcagaagtctgtttgagaactaagagaacagaaacatctatcataagatatatttattttaaaaacacaaggtcactattttattgaatatatttgttttgataactcataccttaataataggtgtgtttgacatatttcttttttcattttgacaatgaactcacattctaatccagaaattttaaacaactactgtgataaataccaatctgctacttttatagattttaccccattaaaatattactttactgacttttactatgtgaagatatatagctttggaaatgtcccaggctattcaagaaatataaaaaactagaaggatactatatataccatatacaatgctttaatattttaatagagctactgtatataatacaaattagggaaatacttgaatatatcattgagaaaaaattattgtcagatcttactgaattattgtcagactttattaaataaagatagaagaaaaccttgctaatgaattaaagtgaaatttgcatgggattcagtttctctaatgttattttccgctgaaatctctaaagaacaagaatgacttcaattagtaaaagtcaattttgggaaaagtcatgggtatctgttttttaagtgtgtcaatctgattaaaatggatgaaacaaattactcatcataagttgtttcttaagctgtcaatatgtcaatagatggtgagttcagaacttatttcaaattgctaagacaaattatctaaattcgtaagaattaacatatagaatggtctggtcagtacatttataatttatctatgcatgaaaaagtattgttttgtttgaaacatgaatttcatagcaagctgccatagaaaggaacgcaggctgttctagaccttcaactgcctaaattatacaaaaattcattttaataaactcaattattagctatttattattcaaagacccatatttaaatcctttgctgaccatgttgacatatatcagccttcttctagacaaactgtcaactctcaaccatcttgacagtagaagtgacagtaaaaaatgttgaatgatcagagattatattaaaataaacatgtaattttcaagtatttttgttgtgcttttataatattaattctagatcagatttattttatagccagggtttgtctgttgtagagtcttgaggcgtagcagtcattcatgattaatcactgttagttttgtacccatatatttttagaatagttttaaatgttagatttctcaaaagctaaatgctacttaatatctttgtatcatactcataaagcaaagtaaatctgacactttttttaaagcaaacttctttgctgtcaaaaaaataaatttggggaaatttctagcttttaaaatgtagatctgcattttactgtgattacttgtgaaagtcatattttaattttctaaattctaatttgtcattttatttcctaaagttaatttccaatgcatttattcataaaatattcattctggaatgcagtgtttgtttaaatgtaatccaatgtatatagaattagtggtggctgtagtgctgtatttattgcttataattttttttaaatgtgaacttacttttaattttctcttggttttaatctgctagtagaaaccactagttatctgtaaaaatatattcaagatattctgatcaattataacaatttatgttatgcctagagtatatctctattttttgattgtatgaaaatattaaagttatgagttaaagtttattttcactgatatttactacagtgccaaataatctaatttataaacataattcttacagtaatcaatgggatacttctcaaaattaacaaatctcttaacaaaatatatcttttgccctctttaaagtcttcagtaaaccagtaaatgaattcaataaaccaa

SEQ ID NO: 4073 - DNA, 1984 bp, Homo sapiens
  source 1..1984: mol_type = unassigned DNA
agaacaacctctctctctccagcagagagtgtcacctcctgctttaggaccatcaagctctgctaactgaatctcatcctaattgcaggatcacattgcaaagctttcactctttcccaccttgcttgtgggtaaatctcttctgcggaatctcagaaagtaaagttccatcctgagaatatttcacaaagaatttccttaagagctggactgggtcttgacccctgaatttaagaaattcttaaagacaatgtcaaatatgatccaagagaaaatgtgatttgagactggagacaattgtgcattttatgttatacagcatatttcattttggcttaatgatggagaaaaagtgtaccctgaattttctggttctcttgcctttttttatgattcttgttacagcagaattagaagagagtcctgaggactcaattcagttgggagttactagaaataaaatcatgacagctcaatatgaatgttaccaaaagattatgcaagaccccattcaacaagcagaaggcgtttactgcaacagaacctgggatggatggctctgctggaacgatgttgcagcaggaactgaatcaatgcagctctgccctgattactttcaggactttgatccatcagaaaaagttacaaagatctgtgaccaagatggaaactggtttagacatccagcaagcaacagaacatggacaaattatacccagtgtaatgttaacacccacgagaaagtgaagactgcactaaatttgttttacctgaccataattggacacggattgtctattgcatcactgcttatctcgcttggcatattcttttatttcaagagcctaagttgccaaaggattaccttacacaaaaatctgttcttctcatttgtttgtaactctgttgtaacaatcattcacctcactgcagtggccaacaaccaggccttagtagccacaaatcctgttagttgcaaagtgtcccagttcattcatctttacctgatgggctgtaattacttttggatgctctgtgaaggcatttacctacacacactcattgtggtggccgtgtttgcagagaagcaacatttaatgtggtattattttcttggctggggatttccactgattcctgcttgtatacatgccattgctagaagcttatattacaatgacaattgctggatcagttctgatacccatctcctctacattatccatggcccaatttgtgctgctttactggtgaatctttttttcttgttaaatattgtacgcgttctcatcaccaagttaaaagttacacaccaagcggaatccaatctgtacatgaaagctgtgagagctactcttatcttggtgccattgcttggcattgaatttgtgctgattccatggcgacctgaaggaaagattgcagaggaggtatatgactacatcatgcacatccttatgcacttccagggtcttttggtctctaccattttctgcttctttaatggagaggttcaagcaattctgagaagaaactggaatcaatacaaaatccaatttggaaacagcttttccaactcagaagctcttcgtagtgcgtcttacacagtgtcaacaatcagtgatggtccaggttatagtcatgactgtcctagtgaacacttaaatggaaaaagcatccatgatattgaaaatgttctcttaaaaccagaaaatttatataattgaaaatagaaggatggttgtctcactgttttgtgcttctcctaactcaaggacttggacccatgactctgtagccagaagacttcaatattaaatgactttttgaatgtcataaagaagagccttcacatgaaattagtagtgtgttgataagagtgtaacatccagctctatgtgggaaaaaagaaatcctggtttgtaatgtttgtcagtaaatactcccactatgcctgatgtgacgctactaacctgacatcacc

SEQ ID NO: 4074 - DNA, 591 bp, Homo sapiens
  source 1..591: mol_type = unassigned DNA
agaacaacctctctctctccagcagagagtgtcacctcctgctttaggaccatcaagctctgctaactgaatctcatcctaattgcaggatcacattgcaaagctttcactctttcccaccttgcttgtgggtaaatctcttctgcggaatctcagaaagtaaagttccatcctgagaatatttcacaaagaatttccttaagagctggactgggtcttgacccctgaatttaagaaattcttaaagacaatgtcaaatatgatccaagagaaaatgtgatttgagactggagacaattgtgcatcctatagaaaacaatatttgaaagattgctaccactaaaaagaaaactactacaacttgacaagactgctgcaaacttcaatttgtcaaccacaacttgacaaggttgctataaaacaagattgctacaacttctagtttatgttatacagcatatttcattttggcttaatgatggagaaaaagtgtaccctgaattttctggttctcttgcctttttttatgattcttgttacagcagaattagaagagagtcctgaggactcaattcagttgggagttactag

SEQ ID NO: 4075 - DNA, 642 bp, Homo sapiens
  source 1..642: mol_type = unassigned DNA
agaacaacctctctctctccagcagagagtgtcacctcctgctttaggaccatcaagctctgctaactgaatctcatcctaattgcaggatcacattgcaaagctttcactctttcccaccttgcttgtgggtaaatctcttctgcggaatctcagaaagtaaagttccatcctgagaatatttcacaaagaatttccttaagagctggactggggtcctacgatgatacaccaaccacttgtgctaccatctgtcaaaactttggatggccctactttcaggtcttgacccctgaatttaagaaattcttaaagacaatgtcaaatatgatccaagagaaaatgtgatttgagactggagacaattgtgcattttatgttatacagcatatttcattttggcttaatgatggagaaaaagtgtaccctgaattttctggttctcttgcctttttttatgattcttgttacagcagaattagaagagagtcctgaggactcaattcagttgggagttactagaaataaaatcatgacagctcaatatgaatgttaccaaaagattatgcaagaccccattcaacaagcagaaggcgtttactgcaacagaacctgggatggatggctctgctggaacgatgt

SEQ ID NO: 4076 - DNA, 843 bp, Homo sapiens
  source 1..843: mol_type = unassigned DNA
ggcatcagagacactgcccagcccaagtgtcgccgccgcttccacagggctctggctggacgccgccgccgccgctgccaccgcctctgatccaagccacctcccgccagagaggtgtcatgggcttccaaaagttctcccccttcctggctctcagcatcttggtcctgttgcaggcaggcagcctccatgcagcaccattcaggtctgccctggagagcagcccagcagacccggccacgctcagtgaggacgaagcgcgcctcctgctggctgcactggtgcagaactatgtgcagatgaaggccagtgagctggagcaggagcaagagagagagggctccagcctggacagccccagatctaagcggtgcggtaatctgagtacttgcatgctgggcacatacacgcaggacttcaacaagtttcacacgttcccccaaactgcaattggggttggagcacctggaaagaaaagggatatgtccagcgacttggagagagaccatcgccctcatgttagcatgccccagaatgccaactaaactcctccctttccttcctaatttcccttcttgcatccttcctataacttgatgcatgtggtttggttcctctctggtggctctttgggctggtattggtggctttccttgtggcagaggatgtctcaaacttcagatgggaggaaagagagcaggactcacaggttggaagagaatcacctgggaaaataccagaaaatgagggccgctttgagtcccccagagatgtcatcagagctcctctgtcctgcttctgaatgtgctgatcatttgaggaataaaattatttttccccaaa

SEQ ID NO: 4077 - DNA, 477 bp, Homo sapiens
  source 1..477: mol_type = unassigned DNA
ccgccgctgccaccgcctctgatccaagccacctcccgccagagaggtgtcatgggcttccaaaagttctcccccttcctggctctcagcatcttggtcctgttgcaggcaggcagcctccatgcagcaccattcaggtctgccctggagagcagcccagcagacccggccacgctcagtgaggacgaagcgcgcctcctgctggctgcactggtgcagaactatgtgcagatgaaggccagtgagctggagcaggagcaagagagagagggctccagcctggacagccccagatctaagcggtgcggtaatctgagtacttgcatgctgggcacatacacgcaggacttcaacaagtttcacacgttcccccaaactgcaattggggttggagcacctggaaagaaaagggatatgtccagcgacttggagagagaccatcgccctcataatcattgcccagaagagagcctgtga

SEQ ID NO: 4078 - DNA, 916 bp, Homo sapiens
  source 1..916: mol_type = unassigned DNA
ccgccgctgccaccgcctctgatccaagccacctcccgccaggtgagccccgagatcctggctcagagaggtgtcatgggcttccaaaagttctcccccttcctggctctcagcatcttggtcctgttgcaggcaggcagcctccatgcagcaccattcaggtctgccctggagagcagcccagcagacccggccacgctcagtgaggacgaagcgcgcctcctgctggctgcactggtgcagaactatgtgcagatgaaggccagtgagctggagcaggagcaagagagagagggctccagaatcattgcccagaagagagcctgtgacactgccacctgtgtgactcatcggctggcaggcttgctgagcagatcagggggtgtggtgaagaacaactttgtgcccaccaatgtgggttccaaagcctttggcaggcgccgcagggaccttcaagcctgagcagctgaatgactcaagaaggtcacaataaagctgaactccttttaatgtgtaatgaaagcaatttgtaggaaaggctccatggaagacatacatataggcatccttcttgatactgaaaactatcttctttgtttgaaaggaactattgctaaatgcagaacaagctcattgcagttacctattgtgcatctttttaaatacttgattatgtaaccataaatctgacagcatgtctcattggcttatctggtagcaaatctaggccccgtcagccaccctattgacattggtggctctgctaaacctcagggggacatgaaatcactgcctcttgggcatctggggacacatggtaatgctgtgccttgacagaagtatttgtttaaagaaatgtcaatgctgtcatttgtgaactctatcaaaattaaaaatgtattttctatacccttca

SEQ ID NO: 4079 - DNA, 581 bp, Homo sapiens
  source 1..581: mol_type = unassigned DNA
cgcctctgatccaagccacctcccgccaggtgagccccgagatcctggctcagagaggtgtcatgggcttccaaaagttctcccccttcctggctctcagcatcttggtcctgttgcaggcaggcagcctccatgcagcaccattcaggtctgccctggagagcagcccagcagacccggccacgctcagtgaggacgaagcgcgcctcctgctggctgcactggtgcagaactatgtgcagatgaaggccagtgagctggagcaggagcaagagagagagggctccagcctggacagccccagatctaagcggtgcggtaatctgagtacttgcatgctgggcacatacacgcaggacttcaacaagtttcacacgttcccccaaactgcaattggggttggagcacctggaaagaaaagggatatgtccagcgacttggagagagaccatcgccctcatgttagcatgccccagaatgccaactaaactcctccctttccttcctaatttcccttcttgcatccttcctataacttgatgcatgtggtttggttcctctctggtggctctttgggctgg

SEQ ID NO: 4080 - DNA, 851 bp, Homo sapiens
  source 1..851: mol_type = unassigned DNA
agaggtgtcatgggcttccaaaagttctcccccttcctggctctcagcatcttggtcctgttgcaggcaggcagcctccatgcagcaccattcaggtctgccctggagagcagcccagcagacccggccacgctcagtgaggacgaagcgcgcctcctgctggctgcactggtgcagaactatgtgcagatgaaggccagtgagctggagcaggagcaagagagagagggctccagaatcattgcccagaagagagcctgtgacactgccacctgtgtgactcatcggctggcaggcttgctgagcagatcagggggtgtggtgaagaacaactttgtgcccaccaatgtgggttccaaagcctttggcaggcgccgcagggaccttcaagcctgagcagctgaatgactcaagaaggtcacaataaagctgaactccttttaatgtgtaatgaaagcaatttgtaggaaaggctccatggaagacatacatataggcatccttcttgatactgaaaactatcttctttgtttgaaaggaactattgctaaatgcagaacaagctcattgcagttacctattgtgcatctttttaaatacttgattatgtaaccataaatctgacagcatgtctcattggcttatctggtagcaaatctaggccccgtcagccaccctattgacattggtggctctgctaaacctcagggggacatgaaatcactgcctcttgggcatctggggacacatggtaatgctgtgccttgacagaagtatttgtttaaagaaatgtcaatgctgtcatttgtgaactctatcaaaattaaaaatgtattttctatacccttcaa

SEQ ID NO: 4081 - DNA, 1070 bp, Homo sapiens
  source 1..1070: mol_type = unassigned DNA
gtaataagagcggggtctccgcggggaaggcgcccacagcaggtgtggtgttcatcccgggtcgaccggccgctcgcgctgccctgaaactctagtcgccagagaggcggcatgggtttccggaagttctcccccttcctggctctcagtatcttggtcctgtaccaggcgggcagcctccaggcggcgccattcaggtctgccctggagagcagcccagacccggccacactcagtaaagaggacgcgcgcctcctgctggctgcactggtgcaggactatgtgcagatgaaggccagtgagctgaagcaggagcaggagacacagggctccagctccgctgcccagaagagagcctgcaacactgccacctgtgtgactcatcggctggcaggcttgctgagcagatcagggggcatggtgaagagcaacttcgtgcccaccaatgtgggttccaaagcctttggcaggcgccgcagggaccttcaagcctgagcagatgaatgactccaggaagaaggttatcatgaaactgaactcaccatttctattaatttctgttggtaagaacttggtgagaatgccccgtggaagatacacatgtttgcatcctaagatactgaaaaaagggcacctttgtcacttgaaaggaatgaaactgaatgcaaaataagctaattccatatttgctgtgcatcatttttatatttaattctatgtccagtaaaagtgatggcatctctcattgacttatctggtagcaaactggttctttcggagccatcctgttgatcatgcagctccaccaaaccttagggggacgtgaaatcactgcctgttgtggtctccgaggacacatggtaatggtgatgctgtgccttgttatctaagaacatgattgtataatttgtttaagaaaatgtcaatattgtgccatttgtgaacttcatcaagattaaaagcatattttgggtacatttgtttcaaaaccttggtgatgcattacaacttgttttcttatgtaataataatgatgatgatgatgataataataaatatttttgagtgct

SEQ ID NO: 4082 - DNA, 2258 bp, Homo sapiens
  source 1..2258: mol_type = unassigned DNA
gtcggccgcgaaggcgtggcggcccgcggaccggcggaccccgggtcataccagctgtccgggtgcacaggcccaggggccccacgaccgcgggtgtcgggaccgtgggctccactgaggagcccaccgaatccttcggcctggccaggcggggggtcttcttcccagtccgcggaagccaggtccgggagacggcggggctcactgtgccttcggacctacactctgctcgggggccggatttctgcaaagcgtccacttggaaagaagtttcacttgcagggaaggcgggtgtacgcaatgatggtccgtgtgtccgggatgtgaatgccaaccaagactgcgtccgttggtggagtgtgcgcgggtcctccgtgagggtgcttctggcagtcacagttcacgagttagcgagaagatggctgggaggcggcgagcccccgctcccggggcgcgcatttcgaactccataggtctcccgtggagagcagcccagacccggccacactcagtgaggaggaagtgcgcctcctgctggctgcactggtgcaggactatgtgcagatgaaggccagtgagctggagcaggagcaggagacagagctccagatttaatttatgtccttttcttctatcttctttggatggaggctgagtttcagttcttgccggagagtttccagatttctcctcctgatggcctgttctgtggattttggatttgccaaggcagccctcacaatccgagtcctggggctgtctaaggaactatggtgagatagagtgttatgggttgaattttgtccccctcaaaaaggtaccattgtcttctaaaagaacaactgaggagttcaacatgaaggaggaaggatatgtcattctttgcagtgacacaatcagaaaaggtactgctcccccacctaaatatgagggataagtgattttcagaagagacaggagaagaagggacaaatgtcctggtccttgtctccttgtcaacaaaagatgtactggtaccctttgaaaggggacagagaggatgccagctgaactgggagcactaagttctctgctttgtgaaaatgaatctgcaatgaactcctggtctttgtctggatgcccatctttctgcaagttgtcagcagaagcttttcaatgtggctacttggtgagttcacatacagcccaacccatagttctgatggagcctgaaaatcagccctgaaaagttctcctcagaggatgcctctgaagtgagaggcatgaaaaaagaggctaaccttcagagaggcggcatgggtttccggaagttctcccccttcctggctctcagtatcttggtcctgtaccaggcgggcagcctccaggcggcgccattcaggtctgccctggagagcagcccagacccggccacactcagtaaagaggacgcgcgcctcctgctggctgcactggtgcaggactatgtgcagatgaaggccagtgagctgaagcaggagcaggagacacagggctccagctccgctgcccagaagagagcctgcaacactgccacctgtgtgactcatcggctggcaggcttgctgagcagatcagggggcatggtgaagagcaacttcgtgcccaccaatgtgggttccaaagcctttggcaggcgccgcagggaccttcaagcctgagcagatgaatgactccaggaagaaggttatcatgaaactgaactcaccatttctattaatttctgttggtaagaacttggtgagaatgccccgtggaagatacacatgtttgcatcctaagatactgaaaaaagggcacctttgtcacttgaaaggaatgaaactgaatgcaaaataagctaattccatatttgctgtgcatcatttttatatttaattctatgtccagtaaaagtgatggcatctctcattgacttatctggtagcaaactggttctttcggagccatcctgttgatcatgcagctccaccaaaccttagggggacgtgaaatcactgcctgttgtggtctccgaggacacatggtaatggtgatgctgtgccttgttatctaagaacatgattgtataatttgtttaagaaaatgtcaatattgtgccatttgtgaacttcatcaagattaaaagcatattttgggtacatttgtttcaaaaccttggtgatgcattacaacttgttttcttatgtaataataatgatgatgatgatgataataataaatatttttgagtgcttact

SEQ ID NO: 4083 - DNA, 2097 bp, Homo sapiens
  source 1..2097: mol_type = unassigned DNA
gtaataagagcggggtctccgcggggaaggcgcccacagcaggtgtggtgttcatcccgggtcgaccggccgctcgcgctgccctgaaactctagtcgccagagaggcggcatgggtttccggaagttctcccccttcctggctctcagtatcttggtcctgtaccaggcgggcagcctccaggcggcgccattcaggtctgccctggagagcagcccagacccggccacactcagtaaagaggacgcgcgcctcctgctggctgcactggtgcaggactatgtgcagatgaaggccagtgagctgaagcaggagcaggagacacagggctccagctccgctgcccagaagagagcctgcaacactgccacctgtgtgactcatcggctggcaggcttgctgagcagatcagggggcatggtgaagagcaacttcgtgcccaccaatgtgggttccaaagcctttggcaggcgccgcagggaccttcaagcctgagcagatgaatgactccaggaagaaggtgtgtcctaaatccaatgacatatccttataagagattcactcagaagacacatgtggagaaggtgacatgacagaggcaaggaggcacaagccaaggaagtctgtgtctaccagaagccagaatcacagaacagtctctggaagaagagcagccctgctgacacctagagtttggacttccagcttccagaactgtgagagaataatttctgttgttttaagccacaaagtttgtggtaatttgttatgacagccctaggaaactaatacaatacattttcatttattttgggtaaatgccttggagtgggattgctgggttatttggaaagtgtgtatttaactctgtaagaaactgccaaactattttctgaagtgactgtaccacttcgccttcttgccagccacatatgagagctctagtatttccacaaataggtatgtagcagtatctcattgctgttttaatttgtatttccccaatgactaatgacgttgagcatctattttaccatatgtttatcacctttattgaagggtctgtttaaatcttctgctaaatttttgttggcttgcttgctttattagtgttgagtttttagagctctttatatgttgtggatgcaagattgttttcagatatatagtttggaaacttccttcccctgaatctgcggattgctttttcattttcttagcagtgtctctcacagagaaaaagttgtaatttgaataagatccaattcatctttttttttcttttatgtattgtgcttttagttcatgtctaagaactctttgcctaactaaggtcccaaggtcacaataaccttattctatactttcttgtaaaagttttatagttttatattttatatgtagattagtgatctattttgagttaatttttgtataaggtgagaggtgtaggttgaaattcatacctgtgaatatagatacccaattgtttcagtgccatttgttaaaaagactgttatttcaccatttaattgcccctgcacctttgtcaaaaagcaactgatcatatttgtgtgggtatatttctgggttctcaattctgtctcattgattgatttgaccattcttttgccaatgtcatactgccttgattagtgtagtgttaaagtgaatctcaaaaccaggtaatgtgggtctaccaacattgttcattcttgttcaaaaagattttagctacatctaaaatattttctacatcttttatacattttagaatcagtgtgttactatctacaaaatttctgatgagatttttaatgggattgtgttaaatcagtgggttaattttgggagaattagcatattaataatattaagtcgttcaattcatgaacacaatacatgttttcacttatttaggttttctctgtttttttttttttaacagtgttctcagttttcaacagaaatattctacacatatcttgttagatttttaactattttattttttggtgctaatgtaaatggtacttaaacatttttgtttttaattgttcattgctagtagatagaaatacaatatttaaaatatta

SEQ ID NO: 4084 - DNA, 3534 bp, Homo sapiens
  source 1..3534: mol_type = unassigned DNA
agaggctgccgggaacgcgggcccagaggcggggcgagcgcgcgcggggcggaagtcggccaccttcctccgtcccggccgttagcccagccaagcccagccaagcccagccaagccccgccgatcgcgggcaccggagccagccccgcagcggagggaccacagagcaccagcctgcatggaacttccttcctcactcagcttcccacgttgccagctgggacaggggagatggagtaattttgctgtggaaagacttcacgtcttgccgaatgaaagtaagcaaagatactgctagagtcgggaatctagagtcgggaattcattaagccaagggagtaagaatggccacagagtagtgaaatactgtttcttctggaaaagtcagcctccagcgcctgcagcttccggaactaagatgtgactgggcttgcggaggcgctgactcctctcctccctccctggctgtgcaggtcccgcctgtctgtcacgctgatgcccgtgcagctgtctgagcacccggaatggaatgagtctatgcactccctccggatcagtgtggggggccttcctgtgctggcgtccatgaccaaggccgcggacccccgcttccgcccccgctggaaggtgatcctgacgttctttgtgggtgctgccatcctctggctgctctgctcccaccgcccggcccccggcaggccccccacccacaatgcacacaactggaggctcggccaggcgcccgccaactggtacaatgacacctaccccctgtctcccccacaaaggacaccggctgggattcggtatcgaatcgcagttatcgcagacctggacacagagtcaagggcccaagaggaaaacacctggttcagttacctgaaaaagggctacctgaccctgtcagacagtggggacaaggtggccgtggaatgggacaaagaccatggggtcctggagtcccacctggcggagaaggggagaggcatggagctatccgacctgattgttttcaatgggaaactctactccgtggatgaccggacgggggtcgtctaccagatcgaaggcagcaaagccgtgccctgggtgattctgtccgacggcgacggcaccgtggagaaaggcttcaaggccgaatggctggcagtgaaggacgagcgtctgtacgtgggcggcctgggcaaggagtggacgaccactacgggtgatgtggtgaacgagaacccggagtgggtgaaggtggtgggctacaagggcagcgtggaccacgagaactgggtgtccaactacaacgccctgcgggctgctgccggcatccagccgccaggctacctcatccatgagtctgcctgctggagtgacacgctgcagcgctggttcttcctgccgcgccgcgccagccaggagcgctacagcgagaaggacgacgagcgcaagggcgccaacctgctgctgagcgcctcccctgacttcggcgacatcgctgtgagccacgtcggggcggtggtccccactcacggcttctcgtccttcaagttcatccccaacaccgacgaccagatcattgtggccctcaaatccgaggaggacagcggcagagtcgcctcctacatcatggccttcacgctggacgggcgcttcctgttgccggagaccaagatcggaagcgtgaaatacgaaggcatcgagttcatttaactcaaaacggaaacactgagcaaggccatcaggactcagcttttataaaaacaagaggagtgcacttttgttttgttttgttctttttggaactgtgcctgggttggaggtctggacagggagcccagtcccgggccccatagtggtgcgggcactggacccccgggccccacggaggccgcggtctgaactgctttccatgctgccatctggtggtgatttcggtcacttcaggcattgactcaaggcctgcctaactggctgggtcgtttcttccatccgacctcgtttcttttctttcctatgttcttttgttcagtgaatatccctagagctcctaccatatgtcaggccctatgcctcaccctgagaacgcagtgagcatgaggtggacctgtttgctgggaaccccaggtcacccccttttcttcctactctgtgcctggagcatcatgtccacccctgcagatccttggaaaagaaaatgtttatgttgcagggtattgcatggtcacgagtgagggcaggcccctggggacacatctgcccacagctgcacaggccagggcgcaggcacatctgttggttctcaggcctcagataaaaccatctccgcatcatatggccagtgaccgctttctcccttcaagaaaattctgtggctgtgcagtactttgaagttttaattattaacctgctttaattaaagcagtttcctttcttataaagtggaatcaccaaatcttatcacacagagcacagtcctgtagttacccagcccgctccagcagtgcgggagattgtaaggaagcggtggcggctggtgaagcaagtctcacatgtcggcgttcttggccaatggatacaaagataaagaaaatgttgcctttttctaggaactgtcagaaatcctcatgcctttcaagacttctgtgaatgacttgaattttttattccctgcctagggtctgtgaacgaggcctgtctcttccctggggtttctttccatggcctttatttctcctcttccagtgggagttttgcaggctcttctctgtggaaacttcacgagcgttggctgggcctcggcttcgctggagtgtactccagggtgaaggcagagtgggatttgagacccaggttaggcacgacccaggctgagaagggacgtttccatcattcacagtgccctccccacagcactacctcaccccgacccccaccctcactcctaccccaccccgcgatcgtcaggggtgccacggtgggccggagggtgccggctctggctgtccctgtgccggtccctcacaaacctctccccctttgaaactcaagcacagctgcgaggagggcagcgaggagggacccctctctcatggttgtctctttcccccgctatgtcataggtagtggaggaagcgaaggaagtgaacgctgaatgtgacgcatttctgaagagctcagctgtcaccgggcatagcctggaagccccaagtctgttctgactttgcctggctgtctccttgacccgcctcctagatcattgtccttgatgtccaggctgggtcatttaaaatagagatgcaatcaggaaggttgggggacttgggactgtggctgaattgagaccttgctgatgtattcatgtcagcacctgagtcacagcccaggtgcccggaagcagcctcttcgcataggcagtgatttgcgattactttaaagctcaccttttttcttcccctctctgttcgctgctgtcagcataatgattgtgttccttccctatgggatccatctgttttgtaaacaataaagcgtctgagggagtgt

SEQ ID NO: 4085 - DNA, 1373 bp, Homo sapiens
  source 1..1373: mol_type = unassigned DNA
agaggcggggcgagcgcgcgcggggcggaagtcggccaccttcctccgtcccggccgttagcccagccaagcccagccaagcccagccaagccccgccgatcgcgggcaccggagccagccccgcagcggagggaccacagagcaccagcctgcatggaacttccttcctcactcagcttcccacgttgccagctgggacaggggagatggagtaattttgctgtggaaagacttcacgtcttgccgaatgaaagtcccgcctgtctgtcacgctgatgcccgtgcagctgtctgagcacccggaatggaatgagtctatgcactccctccggatcagtgtggggggccttcctgtgctggcgtccatgaccaaggccgcggacccccgcttccgcccccggtctcccccacaaaggacaccggctgggattcggtatcgaatcgcagttatcgcagacctggacacagagtcaagggcccaagaggaaaacacctggttcagttacctgaaaaagggctacctgaccctgtcagacagtggggacaaggtggccgtggaatgggacaaagaccatggggtcctggagtcccacctggcggagaaggggagaggcatggagctatccgacctgattgttttcaatgggaaactctactccgtggatgaccggacgggggtcgtctaccagatcgaaggcagcaaagccgtgccctgggtgattctgtccgacggcgacggcaccgtggagaaaggcttcaaggccgaatggctggcagtgaaggacgagcgtctgtacgtgggcggcctgggcaaggagtggacgaccactacgggtgatgtggtgaacgagaacccggagtgggtgaaggtggtgggctacaagggcagcgtggaccacgagaactgggtgtccaactacaacgccctgcgggctgctgccggcatccagccgccaggctacctcatccatgagtctgcctgctggagtgacacgctgcagcgctggttcttcctgccgcgccgcgccagccaggagcgctacagcgagaaggacgacgagcgcaagggcgccaacctgctgctgagcgcctcccctgacttcggcgacatcgctgtgagccacgtcggggcggtggtccccactcacggcttctcgtccttcaagttcatccccaacaccgacgaccagatcattgtggccctcaaatccgaggaggacagcggcagagtcgcctcctacatcatggccttcacgctggacgggcgcttcctgttgccggagaccaagatcggaagcgtgaaatacgaaggcatcgagttcatttaactcaaaacggaaacactgagcaaggccatcaggactcagctttt

SEQ ID NO: 4086 - DNA, 3478 bp, Homo sapiens
  source 1..3478: mol_type = unassigned DNA
agaggctgccgggaacgcgggcccagaggcggggcgagcgcgcgcggggcggaagtcggccaccttcctccgtcccggccgttagcccagccaagcccagccaagcccagccaagccccgccgatcgcgggcaccggagccagccccgcagcgggagcctaacccagaggaagtggagactcctttactgcacatctgtctgctccaggccaggcactgttctaggagccaggatacagaggtggagacagaaacaaacaaaccgataactgtatacaatactctaacgtcagagggaccacagagcaccagcctgcatggaacttccttcctcactcagcttcccacgttgccagctgggacaggggagatggagtaattttgctgtggaaagacttcacgtcttgccgaatgaaagtcccgcctgtctgtcacgctgatgcccgtgcagctgtctgagcacccggaatggaatgagtctatgcactccctccggatcagtgtggggggccttcctgtgctggcgtccatgaccaaggccgcggacccccgcttccgcccccgctggaaggtgatcctgacgttctttgtgggtgctgccatcctctggctgctctgctcccaccgcccggcccccggcaggccccccacccacaatgcacacaactggaggctcggccaggcgcccgccaactggtacaatgacacctaccccctgtctcccccacaaaggacaccggctgggattcggtatcgaatcgcagttatcgcagacctggacacagagtcaagggcccaagaggaaaacacctggttcagttacctgaaaaagggctacctgaccctgtcagacagtggggacaaggtggccgtggaatgggacaaagaccatggggtcctggagtcccacctggcggagaaggggagaggcatggagctatccgacctgattgttttcaatgggaaactctactccgtggatgaccggacgggggtcgtctaccagatcgaaggcagcaaagccgtgccctgggtgattctgtccgacggcgacggcaccgtggagaaaggcttcaaggccgaatggctggcagtgaaggacgagcgtctgtacgtgggcggcctgggcaaggagtggacgaccactacgggtgatgtggtgaacgagaacccggagtgggtgaaggtggtgggctacaagggcagcgtggaccacgagaactgggtgtccaactacaacgccctgcgggctgctgccggcatccagccgccaggctacctcatccatgagtctgcctgctggagtgacacgctgcagcgctggttcttcctgccgcgccgcgccagccaggagcgctacagcgagaaggacgacgagcgcaagggcgccaacctgctgctgagcgcctcccctgacttcggcgacatcgctgtgagccacgtcggggcggtggtccccactcacggcttctcgtccttcaagttcatccccaacaccgacgaccagatcattgtggccctcaaatccgaggaggacagcggcagagtcgcctcctacatcatggccttcacgctggacgggcgcttcctgttgccggagaccaagatcggaagcgtgaaatacgaaggcatcgagttcatttaactcaaaacggaaacactgagcaaggccatcaggactcagcttttataaaaacaagaggagtgcacttttgttttgttttgttctttttggaactgtgcctgggttggaggtctggacagggagcccagtcccgggccccatagtggtgcgggcactggacccccgggccccacggaggccgcggtctgaactgctttccatgctgccatctggtggtgatttcggtcacttcaggcattgactcaaggcctgcctaactggctgggtcgtttcttccatccgacctcgtttcttttctttcctatgttcttttgttcagtgaatatccctagagctcctaccatatgtcaggccctatgcctcaccctgagaacgcagtgagcatgaggtggacctgtttgctgggaaccccaggtcacccccttttcttcctactctgtgcctggagcatcatgtccacccctgcagatccttggaaaagaaaatgtttatgttgcagggtattgcatggtcacgagtgagggcaggcccctggggacacatctgcccacagctgcacaggccagggcgcaggcacatctgttggttctcaggcctcagataaaaccatctccgcatcatatggccagtgaccgctttctcccttcaagaaaattctgtggctgtgcagtactttgaagttttaattattaacctgctttaattaaagcagtttcctttcttataaagtggaatcaccaaatcttatcacacagagcacagtcctgtagttacccagcccgctccagcagtgcgggagattgtaaggaagcggtggcggctggtgaagcaagtctcacatgtcggcgttcttggccaatggatacaaagataaagaaaatgttgcctttttctaggaactgtcagaaatcctcatgcctttcaagacttctgtgaatgacttgaattttttattccctgcctagggtctgtgaacgaggcctgtctcttccctggggtttctttccatggcctttatttctcctcttccagtgggagttttgcaggctcttctctgtggaaacttcacgagcgttggctgggcctcggcttcgctggagtgtactccagggtgaaggcagagtgggatttgagacccaggttaggcacgacccaggctgagaagggacgtttccatcattcacagtgccctccccacagcactacctcaccccgacccccaccctcactcctaccccaccccgcgatcgtcaggggtgccacggtgggccggagggtgccggctctggctgtccctgtgccggtccctcacaaacctctccccctttgaaactcaagcacagctgcgaggagggcagcgaggagggacccctctctcatggttgtctctttcccccgctatgtcataggtagtggaggaagcgaaggaagtgaacgctgaatgtgacgcatttctgaagagctcagctgtcaccgggcatagcctggaagccccaagtctgttctgactttgcctggctgtctccttgacccgcctcctagatcattgtccttgatgtccaggctgggtcatttaaaatagagatgcaatcaggaaggttgggggacttgggactgtggctgaattgagaccttgctgatgtattcatgtcagcacctgagtcacagcccaggtgcccggaagcagcctcttcgcataggcagtgatttgcgattactttaaagctcaccttttttcttcccctctctgttcgctgctgtcagcataatgattgtgttccttccctatgggatccatctgttttgtaaacaataaagcgtctgagggagtgt

SEQ ID NO: 4087 - DNA, 1138 bp, Homo sapiens
  source 1..1138: mol_type = unassigned DNA
gcgcgcggggcggaagtcggccaccttcctccgtcccggccgttagcccagccaagcccagccaagcccagccaagccccgccgatcgcgggcaccggagccagccccgcagcgggagcctaacccagaggaagtggagactcctttactgcacatctgtctgctccaggccaggcactgttctaggagccaggatacagaggtggagacagaaacaaacaaaccgataactgtatacaatactctaacgtcagagggaccacagagcaccagcctgcatggaacttccttcctcactcagcttcccacgttgccagctgggacaggggagatggagtaattttgctgtggaaagacttcacgtcttgccgaatgaaagtcccgcctgtctgtcacgctgatgcccgtgcagctgtctgagcacccggaatggaatgagtctatgcactccctccggatcagtgtggggggccttcctgtgctggcgtccatgaccaaggccgcggacccccgcttccgcccccgctggaaggtgatcctgacgttctttgtgggtgctgccatcctctggctgctctgctcccaccgcccggcccccggcaggccccccacccacaatgcacacaactggaggctcggccaggcgcccgccaactggtacaatgacacctaccccctgtctcccccacaaaggacaccggctgggattcggtatcgaatcgcagttatcgcagacctggacacagagtcaagggcccaagaggaaaacacctggttcagttacctgaaaaagggctacctgaccctgtcagacagtggggacaaggtggccgtggaatgggacaaagaccatggggtcctggagtcccacctggcggagaaggggagaggcatggagctatccgacctgattgttttcaatgggaaactctactccgtggatgaccggacgggggtcgtctaccagatcgaaggcagcaaagccgtgccctgggtgattctgtccgacggcgacggcaccgtggagaaaggtgtgggtggggagtgggaggcagtgcgggagattgtaaggaagcggtggcggctggtgaagcaagtctcacatgtcggcgttcttggccaatggatacaaagataa

SEQ ID NO: 4088 - DNA, 925 bp, Homo sapiens
  source 1..925: mol_type = unassigned DNA
aggcagcagcatccgccgaggcccacccgggccacccccggggttccaggcctggcatggttcagggcccatggggaactgtgccaagcggccctggcgccggggccctaaggaccccttgcagtggctcggctccccaccaaggggctcctgccccagccccagctccagccccaaggagcagggggaccccgcgccaggcgtccagggctactcggtgctcaacagcctggtggggcctgcctgcatcttcctgcggcccagcattgccgccacccaactcgaccgggagctgcggcccgaggagattgaagagctgcaggtcgccttccaggagtttgaccgagaccgggacggctacattggctgccgggagctgggtgcctgcatgcggaccctgggctacatgcccaccgagatggagctcatcgagatctcacaacaaatcagtggcggaaaggtggactttgaagacttcgtggagctgatgggccccaagctgctggcagagacggcagacatgatcggtgtccgggagctacgggacgccttccgggagttcgacaccaatggggacggccgcatcagcgtgggcgagctccgggcggccctcaaggccctgctgggggagcgcctcagccagcgggaggtggacgagatcctccaggacgtggacctcaatggggacggtctggtcgacttcgaagagtttgtgcgaatgatgtctcggtgagcctgtacagaagctggaggcagcataaaggactcaaggaccacagcctctgcccaccagcatgttccttgaagcccatcgcctctagcggggaccctcctttcctccccatcccacctgtgtgcagtgcccttgcctgccttcacccccaccaccacttctccaataaagccgcctggccttgtctctgtc

SEQ ID NO: 4089 - DNA, 3826 bp, Homo sapiens
  source 1..3826: mol_type = unassigned DNA
gtgcgcacgtcaaagccgggctcgggccgcaagcggggcgaggggttcggggagcggcgcggcctgggagacacagagccttcaggcgccggggcgggggcacaggcgaagactaaggcggcgccgggccccacagcagcagccgcagcccaagcgagcgcagcagcgcggcggcagccgcgggagcccctgggcagccgtccgcccgcgcagccgccgccgccgcgggagcccgtcgccgggagcaggagcgggcggaagacaacggaggggccgagcgtccgagccactccgcggggaccgaacgagcagcccgaagcggcggcggccgaggacggggacagcgacgacgcggaggcagagaagggaacgcccggcccagccccgtagcacaggcggagtgcagcggaggcccctgccgctgccgtcatgccgttcccgtttgggaagtctcacaaatctccagcagacattgtgaagaatctgaaggagagcatggctgttctggaaaagcaagacatttctgataaaaaagcagaaaaggctacagaagaagtttccaaaaatctggttgccatgaaagaaattctgtatggcacaaatgaaaaagagcctcagacagaagcagtagctcaacttgctcaagaactctataatagtgggctccttagcaccctggtagctgatttacagctcattgactttgagggcaaaaaagacgtggctcaaattttcaacaatattctcagaagacaaattggtacgagaactcctactgttgaatacatctgcacccaacagaatattttgttcatgttattgaaagggtatgaatctccagaaatagctctaaattgtggaataatgttaagagaatgcatcagacatgaaccacttgcaaaaatcattttgtggtcggaacagttttatgatttcttcagatatgtcgaaatgtcaacatttgacatagcttcagatgcatttgccacattcaaggatttacttacaagacataaattgctcagtgcagaatttttggaacagcattatgatagatttttcagtgaatatgagaagttacttcattcagaaaattatgtgacaaaaagacagtcactgaagcttctcggtgaactactactagatagacacaacttcacaattatgacaaaatacatcagtaaacctgagaacctcaaattaatgatgaacctgctgcgagacaaaagtcgcaacatccagtttgaggcctttcacgtttttaaggtgtttgtagccaatcctaacaagacgcagcccatcctagacatcctcctcaagaaccaggccaaactcatagagttcctcagcaagtttcagaacgacaggacggaggatgagcagtttaacgacgagaagacctatttagttaaacagatcagggatttgaagagaccagctcagcaagaagcttaatctccaataaacatctatgttaaatccaaattcagcatttgctgttagctattcagcatcaggcactcttattgattcatgaggaacattactgctaatctgctgttaagtgaacggtttttcattttacccttttgtttttcagtccaggttggagatcgtagctgctgctgcttgcacactagggcacatgtgggctttctcttgatctttgtgtcatttcagaattcaaagactgtgctacgggagttctgaacatggctgggttcatgaaggcaaatgtatggatgagagtgtggtttaggaaagagggcactgatatcagattagacctatgtgtttgcacccatctttgttggcgatctgagtgcagtgtggcaagtgcacacctggcatccctgcgtcagatcgcgcaccttcaggtcgcgcaccttcgctgaaggaagatgacgcagagctttatctgaaatcagaggggagctatccaaaatgggagtttgggggcagctaaagttgacatgcgaataaattgatactgaaacttagcaacttcttaaaagtgtaaagaagcctcataagatcataaggaaaatgtatatatgcttttcacagctttctagaattttttgacatttgattttcttgagacttgtaaacctggatatgttgaagggtatttgttaattttacttttcaaagatactttaaaacagtagagctagcaatgacaccttgcatttcatttcaacactgcttcaaggtttcttttgtatataattcttagaatgctcatttcttttaaatggtttaatttgtacagcagaggaatgttattgtagtagtatgtaactattacctaatactgagtttttgcaaaaaacaatgaatgctcatatgtaattgaaatacttcagatcacatgaaaatgctgatttaacatttaagtatcacagcattaaaagaaaaagaaagtaaaccagtcctttgtattcagttacctaatggggtgccatcaataagctgcgatacagccctggagctcagtcagccacaccttcctgcatcctattggccttattcattttaaatgagttaatgaatctgccagatctgtgaatgatagagattatgctaaattaatgctgattctttgtgtgtgtgggaaatctctgtagagcaccttttctttcttagactaagtaacccagtacaatagttgtgaactgaataattaaaactttggcttctcttaggaaaagacgacttcctagtcataggtgtcctatggggaaatttattttttttaatgtcctgttccttaatgctgcaaattatcagtatttataaagtaactgattttgcaccacttttttgttactgtgaccacggcagaacaatgtcttctagactatatctatgtaaagttattagaatggtatctgttcattttagtgatatgaagatcacaactaacaactgacaaatcagagtttgccagttcaaattcagcatggctgcagctgattaagaaattgatatgattattctttgctagcctctcttactaatggaattatatactggccagtaaaatgggcctcccaattgctgtttcagcaggttttaaaccttcaggaacaccagttaggaaaatagctccagaaaatatagatatattttatttttattaaaatggcagtctacatcataattggcatttctcaagactgtctttaccagaatctgtgtgaaataaggcaatctagtctccttgaaaaaaaaatctcttggatgtttaggaaggaagacttggccgtgatgtggtgtcctggctttgtggtgtagtgctgtgtgtatggagttagtgtaaaaacatggattacaccaagtggaagaaacgtcttcttgccaagctcattcttagaacttacacatctagaacagcttccactttggcagtgaggtcgtagccttttaggtggaagaagtgagggtgcagcgtgtcagacacaacattcatgttactcttacattggaatctgaaggtagttcagacttcgtgggttttgtttttaagcaaaacaatgtgaaaacatttaagtttgaaatgttgcatttgaagttatgatcatttaatatattcatattaccaagactattatactggaagtggtttttgtgttataaaggtttaattttacataaggcagttacttaatgtgatttttaacccttaaaaaagtggagatgtatacatttgttaacaatgccatgaaagcattttctttctcctaaggaaaagtgaatttcttatcagaatatctggctggccctgtaatttaaattaaaataaaattttggagaaacagca

SEQ ID NO: 4090 - DNA, 1626 bp, Homo sapiens
  source 1..1626: mol_type = unassigned DNA
agtcgggcgggcggggaagtgcgggccgggtcaactgtcaccggctgcacccgggcttcagcgcctcgctcccgcccctggtaaacttcctgttgtcgggaggcagataccagctttgtgaccaattcaggaaaatgcctaactgatttctggttaggaattgggcggtcggagcgttctggagttcaatggaaccaccccaagcgcagactgcgtgcaggcgccgtagtcggcccgcaccggagggattcaaaggtgaagcgggccccggtcccctcccccgaggagcttaggctctggtgtgagagataagacgagaacacaaataactgcgataccgggaaggaggtgataagtcctgtgaaagaacgacggagtgctagaacggcacccggaaaaaccgaaccgatcacttctgcctcgcagaaacctggaaggcttcctgggcgggggatgctgagcagagtcttgaaggcctgatgggatttaggagaggaggattgcagaagaggtagcacaggcggagtgcagcggaggcccctgccgctgccgtcatgccgttcccgtttgggaagtctcacaaatctccagcagacattgtgaagaatctgaaggagagcatggctgttctggaaaagcaagacatttctgataaaaaagcagaaaaggctacagaagaagtttccaaaaatctggttgccatgaaagaaattctgtatggcacaaatgaaaaagagcctcagacagaagcagtagctcaacttgctcaagaactctataatagtgggctccttagcaccctggtagctgatttacagctcattgactttgagggcaaaaaagacgtggctcaaattttcaacaatattctcagaagacaaattggtacgagaactcctactgttgaatacatctgcacccaacagaatattttgttcatgttattgaaagggtatgaatctccagaaatagctctaaattgtggaataatgttaagagaatgcatcagacatgaaccacttgcaaaaatcattttgtggtcggaacagttttatgatttcttcagatatgtcgaaatgtcaacatttgacatagcttcagatgcatttgccacattcaaggatttacttacaagacataaattgctcagtgcagaatttttggaacagcattatgatagatttttcagtgaatatgagaagttacttcattcagaaaattatgtgacaaaaagacagtcactgaagcttctcggtgaactactactagatagacacaacttcacaattatgacaaaatacatcagtaaacctgagaacctcaaattaatgatgaacctgctgcgagacaaaagtcgcaacatccagtttgaggcctttcacgtttttaaggtgtttgtagccaatcctaacaagacgcagcccatcctagacatcctcctcaagaaccaggccaaactcatagagttcctcagcaagtttcagaacgacaggacggaggatgagcagtttaacgacgagaagacctatttagttaaacagatcagggatttgaagagaccagctcagcaagaagcttaatctccaataaacatctatgttaaatccaaattcagcatttgctgtt

SEQ ID NO: 4091 - DNA, 1324 bp, Homo sapiens
  source 1..1324: mol_type = unassigned DNA
agtcgggcgggcggggaagtgcgggccgggtcaactgtcaccggctgcacccgggcttcagcgcctcgctcccgcccctggtaaacttcctgttgtcgggaggcagataccagctttgtgaccaattcaggaaaatgcctaactgatttctggttaggaattgggcggtcggagcgttctggagttcaatggaaccaccccaagcgcagactgcgtgcaggcgccgtagtcggcccgcaccggagggattcaaaggtagcacaggcggagtgcagcggaggcccctgccgctgccgtcatgccgttcccgtttgggaagtctcacaaatctccagcagacattgtgaagaatctgaaggagagcatggctgttctggaaaagcaagacatttctgataaaaaagcagaaaaggctacagaagaagtttccaaaaatctggttgccatgaaagaaattctgtatggcacaaatgaaaaagagcctcagacagaagcagtagctcaacttgctcaagaactctataatagtgggctccttagcaccctggtagctgatttacagctcattgactttgagggcaaaaaagacgtggctcaaattttcaacaatattctcagaagacaaattggtacgagaactcctactgttgaatacatctgcacccaacagaatattttgttcatgttattgaaagggtatgaatctccagaaatagctctaaattgtggaataatgttaagagaatgcatcagacatgaaccacttgcaaaaatcattttgtggtcggaacagttttatgatttcttcagatatgtcgaaatgtcaacatttgacatagcttcagatgcatttgccacattcaaggatttacttacaagacataaattgctcagtgcagaatttttggaacagcattatgatagatttttcagtgaatatgagaagttacttcattcagaaaattatgtgacaaaaagacagtcactgaagcttctcggtgaactactactagatagacacaacttcacaattatgacaaaatacatcagtaaacctgagaacctcaaattaatgatgaacctgctgcgagacaaaagtcgcaacatccagtttgaggcctttcacgtttttaaggtgtttgtagccaatcctaacaagacgcagcccatcctagacatcctcctcaagaaccaggccaaactcatagagttcctcagcaagtttcagaacgacaggacggaggatgagcagtttaacgacgagaagacctatttagttaaacagatcagggatttgaagagaccagctcagcaagaagcttaa

SEQ ID NO: 4092 - DNA, 3520 bp, Homo sapiens
  source 1..3520: mol_type = unassigned DNA
agcgctctcggcttgtctcgcgcactgtagctgagccaatggagttactcgtagtcgagaggccggcatcactggagtggtggcgcagctgtttcctccggatatccatcaaatattgagaagaaagaatatcaggagcaaagtgttctaagttgctgttcagaacgtaaagatgcgaaccccaaatcagtggtttgttcattcttcatgcaagagcaatgcactaaaggagagaagcgtaagttttctcttatttctgatggggaaacaagcacacgcatacacactcttgtgatggagatagattttacaagcattccatattggaagaagagatttctacacatgaaaaaaatgcctttgtttagtaaatcacacaaaaatccagcagaaattgtgaaaatcctgaaagacaatttggccattttggaaaagcaagacaaaaagacagacaaggcttcagaagaagtgtctaaatcactgcaagcaatgaaagaaattctgtgtggtacaaacgagaaagaacccccaacagaagcagtggctcagctagcacaagaactctacagcagtggcctgctagtgacactgatagctgacctgcagctgatagactttgagggaaaaaaagatgtgacccagatatttaacaacatcttgagaagacagataggcactcggagtcctactgtggagtatattagtgctcatcctcatatcctgtttatgctcctcaaaggatatgaagccccacagattgccttacgttgtgggattatgctgagagaatgtattcgacatgaaccacttgccaaaatcatcctcttttctaatcaattcagagatttctttaagtacgtggagttgtcaacatttgatattgcttcagatgcctttgctactttcaaggatttactaaccagacataaagtgttggtagcagacttcttagaacaaaattacgacactatttttgaagactatgagaaattgcttcagtctgagaattatgttactaagagacagtctttaaagctgctaggggagctgatcctggaccgtcacaactttgccatcatgacaaagtatatcagcaagccggagaacctgaaactcatgatgaacctccttcgggataaaagtcccaacatccagtttgaagcctttcatgtttttaaggtgtttgtggccagtcctcacaaaacacagcctattgtggagatcctgttaaaaaatcagcccaaactcattgagtttctgagcagcttccaaaaagaaaggacggatgatgagcagttcgctgacgagaagaactacttgattaaacagatccgagacttgaagaaaacggccccttgaagagctccccggcccctgtcacagtcagtcgtctcatttgtccagtttgtacagtgtgtcatttcagaaagtcatcattcttgggaagactttggaggtgcctattttttctgctgtaattgttctgggtagatggagtataaacatttgaatggaaaaaaattaacctagaataatatattcattttagtcaagtctgtgattatttatgtgaaatgagaaccattgtatcagatgttgataaaagcaattttaacttgcagatgtgagcccctgggcacaatgagccgctaaatgggagctcaattgacaggcatcaccaagtcttcaaggaggactgagttctcaggggagaactgggaatggggccagggtgcaaaaatgctttgcccatctgtaggtagacacacagatcgctcagggcactgagagatcccagaaggtaacgttaatgttttcagtcattgtgtgtcctttgttgctgccaatgtctttggactgtaatcagtgcatccacacctcccaggatccagtgctccctctcagctcagtctcccctctctccctgtcctgcattccatcccagctcctcagcatggcctcagtgggcgcacccatgcctcccgcagtccaggtgagcaggggagcaactgagcaggaagaggatggatcaacaagggtcacggggaataggggacccacggggtgtgacctgcttgctagagaactgtgaacatgtggctctggatagagtgactgctgctccatattagcttccagagggtgagtgagggacagaatatttccttcataatggtcatgggtgaatgctttctgctgtaagtgtcttttagagtaggaatcagcatagtgggatgcccagcaggcacaaaccatgggtccagggagtctcagcggggaacttctatcagtatcaataaccattggaaggagaaatgattcatgtgtgaaaaaattctcagatccatcaataaatttttttcagagccattgtatcagatgttgataaaagcaatttttttctaataagctgtcattctataattgcccatcacagtctttagtgaacacatagaaagcctatacagttttggtcctgaatagtctcttgtgactaggatgattgaggtgttaattcctcttccttataaaaaggcttggaatcaaaaatattttaaaaggccgtggtttcgtttcagacatcaaccatctaaaacgggattttaaagcgatattttacaagaatgaaaggcacaattgttgatctgtattttttacacttcagtttctaaatcatgaatcgttgccttccacaggaaccctcccttatacattacttgagtgttgtgtagtttttcttcagccaggtatttctctgcctagagaggggaagagaaatgtgttctccaggactgatcccctttgtagattttgtacctgaagagttacctggcagggcaccacccttggctaggcccaggtgtgtgtttctttcttgcctggcatggaccccgaggcaggtgatgtggggcctggcgcacctccccgctttggcagctgtggcctccctggccagtgcccttgcaggaggccggccggcagcctgatgacccgtactctttagtcactgacgtcagattatttttataacgttccctgacagttcagagtcccttcgaattgcacttttctggtttcgcttatttaattaaaagagatgagtgtaagtataaaaaatgaaggtgaaataaccattggaattgtatttggttacttaatactgttccacaacatcttgggacgtctgttttcctttggagagtgaggccttgttattattcttttctgataaagaaaacattttatttcctttgggcttgcattagctctttcctagcaacccattatcccagctcagtacctttcaaacagaaaactagagtctggggttttgttgtgatctgaatttgtaagttattaatgtgaaagggggagcaggaagctccccctttgcacaaagggggatttgtttgcacaaagttcactgtaaatactgtgagaattgaattctgaaaaggtcatatttagtgatttcaaaagcacacatttaaatgaagactgactaaataaaaggtaccac

SEQ ID NO: 4093 - DNA, 3676 bp, Homo sapiens
  source 1..3676: mol_type = unassigned DNA
gtgacgttacaggactgaggagggaggaagtaaaagggagctgtgactgtggtacgtatctgaaagcaagtgttagagagggagtggagaacgcataagcaagctggtttgaccagaaacagaactgcctgtgacagattaagagacaagcaaggcttggaatctgagagcaagcaaagagagtggaaatttacagctgccctatgtgagtgttcaagtgatcattttctggtaacgttttccagtggtaactgttactcttcaaaaagagggacagaaagtcaagacctaattgtggaaactcttttctctgccacgcttggtaataggaggcaacctctattaaatggacgataaaggctacttcatctaaagtgctttgagctcaagaaagagctgtcttcagcacctcaccatgtgtctacattttgttgcttagaaaagcctaggcatttctgtaacatttgcattccatattggaagaagagatttctacacatgaaaaaaatgcctttgtttagtaaatcacacaaaaatccagcagaaattgtgaaaatcctgaaagacaatttggccattttggaaaagcaagacaaaaagacagacaaggcttcagaagaagtgtctaaatcactgcaagcaatgaaagaaattctgtgtggtacaaacgagaaagaacccccaacagaagcagtggctcagctagcacaagaactctacagcagtggcctgctagtgacactgatagctgacctgcagctgatagactttgagggaaaaaaagatgtgacccagatatttaacaacatcttgagaagacagataggcactcggagtcctactgtggagtatattagtgctcatcctcatatcctgtttatgctcctcaaaggatatgaagccccacagattgccttacgttgtgggattatgctgagagaatgtattcgacatgaaccacttgccaaaatcatcctcttttctaatcaattcagagatttctttaagtacgtggagttgtcaacatttgatattgcttcagatgcctttgctactttcaaggatttactaaccagacataaagtgttggtagcagacttcttagaacaaaattacgacactatttttgaagactatgagaaattgcttcagtctgagaattatgttactaagagacagtctttaaagctgctaggggagctgatcctggaccgtcacaactttgccatcatgacaaagtatatcagcaagccggagaacctgaaactcatgatgaacctccttcgggataaaagtcccaacatccagtttgaagcctttcatgtttttaaggtgtttgtggccagtcctcacaaaacacagcctattgtggagatcctgttaaaaaatcagcccaaactcattgagtttctgagcagcttccaaaaagaaaggacggatgatgagcagttcgctgacgagaagaactacttgattaaacagatccgagacttgaagaaaacggccccttgaagagctccccggcccctgtcacagtcagtcgtctcatttgtccagtttgtacagtgtgtcatttcagaaagtcatcattcttgggaagactttggaggtgcctattttttctgctgtaattgttctgggtagatggagtataaacatttgaatggaaaaaaattaacctagaataatatattcattttagtcaagtctgtgattatttatgtgaaatgagaaccattgtatcagatgttgataaaagcaattttaacttgcagatgtgagcccctgggcacaatgagccgctaaatgggagctcaattgacaggcatcaccaagtcttcaaggaggactgagttctcaggggagaactgggaatggggccagggtgcaaaaatgctttgcccatctgtaggtagacacacagatcgctcagggcactgagagatcccagaaggtaacgttaatgttttcagtcattgtgtgtcctttgttgctgccaatgtctttggactgtaatcagtgcatccacacctcccaggatccagtgctccctctcagctcagtctcccctctctccctgtcctgcattccatcccagctcctcagcatggcctcagtgggcgcacccatgcctcccgcagtccaggtgagcaggggagcaactgagcaggaagaggatggatcaacaagggtcacggggaataggggacccacggggtgtgacctgcttgctagagaactgtgaacatgtggctctggatagagtgactgctgctccatattagcttccagagggtgagtgagggacagaatatttccttcataatggtcatgggtgaatgctttctgctgtaagtgtcttttagagtaggaatcagcatagtgggatgcccagcaggcacaaaccatgggtccagggagtctcagcggggaacttctatcagtatcaataaccattggaaggagaaatgattcatgtgtgaaaaaattctcagatccatcaataaatttttttcagagccattgtatcagatgttgataaaagcaatttttttctaataagctgtcattctataattgcccatcacagtctttagtgaacacatagaaagcctatacagttttggtcctgaatagtctcttgtgactaggatgattgaggtgttaattcctcttccttataaaaaggcttggaatcaaaaatattttaaaaggccgtggtttcgtttcagacatcaaccatctaaaacgggattttaaagcgatattttacaagaatgaaaggcacaattgttgatctgtattttttacacttcagtttctaaatcatgaatcgttgccttccacaggaaccctcccttatacattacttgagtgttgtgtagtttttcttcagccaggtatttctctgcctagagaggggaagagaaatgtgttctccaggactgatcccctttgtagattttgtacctgaagagttacctggcagggcaccacccttggctaggcccaggtgtgtgtttctttcttgcctggcatggaccccgaggcaggtgatgtggggcctggcgcacctccccgctttggcagctgtggcctccctggccagtgcccttgcaggaggccggccggcagcctgatgacccgtactctttagtcactgacgtcagattatttttataacgttccctgacagttcagagtcccttcgaattgcacttttctggtttcgcttatttaattaaaagagatgagtgtaagtataaaaaatgaaggtgaaataaccattggaattgtatttggttacttaatactgttccacaacatcttgggacgtctgttttcctttggagagtgaggccttgttattattcttttctgataaagaaaacattttatttcctttgggcttgcattagctctttcctagcaacccattatcccagctcagtacctttcaaacagaaaactagagtctggggttttgttgtgatctgaatttgtaagttattaatgtgaaagggggagcaggaagctccccctttgcacaaagggggatttgtttgcacaaagttcactgtaaatactgtgagaattgaattctgaaaaggtcatatttagtgatttcaaaagcacacatttaaatgaagactgactaaataaaaggtaccacaca

SEQ ID NO: 4094 - DNA, 3613 bp, Homo sapiens
  source 1..3613: mol_type = unassigned DNA
gtgacgttacaggactgaggagggaggaagtaaaagggagctgtgactgtggtacgtatctgaaagcaagtgttagagagggagtggagaacgcataagcaagctggtttgaccagaaacagaactgcctgtgacagattaagagacaagcaaggcttggaatctgagagcaagcaaagagagtggaaatttacagctgccctatgtgagtgttcaagtgatcattttctggtaacgttttccagtggtaactgttactcttcaaaaagagggacagaaagtcaagacctaattgtggaaactcttttctctgccacgcttggtaataggaggcaacctctattaaatggacgataaaggctacttcatctaaagtgctttgagctcaagaaagagctgtcttcagcacctcaccatgtgtctacattttgttgcttagaaaagcctaggcatttctgtaacatttgcattccatattggaagaagagatttctacacatgaaaaaaatgcctttgtttagtaaatcacacaaaaatccagcagaaattgtgaaaatcctgaaagacaatttggccattttggaaaagcaagacaaaaagacagacaaggcttcagaagaagtgtctaaatcactgcaagcaatgaaagaaattctgtgtggtacaaacgagaaagaacccccaacagaagcagtggctcagctagcacaagaactctacagcagtggcctgctagtgacactgatagctgacctgcagctgatagactttgagggaaaaaaagatgtgacccagatatttaacaacatcttgagaagacagataggcactcggagtcctactgtggagtatattagtgctcatcctcatatcctgtttatgctcctcaaaggatatgaagccccacagattgccttacgttgtgggattatgctgagagaatgtattcgacatgaaccacttgccaaaatcatcctcttttctaatcaattcagagatttctttaagtacgtggagttgtcaacatttgatattgcttcagatgcctttgctactttcaagatttttgaagactatgagaaattgcttcagtctgagaattatgttactaagagacagtctttaaagctgctaggggagctgatcctggaccgtcacaactttgccatcatgacaaagtatatcagcaagccggagaacctgaaactcatgatgaacctccttcgggataaaagtcccaacatccagtttgaagcctttcatgtttttaaggtgtttgtggccagtcctcacaaaacacagcctattgtggagatcctgttaaaaaatcagcccaaactcattgagtttctgagcagcttccaaaaagaaaggacggatgatgagcagttcgctgacgagaagaactacttgattaaacagatccgagacttgaagaaaacggccccttgaagagctccccggcccctgtcacagtcagtcgtctcatttgtccagtttgtacagtgtgtcatttcagaaagtcatcattcttgggaagactttggaggtgcctattttttctgctgtaattgttctgggtagatggagtataaacatttgaatggaaaaaaattaacctagaataatatattcattttagtcaagtctgtgattatttatgtgaaatgagaaccattgtatcagatgttgataaaagcaattttaacttgcagatgtgagcccctgggcacaatgagccgctaaatgggagctcaattgacaggcatcaccaagtcttcaaggaggactgagttctcaggggagaactgggaatggggccagggtgcaaaaatgctttgcccatctgtaggtagacacacagatcgctcagggcactgagagatcccagaaggtaacgttaatgttttcagtcattgtgtgtcctttgttgctgccaatgtctttggactgtaatcagtgcatccacacctcccaggatccagtgctccctctcagctcagtctcccctctctccctgtcctgcattccatcccagctcctcagcatggcctcagtgggcgcacccatgcctcccgcagtccaggtgagcaggggagcaactgagcaggaagaggatggatcaacaagggtcacggggaataggggacccacggggtgtgacctgcttgctagagaactgtgaacatgtggctctggatagagtgactgctgctccatattagcttccagagggtgagtgagggacagaatatttccttcataatggtcatgggtgaatgctttctgctgtaagtgtcttttagagtaggaatcagcatagtgggatgcccagcaggcacaaaccatgggtccagggagtctcagcggggaacttctatcagtatcaataaccattggaaggagaaatgattcatgtgtgaaaaaattctcagatccatcaataaatttttttcagagccattgtatcagatgttgataaaagcaatttttttctaataagctgtcattctataattgcccatcacagtctttagtgaacacatagaaagcctatacagttttggtcctgaatagtctcttgtgactaggatgattgaggtgttaattcctcttccttataaaaaggcttggaatcaaaaatattttaaaaggccgtggtttcgtttcagacatcaaccatctaaaacgggattttaaagcgatattttacaagaatgaaaggcacaattgttgatctgtattttttacacttcagtttctaaatcatgaatcgttgccttccacaggaaccctcccttatacattacttgagtgttgtgtagtttttcttcagccaggtatttctctgcctagagaggggaagagaaatgtgttctccaggactgatcccctttgtagattttgtacctgaagagttacctggcagggcaccacccttggctaggcccaggtgtgtgtttctttcttgcctggcatggaccccgaggcaggtgatgtggggcctggcgcacctccccgctttggcagctgtggcctccctggccagtgcccttgcaggaggccggccggcagcctgatgacccgtactctttagtcactgacgtcagattatttttataacgttccctgacagttcagagtcccttcgaattgcacttttctggtttcgcttatttaattaaaagagatgagtgtaagtataaaaaatgaaggtgaaataaccattggaattgtatttggttacttaatactgttccacaacatcttgggacgtctgttttcctttggagagtgaggccttgttattattcttttctgataaagaaaacattttatttcctttgggcttgcattagctctttcctagcaacccattatcccagctcagtacctttcaaacagaaaactagagtctggggttttgttgtgatctgaatttgtaagttattaatgtgaaagggggagcaggaagctccccctttgcacaaagggggatttgtttgcacaaagttcactgtaaatactgtgagaattgaattctgaaaaggtcatatttagtgatttcaaaagcacacatttaaatgaagactgactaaataaaaggtaccac

SEQ ID NO: 4095 - DNA, 468 bp, Homo sapiens
  source 1..468: mol_type = unassigned DNA
ggatttcttgtagaagccagttaaaaggagaacctagtatcacactaggcttctgaaaacaccaatcaagagttgcttaatgcaggggtcccttacccctgggctgcagacctgtacctgtccatggcctgttaggaaccgggcagcacagtaggagcattccatattggaagaagagatttctacacatgaaaaaaatgcctttgtttagtaaatcacacaaaaatccagcagaaattgtgaaaatcctgaaagacaatttggccattttggaaaagcaagacaaaaagacagacaaggcttcagaagaagtgtctaaatcactgcaagcaatgaaagaaattctgtgtggtacaaacgagaaagaacccccaacagaagcagtggctcagctagcacaagaactctacagcagtggcctgctagtgacactgatagctgacctgcagctgatagactttgaggtaa

SEQ ID NO: 4096 - DNA, 2416 bp, Homo sapiens
  source 1..2416: mol_type = unassigned DNA
ccgcagtggcgcccgagcgcgccgcctcccgattgactgctagcgctctcggcttgtctcgcgcactgtagctgagccaatggagttactcgtagtcgagaggccggcatcactggagtggtggcgcagctgtttcctccggatatccatcaaatattgagaagaaagaatatcaggagcaaagtgttctaagttgctgttcagaacgtaaagatgcgaaccccaaatcagtggtttgttcattcttcatgcaagagcaatgcactaaaggagagaagcaagctgtggtgatcagtgactttggtgaaagctaagaaggttcaaacaaatttgcaaatgatatacaacttctaagcattccatattggaagaagagatttctacacatgaaaaaaatgcctttgtttagtaaatcacacaaaaatccagcagaaattgtgaaaatcctgaaagacaatttggccattttggaaaagcaagacaaaaagacagacaaggcttcagaagaagtgtctaaatcactgcaagcaatgaaagaaattctgtgtggtacaaacgagaaagaacccccaacagaagcagtggctcagctagcacaagaactctacagcagtggcctgctagtgacactgatagctgacctgcagctgatagactttgagggaaaaaaagatgtgacccagatatttaacaacatcttgagaagacagataggcactcggagtcctactgtggagtatattagtgctcatcctcatatcctgtttatgctcctcaaaggatatgaagccccacagattgccttacgttgtgggattatgctgagagaatgtattcgacatgaaccacttgccaaaatcatcctcttttctaatcaattcagagatttctttaagtacgtggagttgtcaacatttgatattgcttcagatgcctttgctactttcaaggatttactaaccagacataaagtgttggtagcagacttcttagaacaaaattacgacactatttttgaagactatgagaaattgcttcagtctgagaattatgttactaagagacagtctttaaagctgctaggggagctgatcctggaccgtcacaactttgccatcatgacaaagtatatcagcaagccggagaacctgaaactcatgatgaacctccttcgggataaaagtcccaacatccagtttgaagcctttcatgtttttaaggtgtttgtggccagtcctcacaaaacacagcctattgtggagatcctgttaaaaaatcagcccaaactcattgagtttctgagcagcttccaaaaagaaaggacggatgatgagcagttcgctgacgagaagaactacttgattaaacagatccgagacttgaagaaaacggccccttgaagagctccccggcccctgtcacagtcagtcgtctcatttgtccagtttgtacagtgtgtcatttcagaaagtcatcattcttgggaagactttggaggtgcctattttttctgctgtaattgttctgggtagatggagtataaacatttgaatggaaaaaaattaacctagaataatatattcattttagtcaagtctgtgattatttatgtgaaatgagaaccattgtatcagatgttgataaaagcaattttaacttgcagatgtgagcccctgggcacaatgagccgctaaatgggagctcaattgacaggcatcaccaagtcttcaaggaggactgagttctcaggggagaactgggaatggggccagggtgcaaaaatgctttgcccatctgtaggtagacacacagatcgctcagggcactgagagatcccagaaggtaacgttaatgttttcagtcattgtgtgtcctttgttgctgccaatgtctttggactgtaatcagtgcatccacacctcccaggatccagtgctccctctcagctcagtctcccctctctccctgtcctgcattccatcccagctcctcagcatggcctcagtgggcgcacccatgcctcccgcagtccaggtgagcaggggagcaactgagcaggaagaggatggatcaacaagggtcacggggaataggggacccacggggtgtgacctgcttgctagagaactgtgaacatgtggctctggatagagtgactgctgctccatattagcttccagagggtgagtgagggacagaatatttccttcataatggtcatgggtgaatgctttctgctgtaagtgtcttttagagtaggaatcagcatagtgggatgcccagcaggcacaaaccatgggtccagggagtctcagcggggaacttctatcagtatcaataaccattggaaggagaaatgattcatgtgtgaaaaaattctcagatccatcaataaatttttttcagagccattgta

SEQ ID NO: 4097 - DNA, 1627 bp, Homo sapiens
  source 1..1627: mol_type = unassigned DNA
gagccaatggagttactcgtagtcgagaggccggcatcactggagtggtggcgcagctgtttcctccggatatccatcaaatattgagaagaaagaatatcaggagcaaagtgttctaagttgctgttcagaacgtaaagatgcgaaccccaaatcagtggtttgttcattcttcatgcaagagcaatgcactaaaggagagaagcaagctgtggtgatcagtgactttggtgaaagctaagaaggttcaaacaaatttgcaaatgatatacaacttctaaggaggcaacctctattaaatggacgataaaggctacttcatctaaagtgctttgagctcaagaaagagctgtcttcagcacctcaccatgtgtctacattttgttgcttagaaaagcctaggcatttctgtaacatttgcattccatattggaagaagagatttctacacatgaaaaaaatgcctttgtttagtaaatcacacaaaaatccagcagaaattgtgaaaatcctgaaagacaatttggccattttggaaaagcaagacaaaaagacagacaaggcttcagaagaagtgtctaaatcactgcaagcaatgaaagaaattctgtgtggtacaaacgagaaagaacccccaacagaagcagtggctcagctagcacaagaactctacagcagtggcctgctagtgacactgatagctgacctgcagctgatagactttgagggaaaaaaagatgtgacccagatatttaacaacatcttgagaagacagataggcactcggagtcctactgtggagtatattagtgctcatcctcatatcctgtttatgctcctcaaaggatatgaagccccacagattgccttacgttgtgggattatgctgagagaatgtattcgacatgaaccacttgccaaaatcatcctcttttctaatcaattcagagatttctttaagtacgtggagttgtcaacatttgatattgcttcagatgcctttgctactttcaaggatttactaaccagacataaagtgttggtagcagacttcttagaacaaaattacgacactatttttgaagactatgagaaattgcttcagtctgagaattatgttactaagagacagtctttaaagctgctaggggagctgatcctggaccgtcacaactttgccatcatgacaaagtatatcagcaagccggagaacctgaaactcatgatgaacctccttcgggataaaagtcccaacatccagtttgaagcctttcatgtttttaaggtgtttgtggccagtcctcacaaaacacagcctattgtggagatcctgttaaaaaatcagcccaaactcattgagtttctgagcagcttccaaaaagaaaggacggatgatgagcagttcgctgacgagaagaactacttgattaaacagatccgagacttgaagaaaacggccccttgaagagctccccggcccctgtcacagtcagtcgtctcatttgtccagtttgtacagtgtgtcatttcagaaagtcatcattcttgggaagactttggaggtgcctattttttctgctgtaattgttctgggtagatggagtataaacatttgaatggaaaaaaa

SEQ ID NO: 4098 - DNA, 633 bp, Homo sapiens
  source 1..633: mol_type = unassigned DNA
agcgttttgttagggaagaagtggagaacagatattggaaggcaattagctgtctctaatacattgataaaatatataactataactgcaaaatgctaataacccagcagaggagtagatttgggaacataagatgaaaaagtcaacaagtgcattgatcacaacatatggtaatgatagcgtgattgtgatgacctttgttttatacctccttttacattccatattggaagaagagatttctacacatgaaaaaaatgcctttgtttagtaaatcacacaaaaatccagcagaaattgtgaaaatcctgaaagacaatttggccattttggaaaagcaagacaaaaagacagacaaggcttcagaagaagtgtctaaatcactgcaagcaatgaaagaaattctgtgtggtacaaacgagaaagaacccccaacagaagcagtggctcagctagcacaagaactctacagcagtggcctgctagtgacactgatagctgacctgcagctgatagactttgagggaaaaaaagatgtgacccagatatttaacaacatcttgagaagacagataggcactcggagtcctactgtggagtatattagtgctcatcctcatatcctgtttatgc

SEQ ID NO: 4099 - DNA, 727 bp, Homo sapiens
  source 1..727: mol_type = unassigned DNA
agagagggagtggagaacgcataagcaagctggtttgaccagaaacagaactgcctgtgacagattaagagacaagcaaggcttggaatctgagagcaagcaaagagagtggaaatttacagctgccctatcattccatattggaagaagagatttctacacatgaaaaaaatgcctttgtttagtaaatcacacaaaaatccagcagaaattgtgaaaatcctgaaagacaatttggccattttggaaaagcaagacaaaaagacagacaaggcttcagaagaagtgtctaaatcactgcaagcaatgaaagaaattctgtgtggtacaaacgagaaagaacccccaacagaagcagtggctcagctagcacaagaactctacagcagtggcctgctagtgacactgatagctgacctgcagctgatagactttgagggaaaaaaagatgtgacccagatatttaacaacatcttgagaagacagataggcactcggagtcctactgtggagtatattagtgctcatcctcatatcctgtttatgctcctcaaaggatatgaagccccacagattgccttacgttgtgggattatgctgagagaatgtattcgacatgaaccacttgccaaaatcatcctcttttctaatcaattcagagatttctttaagtacgtggagttgtcaacatttgatattgcttcagatgcctttgctactttcaagg

SEQ ID NO: 4100 - DNA, 1299 bp, Homo sapiens
  source 1..1299: mol_type = unassigned DNA
cataagcagctttatgggtcctgaaagccaagggtgcccaggggtgtggtgtctctgagccctgttatccctcccccatgaccacagagcaggcaagggggcagcagggcccaaatctggccattggccgtcagaagccccctgcgggggttgtgactcccaagagtgatgcagaggagcccccgttgaccaggaagaggagcaagaaggagagggggctccgagggtctcgaaagcgcactggcagctctggggagcagacaggccccgaggccccggggagcagcaataaccctcccagcactggagaggggccggcgggcgcaccccctgcatcccctgggccggcctcttctcgccagtcccaccgacatcgtcctgactccctgcacgacgctgctcagaggacatacgggcccctgctcaatcgagtcttcgggaaggaccgcgaactgggccccgaggagctagacgagcttcaggccgccttcgaggagtttgacactgaccgtgacggctacatcagccaccgggagctgggtgactgcatgcggaccctgggctacatgcccaccgagatggagctcctggaggtctcgcagcacatcaagatgcgcatgggcggccgtgtggactttgaggagtttgtagaactgataggcccaaagctgagggaggagacggcgcacatgctgggggtgcgagagctgcgcatcgccttccgagagtttgacagggacagggatggacgaattacggtggcggagctgcgggaggcggtaccggctctgctcggggagccgctggcgggtcctgagctggacgagatgctccgagaagtggacctcaatggggatggcaccgtagactttgacgagtttgtgatgatgctctcccgccactgaggctccaggagggaatatctgttgcccctgcggccccagacaccagccagacccaggctgcaggcctcccccaggagcctccaggatggagatggagacccagcagcccccagactacttctatccctgaaaacacctggcctcaatgttggcttgttatgttacctgcccaccctcatccttacctcctcctactcaagctgcctggagaagacctgctctcagctgcccaccgttcctcagtgtgagcaagatttgggtctctccagacctctgggaggtagggagttccctggcactggcagcattcagtggggaccccccagtggcatgatgaatggagaggatggctggaccccttccactacttatgtttataatttttttttttttt

SEQ ID NO: 4101 - DNA, 1426 bp, Homo sapiens
  source 1..1426: mol_type = unassigned DNA
aggcagctgtccccagcggccagtgtcccccatgccggatctctaggatctggaaggccgctgctgccaggaacaagaagtcagagagggccaggctgagcaggagcagcgccagacgcgtgccagctccatgccgggcctgggagccggccagccacgccatcaacccattggctggcagcccaaggagcagcagggccaccaggaagaccgtgtcccagccaccttggggtcccaccgacatcgtcctgactccctgcacgacgctgctcagaggacatacgggcccctgctcaatcgagtcttcgggaaggccaacatgagcaggggatgaaggaggaaggatgacagagccgtggctggccctggggacatcctggactctccccctgcaggaccgcgaactgggccccgaggagctagacgagcttcaggccgccttcgaggagtttgacactgaccgtgacggctacatcagccaccgggagctgggtgactgcatgcggaccctgggctacatgcccaccgagatggagctcctggaggtctcgcagcacatcaagatgcgcatgggcggccgtgtggactttgaggagtttgtagaactgataggcccaaagctgagggaggagacggcgcacatgctgggggtgcgagagctgcgcatcgccttccgagagtttgacagggacagggatggacgaattacggtggcggagctgcgggaggcggtaccggctctgctcggggagccgctggcgggtcctgagctggacgagatgctccgagaagtggacctcaatggggatggcaccgtagactttgacgagtttgtgatgatgctctcccgccactgaggctccaggagggaatatctgttgcccctgcggccccagacaccagccagacccaggctgcaggcctcccccaggagcctccaggatggagatggagacccagcagcccccagactacttctatccctgaaaacacctggcctcaatgttggcttgttatgttacctgcccaccctcatccttacctcctcctactcaagctgcctggagaagacctgctctcagctgcccaccgttcctcagtgtgagcaagatttgggtctctccagacctctgggaggtagggagttccctggcactggcagcattcagtggggaccccccagtggcatgatgaatggagaggatggctggaccccttccactacttatgtttataattttttttttttttaatgaacttgagccgggtgcagtggctcacacctgtaagcccagctgtcagggggcagaagcgggaggatagcttgagcccaggagtgcaagacctgcctgggcaatatactgagaccccattctccacaaaaaggaaaaataaaagacaaaaaaacaaacaaaaaaccaaaaaa

SEQ ID NO: 4102 - DNA, 1250 bp, Homo sapiens
  source 1..1250: mol_type = unassigned DNA
ccaagagaggcaggaagaggtggcaaaggagtgctggagaagataaggaggctgagctccgacagggagcagggaggaggggccatcttgagactggtgccctgcgagctccaccccacccctccatgcagttccccatgggccccgcctgcatcttcttgaggaaaggcattgctgagaaacagcgggaaagaccactgggacaagatgagattgaagagctgcgggaagcatttcttgagttcgataaggaccgagatgggttcatctcttgtaaggatctggggaatctcatgaggacgatgggttacatgcccacggagatggaactgattgagctcggccagcaaatccgcatgaacctgggtggccgtgtagactttgatgactttgtggagctgatgacccccaaattgcttgcagaaacagctgggatgatcggtgtccaggagatgcgggatgccttcaaggagtttgacacgaatggagatggggagatcaccctggtggagctacagcaggccatgcagagactcctgggggagcggctcaccccccgggagatctctgaggttgtccgggaggctgatgttaatggagacggcacagttgactttgaagagtttgtgaagatgatgtctcgctgaggaggtcctggaagctccagaccctctccacctggtcaacatggagcaagcgcttgtggagaaccaaagcccaaaagccccagatccccttaaagcagagagggagggcaggcgggagggagggcattggcatgcggcgctgtgcatggggtgagacccagagcggtatctttgccaggatgggggcgtctgcagaactagattaagaaggaagagtctgtggatggaaataggaagcgtgggagggtccagttgccacccccaaaaattccaatgattcttgacatcttttcacttcacgtagtcctaagtccctgtgacctgccagagtctcttccccagcttccccttgggtgaaaatagtctcttctcctgttgggtatcaaaaggttcagaacgtagtctctactcttcccctgcctgcatcaactgttgcaaatcccgtttctctctcccggtaaggggacaaattatactttattcaggtgatggttacatgaacagcccagacttcaccactacgcaatatatccatgtaacaaaaccgcacttgtactccctaaatctatagaaatacaaaatgaaataaaaaggatgcaaatc

SEQ ID NO: 4103 - DNA, 1044 bp, Homo sapiens
  source 1..1044: mol_type = unassigned DNA
taagagcgcggccggaaagcagtagagaaatggtcagaaggaacgacaccacagaagaaattagaatgtttaaaagaaccaggaaaaacatctgtagaatctaaagtacctacccagatggaaaaatctacagacacagacgaggacaatgtaaccagaacagaatatagtgacaaaaccacccagtttccatcagtttatgctgtgccaggcactgagcaaacggaagcagttggtggtctttcttccaaaccagccacccctaagactactaccccaccctcatcaccacctccaacagctgtctcaccagagtttgcctacgtcccagctgacccagctcagcttgctgctcagatgttagcaatggcaacaagtgaacgaggacaaccaccaccatgttctaacatgtggaccctttattgtctaactgataagaatcaacaaggtcacccatcaccgccacctgcacctgggccttttccccaagcaaccctctatttacctaatcctaaggatccacagtttcagcagcatccaccaaaagtcacttttccaacttatgtgatgggcgacaccaagaagaccagtgccccaccttttatcttagtaggctcaaatgttcaggaagcacagggatggaaacctcttcctggacatgctgtcgtttcacagtcagatgtcttgagatatgttgcaatgcaagtgcccattgctgttcctgcagatgagaaataccagaaacataccctaagtccccagaatgctaatcctccaagtggacaagatgtccccaggccaaaaagccctgttttcctttctgttgctttcccagtagaagatgtagctaaaaaaagttcaggatctggtgacaaatgtgctccctttggaagttacggtattgctggggaggtaaccgtgactactgctcacaaacgtcgcaaagcagaaactgaaaactgatccagaaatgacgctgtctgggtcaacatttcagggaggagtctgccaccagtgtaatgtatcaataaacttcatgcaagc

SEQ ID NO: 4104 - DNA, 1547 bp, Homo sapiens
  source 1..1547: mol_type = unassigned DNA
aggagccgccggcaagggggcaacgaggaagctcttaagagcgcggccggaaagcagtagagaaatggtcagaaggaacgacaccacagaagaaattagaatgtttaaaagaaccaggaaaaacatctgtagaatctaaagtacctacccagatggaaaaatctacagacacagacgaggacaatgtaaccagaacagaatatagtgacaaaaccacccagtttccatcagtttatgctgtgccaggcactgagcaaacggaagcagttggtggtctttcttccaaaccagccacccctaagactactaccccaccctcatcaccacctccaacagctgtctcaccagagtttgcctacgtcccagctgacccagctcagcttgctgctcagatgttaggtaaagtttcatctattcattctgatcaatctgatgtgttaatggtggatgtggcaaccagtatgcctgttgttatcaaggaggtgccaagctcagaggctgctgaagatgtcatggtggctgctcctcttgtgtgttctggaaaggtgctagaagtgcaggttgtgaaccaaacatctgtccatgtagatttgggttctcaacctaaagaaaatgaggctgaaccatcaacggcttcctcagtccccttgcaggatgaacaagaacctcctgcttatgatcaagctcctgaggtcactttgcaggctgatattgaggttatgtcaactgttcatatatcatctgtctataacgatgtgcctgtgactgaaggagttgtttatatcgagcaactgccagaacaaatagttatcccttttactgatcaagttgcttgtcttaaagaaaatgagcagtcaaaagaaaatgagcagtcaccacgagttagtcccaaatctgtagtagaaaagaccacctctggcatgtctaaaaaatctgtagagtctgtaaaacttgcacagttggaggagaatgcaaaatattcctcagtatatatggaggcagaagcaacagctctgctctctgacacatctttgaaaggtcagcctgaggtacctgcacaactcctggatgcagaaggtgctatcaaaataggctctgaaaaatctctgcaccttgaagtggagatcacttcaatagtctctgacaatactgggcaggaggagtctggggaaaactctgtaccccaggagatggaaggcaaacctgtgctctctggggaagctgcagaagcagtgcactcaggtacatctgtaaagtcatctagtggccccttccctcctgctccagaaggccttactgcaccagaaattgaaccagaaggggaatcaacagctgaataaggtttgatgaagccagcaatggcaacaagtgaacgaggacaaccaccaccatgttctaacatgtggaccctttattgtctaactgataagaatcaacaaggtcacccatcaccgccacctgcacctgggccttttccccaagcaaccctctatttacctaatcctaaggatccacagtttcagcagcatccaccaaaagtcactttt

SEQ ID NO: 4105 - DNA, 1389 bp, Homo sapiens
  source 1..1389: mol_type = unassigned DNA
cggagctttgtgatgcggagcttcgtgatgcacgccccgatgcctgcggggctataaaaacgctcgcaagcgccaagtctcctcaggagccgccggcaagggggcaacgaggaagctcttaagagcgcggccggaaagcagttgagttacagacatcctgccaaaatgatttcttcaaagcccagacttgtcgtaccctatggcctcaagactctgctcgagggaattagcagagctgttctcaaaaccaacccatcaaacatcaaccagtttgcagcagcttattttcaagaacttactatgtatagagggaatactactatggatataaaagatctggttaaacaatttcatcagattaaagtagagaaatggtcagaaggaacgacaccacagaagaaattagaatgtttaaaagaaccaggaaaaacatctgtagaatctaaagtacctacccagatggaaaaatctacagacacagacgaggacaatgtaaccagaacagaatatagtgacaaaaccacccagtttccatcagtttatgctgtgccaggcactgagcaaacggaagcagttggtggtctttcttccaaaccagccacccctaagactactaccccaccctcatcaccacctccaacagctgtctcaccagagtttgcctacgtcccagctgacccagctcagcttgctgctcagatgttagcaatggcaacaagtgaacgaggacaaccaccaccatgttctaacatgtggaccctttattgtctaactgataagaatcaacaaggtcacccatcaccgccacctgcacctgggccttttccccaagcaaccctctatttacctaatcctaaggatccacagtttcagcagcatccaccaaaagtcacttttccaacttatgtgatgggcgacaccaagaagaccagtgccccaccttttatcttagtaggctcaaatgttcaggaagcacagggatggaaacctcttcctggacatgctgtcgtttcacagtcagatgtcttgagatatgttgcaatgcaagtgcccattgctgttcctgcagatgagaaataccagaaacataccctaagtccccagaatgctaatcctccaagtggacaagatgtccccaggccaaaaagccctgttttcctttctgttgctttcccagtagaagatgtagctaaaaaaagttcaggatctggtgacaaatgtgctccctttggaagttacggtattgctggggaggtaaccgtgactactgctcacaaacgtcgcaaagcagaaactgaaaactgatccagaaatgacgctgtctgggtcaacatttcagggaggagtctgccaccagtgtaatgtatcaataaacttcatgcaagcata

SEQ ID NO: 4106 - DNA, 1284 bp, Homo sapiens
  source 1..1284: mol_type = unassigned DNA
cctatggctccgaagtccccgctggcatcctgaaagttgagttacagacatcctgccaaaatgatttcttcaaagcccagacttgtcgtaccctatggcctcaagactctgctcgagggaattagcagagctgttctcaaaaccaacccatcaaacatcaaccagtttgcagcagcttattttcaagaacttactatgtatagagggaatactactatggatataaaagatctggttaaacaatttcatcagattaaagtagagaaatggtcagaaggaacgacaccacagaagaaattagaatgtttaaaagaaccaggaaaaacatctgtagaatctaaagtacctacccagatggaaaaatctacagacacagacgaggacaatgtaaccagaacagaatatagtgacaaaaccacccagtttccatcagtttatgctgtgccaggcactgagcaaacggaagcagttggtggtctttcttccaaaccagccacccctaagactactaccccaccctcatcaccacctccaacagctgtctcaccagagtttgcctacgtcccagctgacccagctcagcttgctgctcagatgttagcaatggcaacaagtgaacgaggacaaccaccaccatgttctaacatgtggaccctttattgtctaactgataagaatcaacaaggtcacccatcaccgccacctgcacctgggccttttccccaagcaaccctctatttacctaatcctaaggatccacagtttcagcagcatccaccaaaagtcacttttccaacttatgtgatgggcgacaccaagaagaccagtgccccaccttttatcttagtaggctcaaatgttcaggaagcacagggatggaaacctcttcctggacatgctgtcgtttcacagtcagatgtcttgagatatgttgcaatgcaagtgcccattgctgttcctgcagatgagaaataccagaaacataccctaagtccccagaatgctaatcctccaagtggacaagatgtccccaggccaaaaagccctgttttcctttctgttgctttcccagtagaagatgtagctaaaaaaagttcaggatctggtgacaaatgtgctccctttggaagttacggtattgctggggaggtaaccgtgactactgctcacaaacgtcgcaaagcagaaactgaaaactgatccagaaatgacgctgtctgggtcaacatttcagggaggagtctgccaccagtgtaatgtatcaataaacttcatgcaagcata

SEQ ID NO: 4107 - DNA, 902 bp, Homo sapiens
  source 1..902: mol_type = unassigned DNA
tgcggagcttcgtgatgcacgccccgatgcctgcggggctataaaaacgctcgcaagcgccaagtctcctcaggagccgccggcaagggggcaacgaggaagctcttaagagcgcggccggaaagcagttgagttacagacatcctgccaaaatgatttcttcaaagcccagacttgtcgtaccctatggcctcaagactctgctcgagggaattagcagagctgttctcaaaaccaacccatcaaacatcaaccagtttgcagcagcttattttcaagaacttactatgtatagagggaatactactatggatataaaagatctggttaaacaatttcatcagattaaagtagagaaatggtcagaaggaacgacaccacagaagaaattagaatgtttaaaagaaccaggaaaaacatctgtagaatctaaagtacctacccagatggaaaaatctacagacacagacgaggacaatgtaaccagaacagaatatagtgacaaaaccacccagtttccatcagtttatgctgtgccaggcactgagcaaacggaagcagttggtggtctttcttccaaaccagccacccctaagactactaccccaccctcatcaccacctccaacagctgtctcaccagagtttgcctacgtcccagctgacccagctcagcttgctgctcagatgttagaagatgtagctaaaaaaagttcaggatctggtgacaaatgtgctccctttggaagttacggtattgctggggaggtaaccgtgactactgctcacaaacgtcgcaaagcagaaactgaaaactgatccagaaatgacgctgtctgggtcaacatttcagggaggagtctgccaccagtgtaatgtatcaataaacttcatgcaagcata

SEQ ID NO: 4108 - DNA, 2226 bp, Homo sapiens
  source 1..2226: mol_type = unassigned DNA
cttaagagcgcggccggaaagcagttgagttacagacatcctgccaaaatgatttcttcaaagcccagacttgtcgtaccctatggcctcaagactctgctcgagggaattagcagagctgttctcaaaaccaacccatcaaacatcaaccagtttgcagcagcttattttcaagaacttactatgtatagagggaatactactatggatataaaagatctggttaaacaatttcatcagattaaagtagagaaatggtcagaaggaacgacaccacagaagaaattagaatgtttaaaagaaccaggaaaaacatctgtagaatctaaagtacctacccagatggaaaaatctacagacacagacgaggacaatgtaaccagaacagaatatagtgacaaaaccacccagtttccatcagtttatgctgtgccaggcactgagcaaacggaagcagttggtggtctttcttccaaaccagccacccctaagactactaccccaccctcatcaccacctccaacagctgtctcaccagagtttgcctacgtcccagctgacccagctcagcttgctgctcagatgttaggtaaagtttcatctattcattctgatcaatctgatgtgttaatggtggatgtggcaaccagtatgcctgttgttatcaaggaggtgccaagctcagaggctgctgaagatgtcatggtggctgctcctcttgtgtgttctggaaaggtgctagaagtgcaggttgtgaaccaaacatctgtccatgtagatttgggttctcaacctaaagaaaatgaggctgaaccatcaacggcttcctcagtccccttgcaggatgaacaagaacctcctgcttatgatcaagctcctgaggtcactttgcaggctgatattgaggttatgtcaactgttcatatatcatctgtctataacgatgtgcctgtgactgaaggagttgtttatatcgagcaactgccagaacaaatagttatcccttttactgatcaagttgcttgtcttaaagaaaatgagcagtcaaaagaaaatgagcagtcaccacgagttagtcccaaatctgtagtagaaaagaccacctctggcatgtctaaaaaatctgtagagtctgtaaaacttgcacagttggaggagaatgcaaaatattcctcagtatatatggaggcagaagcaacagctctgctctctgacacatctttgaaaggtcagcctgaggtacctgcacaactcctggatgcagaaggtgctatcaaaataggctctgaaaaatctctgcaccttgaagtggagatcacttcaatagtctctgacaatactgggcaggaggagtctggggaaaactctgtaccccaggagatggaaggcaaacctgtgctctctggggaagctgcagaagcagtgcactcaggtacatctgtaaagtcatctagtggccccttccctcctgctccagaaggccttactgcaccagaaattgaaccagaaggggaatcaacagctgaataaggtttgatgaagccagcaatggcaacaagtgaacgaggacaaccaccaccatgttctaacatgtggaccctttattgtctaactgataagaatcaacaaggtcacccatcaccgccacctgcacctgggccttttccccaagcaaccctctatttacctaatcctaaggatccacagtttcagcagcatccaccaaaagtcacttttccaacttatgtgatgggcgacaccaagaagaccagtgccccaccttttatcttagtaggctcaaatgttcaggaagcacagggatggaaacctcttcctggacatgctgtcgtttcacagtcagatgtcttgagatatgttgcaatgcaagtgcccattgctgttcctgcagatgagaaataccagaaacataccctaagtccccagaatgctaatcctccaagtggacaagatgtccccaggccaaaaagccctgttttcctttctgttgctttcccagtagaagatgtagctaaaaaaagttcaggatctggtgacaaatgtgctccctttggaagttacggtattgctggggaggtaaccgtgactactgctcacaaacgtcgcaaagcagaaactgaaaactgatccagaaatgacgctgtctgggtcaacatttcagggaggagtctgccaccagtgtaatgtatcaataaacttcatgcaagc

SEQ ID NO: 4109 - DNA, 2250 bp, Homo sapiens
  source 1..2250: mol_type = unassigned DNA
atgcctgcggggctataaaaacgctcgcaagcgccaagtctcctcaggagccgccggcaagggggcaacgaggaagctcttaagagcgcggccggaaagcagttgagttacagacatcctgccaaaatgatttcttcaaagcccagacttgtcgtaccctatggcctcaagactctgctcgagggaattagcagagctgttctcaaaaccaacccatcaaacatcaaccagtttgcagcagcttattttcaagaacttactatgtatagagtagagaaatggtcagaaggaacgacaccacagaagaaattagaatgtttaaaagaaccaggaaaaacatctgtagaatctaaagtacctacccagatggaaaaatctacagacacagacgaggacaatgtaaccagaacagaatatagtgacaaaaccacccagtttccatcagtttatgctgtgccaggcactgagcaaacggaagcagttggtggtctttcttccaaaccagccacccctaagactactaccccaccctcatcaccacctccaacagctgtctcaccagagtttgcctacgtcccagctgacccagctcagcttgctgctcagatgttaggtaaagtttcatctattcattctgatcaatctgatgtgttaatggtggatgtggcaaccagtatgcctgttgttatcaaggaggtgccaagctcagaggctgctgaagatgtcatggtggctgctcctcttgtgtgttctggaaaggtgctagaagtgcaggttgtgaaccaaacatctgtccatgtagatttgggttctcaacctaaagaaaatgaggctgaaccatcaacggcttcctcagtccccttgcaggatgaacaagaacctcctgcttatgatcaagctcctgaggtcactttgcaggctgatattgaggttatgtcaactgttcatatatcatctgtctataacgatgtgcctgtgactgaaggagttgtttatatcgagcaactgccagaacaaatagttatcccttttactgatcaagttgcttgtcttaaagaaaatgagcagtcaaaagaaaatgagcagtcaccacgagttagtcccaaatctgtagtagaaaagaccacctctggcatgtctaaaaaatctgtagagtctgtaaaacttgcacagttggaggagaatgcaaaatattcctcagtatatatggaggcagaagcaacagctctgctctctgacacatctttgaaaggtcagcctgaggtacctgcacaactcctggatgcagaaggtgctatcaaaataggctctgaaaaatctctgcaccttgaagtggagatcacttcaatagtctctgacaatactgggcaggaggagtctggggaaaactctgtaccccaggagatggaaggcaaacctgtgctctctggggaagctgcagaagcagtgcactcaggtacatctgtaaagtcatctagtggccccttccctcctgctccagaaggccttactgcaccagaaattgaaccagaaggggaatcaacagctgaataaggtttgatgaagccagcaatggcaacaagtgaacgaggacaaccaccaccatgttctaacatgtggaccctttattgtctaactgataagaatcaacaaggtcacccatcaccgccacctgcacctgggccttttccccaagcaaccctctatttacctaatcctaaggatccacagtttcagcagcatccaccaaaagtcacttttccaacttatgtgatgggcgacaccaagaagaccagtgccccaccttttatcttagtaggctcaaatgttcaggaagcacagggatggaaacctcttcctggacatgctgtcgtttcacagtcagatgtcttgagatatgttgcaatgcaagtgcccattgctgttcctgcagatgagaaataccagaaacataccctaagtccccagaatgctaatcctccaagtggacaagatgtccccaggccaaaaagccctgttttcctttctgttgctttcccagtagaagatgtagctaaaaaaagttcaggatctggtgacaaatgtgctccctttggaagttacggtattgctggggaggtaaccgtgactactgctcacaaacgtcgcaaagcagaaactgaaaactgatccagaaatgacgctgtctgggtcaacatttcagggaggagtctgccaccagtgtaatgtatcaataaacttcatgcaagc

SEQ ID NO: 4110 - DNA, 1872 bp, Homo sapiens
  source 1..1872: mol_type = unassigned DNA
aggcgtgcaggcgggagcagcgtgcagagcagcggccgggttttgctcccgcctcggagcccctggcccgggggagggggagaggccgctagcctggtctatgtctttttctgactccagtgcaaccttcctgctgaacgagggttcagccgactcctacaccagccgcccatctctggactcagacgtctccctggaggaggaccgggagagtgcccggcgtgaagtagagagccaggctcagcagcagctcgaaagggccaagcacaaacctgtggcatttgcggtgaggaccaatgtcagctactgtggcgtactggatgaggagtgcccagtccagggctctggagtcaactttgaggccaaagattttctgcacattaaagagaagtacagcaatgactggtggatcgggcggctagtgaaagagggcggggacatcgccttcatccccagcccccagcgcctggagagcatccggctcaaacaggagcagaaggccaggagatctgggaacccttccagcctgagtgacattggcaaccgacgctcccctccgccatctctagccaagcagaagcaaaagcaggcggaacatgttcccccatatgacgtggtgccctccatgcggcctgtggtgctggtgggaccctctctgaaaggttatgaggtcacagacatgatgcagaaggctctcttcgacttcctcaaacacagatttgatggcaggatctccatcacccgagtcacagccgacctctccctggcaaagcgatctgtgctcaacaatccgggcaagaggaccatcattgagcgctcctctgcccgctccagcattgcggaagtgcagagtgagatcgagcgcatatttgagctggccaaatccctgcagctagtagtgttggacgctgacaccatcaaccacccagcacagctggccaagacctcgctggcccccatcatcgtctttgtcaaagtgtcctcaccaaaggtactccagcgtctcattcgctcccgggggaagtcacagatgaagcacctgaccgtacagatgatggcatatgataagctggttcagtgcccaccggagtcatttgatgtgattctggatgagaaccagctggaggatgcctgtgagcacctggctgagtacctggaggtttactggcgggccacgcaccacccagcccctggccccggacttctgggtcctcccagtgccatccccggacttcagaaccagcagctgctgggggagcgtggcgaggagcactccccccttgagcgggacagcttgatgccctctgatgaggccagcgagagctcccgccaagcctggacaggatcttcacagcgtagctcccgccacctggaggaggactatgcagatgcctaccaggacctgtaccagcctcaccgccaacacacctcggggctgcctagtgctaacgggcatgacccccaagaccggcttctagcccaggactcagagcacaaccacagtgaccggaactggcagcgcaaccggccttggcccaaggatagctactgacagcctcctgctgccctaccctggcaggcacaggcgcagctggctggggggcccactccaggcagggtggcgttagactggcatcaggctggcactaggctcagcccccaaaaccccctgcccagccccagcttcagggctgcctgtggtcccaaggttctgggagaaacaggggaccccctcacctcctgggcagtgacccctactaggctcccattccaggtactagctgtgtgttctgcacccctggcaccttcctctcctcccacacaggaagctgccccactgggcagtgccctcaggccaggatccccttagca

SEQ ID NO: 4111 - DNA, 1814 bp, Homo sapiens
  source 1..1814: mol_type = unassigned DNA
actgacccgaggagcggtcccgcgactctgtactccctgctgcccagtcccggccaggacgctgcccggcttagctggggcgcccctcgagaccaggatggagggttcagccgactcctacaccagccgcccatctctggactcagacgtctccctggaggaggaccgggagagtgcccggcgtgaagtagagagccaggctcagcagcagctcgaaagggccaagcacaaacctgtggcatttgcggtgaggaccaatgtcagctactgtggcgtactggatgaggagtgcccagtccagggctctggagtcaactttgaggccaaagattttctgcacattaaagagaagtacagcaatgactggtggatcgggcggctagtgaaagagggcggggacatcgccttcatccccagcccccagcgcctggagagcatccggctcaaacaggagcagaaggccaggagatctgggaacccttccagcctgagtgacattggcaaccgacgctcccctccgccatctctagccaagcagaagcaaaagcaggcggaacatgttcccccatatgacgtggtgccctccatgcggcctgtggtgctggtgggaccctctctgaaaggttatgaggtcacagacatgatgcagaaggctctcttcgacttcctcaaacacagatttgatggcaggatctccatcacccgagtcacagccgacctctccctggcaaagcgatctgtgctcaacaatccgggcaagaggaccatcattgagcgctcctctgcccgctccagcattgcggaagtgcagagtgagatcgagcgcatatttgagctggccaaatccctgcagctagtagtgttggacgctgacaccatcaaccacccagcacagctggccaagacctcgctggcccccatcatcgtctttgtcaaagtgtcctcaccaaaggtactccagcgtctcattcgctcccgggggaagtcacagatgaagcacctgaccgtacagatgatggcatatgataagctggttcagtgcccaccggagtcatttgatgtgattctggatgagaaccagctggaggatgcctgtgagcacctggctgagtacctggaggtttactggcgggccacgcaccacccagcccctggccccggacttctgggtcctcccagtgccatccccggacttcagaaccagcagctgctgggggagcgtggcgaggagcactccccccttgagcgggacagcttgatgccctctgatgaggccagcgagagctcccgccaagcctggacaggatcttcacagcgtagctcccgccacctggaggaggactatgcagatgcctaccaggacctgtaccagcctcaccgccaacacacctcggggctgcctagtgctaacgggcatgacccccaagaccggcttctagcccaggactcagagcacaaccacagtgaccggaactggcagcgcaaccggccttggcccaaggatagctactgacagcctcctgctgccctaccctggcaggcacaggcgcagctggctggggggcccactccaggcagggtggcgttagactggcatcaggctggcactaggctcagcccccaaaaccccctgcccagccccagcttcagggctgcctgtggtcccaaggttctgggagaaacaggggaccccctcacctcctgggcagtgacccctactaggctcccattccaggtactagctgtgtgttctgcacccctggcaccttcctctcctcccacacaggaagctgccccactgggcagtgccctca

SEQ ID NO: 4112 - DNA, 2395 bp, Homo sapiens
  source 1..2395: mol_type = unassigned DNA
tcccccgacccggactcccccatgtatgacgactcctacgtgcccgggtttgaggactcggaggcgggttcagccgactcctacaccagccgcccatctctggactcagacgtctccctggaggaggaccgggagagtgcccggcgtgaagtagagagccaggctcagcagcagctcgaaagggccaagaagtacagcaatgactggtggatcgggcggctagtgaaagagggcggggacatcgccttcatccccagcccccagcgcctggagagcatccggctcaaacaggagcagaaggccaggagatctgggaacccttccagcctgagtgacattggcaaccgacgctcccctccgccatctctagccaagcagaagcaaaagcaggcggaacatgttcccccatatgacgtggtgccctccatgcggcctgtggtgctggtgggaccctctctgaaaggttatgaggtcacagacatgatgcagaaggctctcttcgacttcctcaaacacagatttgatggcaggatctccatcacccgagtcacagccgacctctccctggcaaagcgatctgtgctcaacaatccgggcaagaggaccatcattgagcgctcctctgcccgctccagcattgcggaagtgcagagtgagatcgagcgcatatttgagctggccaaatccctgcagctagtagtgttggacgctgacaccatcaaccacccagcacagctggccaagacctcgctggcccccatcatcgtctttgtcaaagtgtcctcaccaaaggtactccagcgtctcattcgctcccgggggaagtcacagatgaagcacctgaccgtacagatgatggcatatgataagctggttcagtgcccaccggagtcatttgatgtgattctggatgagaaccagctggaggatgcctgtgagcacctggctgagtacctggaggtttactggcgggccacgcaccacccagcccctggccccggacttctgggtcctcccagtgccatccccggacttcagaaccagcagctgctgggggagcgtggcgaggagcactccccccttgagcgggacagcttgatgccctctgatgaggccagcgagagctcccgccaagcctggacaggatcttcacagcgtagctcccgccacctggaggaggactatgcagatgcctaccaggacctgtaccagcctcaccgccaacacacctcggggctgcctagtgctaacgggcatgacccccaagaccggcttctagcccaggactcagagcacaaccacagtgaccggaactggcagcgcaaccggccttggcccaaggatagctactgacagcctcctgctgccctaccctggcaggcacaggcgcagctggctggggggcccactccaggcagggtggcgttagactggcatcaggctggcactaggctcagcccccaaaaccccctgcccagccccagcttcagggctgcctgtggtcccaaggttctgggagaaacaggggaccccctcacctcctgggcagtgacccctactaggctcccattccaggtactagctgtgtgttctgcacccctggcaccttcctctcctcccacacaggaagctgccccactgggcagtgccctcaggccaggatccccttagcagggtccttcccaccagactcagggaagggatgccccattaaagtgacaaaagggtggggtgtgggcaccatggcatgaggaagaaacaaggtccctgagcaggcacaagtcctgacagtcaagggactgctttggcatccagggcctccagtcacctcactgccatacattagaaatgagacaatcaaagcccccccagggtggcacacccatctgtttgctggggtgtggcagccacatccaagactggagcagcaggctggccacgctcgggccagagagagctcacagctgaagctcttggagggaagggctctcctcaccctgccaggaagcttcttaacatgtgacaggaccagggaccaggagcatggtgaagccaagtggcagatgggagccaacctggatgggggtttggggaaggagggcatgtgtagcagagaacttaggggggcctccttgcctttctcattcttttgccctgcatcctgtcatttctgttcttgtccctcatacatctttggagaaccgggctccagactttgttccctgactcatagctgccgcttgttaggttagggttagatggggagagacagggcacagaggacctgtctccccggctactcttgccttatggctctagtgtgtgacctacagagcatgctccacaagcccctgcctcacctcactgtcatcactaataaacatcatgcacagtc

SEQ ID NO: 4113 - DNA, 1394 bp, Homo sapiens
  source 1..1394: mol_type = unassigned DNA
cggctctgaacgatgtcctcctcctcctacgccaagaacgggaccgcggacgggccgcactcccccacctcgcaggtggcccgaggcaccacaacccggaggagcaggttgaaaagatccgatggcagcaccacttcgaccagcttcatcctcagacagggttcagcggattcctacacaagcaggccgtctgactccgatgtctctttggaagaggaccgggaagcaattcgacaggagagagaacagcaagcagctatccagcttgagagagcaaagtccaaacctgtagcatttgccgtgaagacaaatgtgagctactgcggcgccctggacgaggatgtgcctgttccaagcacagctatctcctttgatgctaaagactttctacatattaaagagaaatataacaatgattggtggataggaaggctggtgaaagagggctgtgaaattggcttcattccaagtccactcagattggagaacatacggatccagcaagaacaaaaaagaggacgttttcacggagggaaatcaagtggaaattcttcttcaagtcttggagaaatggtatctgggacattccgagcaactcccacatcaacagcaaaacagaagcaaaaagtgacggagcacattcctccttacgatgttgtaccgtcaatgcgtccggtggtgttagtggggccgtcactgaaaggttacgaggtaacagacatgatgcagaaagccctctttgatttcctgaagcacaggtttgatgggaggatttcaataacgagagtgacagctgacatttctcttgctaagaggtctgtcctaaataatcccagcaagagagcaataattgaacgttcgaacacccggtccagcttagcggaagtacaaagtgaaattgaaagaatctttgagttggcaagatctttgcaactggttgttcttgatgcagacaccatcaatcacccagcacaacttataaagacttccttagcaccaattattgttcatgtaaaagtctcatctccaaaggttttacagcggttgattaaatctagaggaaagtcacaaagtaaacacttgaatgttcaactggtggcagctgataaacttgcacaatgccccccaagtcagcgaatgaggcacagcaaccactccacagagaactctccaattgaaagacgaagtctaatgacctctgatgaaaattatcacaatgaaagggctcggaagagtaggaaccgcttgtcttccagttctcagcatagccgagatcattaccctcttgtggaagaagattaccctgactcataccaggacacttacaaaccccataggaaccgaggatcacctgggggatatagccatgactcccgacataggctttgagtcta

SEQ ID NO: 4114 - DNA, 1886 bp, Homo sapiens
  source 1..1886: mol_type = unassigned DNA
ccgctccggagcccgcagcctcccccagcggatgccggggactcggaccccgcaccctgagagtctttgttaatggatgtggtggcccgaggcaccacaacccggaggagcaggttgaaaagatccgatggcagcaccacttcgaccagcttcatcctcagacagggttcagcggattcctacacaagcaggccgtctgactccgatgtctctttggaagaggaccgggaagcaattcgacaggagagagaacagcaagcagctatccagcttgagagagcaaagtccaaacctgtagcatttgccgtgaagacaaatgtgagctactgcggcgccctggacgaggatgtgcctgttccaagcacagctatctcctttgatgctaaagactttctacatattaaagagaaatataacaatgattggtggataggaaggctggtgaaagagggctgtgaaattggcttcattccaagtccactcagattggagaacatacggatccagcaagaacaaaaaagaggacgttttcacggagggaaatcaagtggaaattcttcttcaagtcttggagaaatggtatctgggacattccgagcaactcccacatcaacagcaaaacagaagcaaaaagtgacggagcacattcctccttacgatgttgtaccgtcaatgcgtccggtggtgttagtggggccgtcactgaaaggttacgaggtaacagacatgatgcagaaagccctctttgatttcctgaagcacaggtttgatgggaggatttcaataacgagagtgacagctgacatttctcttgctaagaggtctgtcctaaataatcccagcaagagagcaataattgaacgttcgaacacccggtccagcttagcggaagtacaaagtgaaattgaaagaatctttgagttggcaagatctttgcaactggttgttcttgatgcagacaccatcaatcacccagcacaacttataaagacttccttagcaccaattattgttcatgtaaaagtctcatctccaaaggttttacagcggttgattaaatctagaggaaagtcacaaagtaaacacttgaatgttcaactggtggcagctgataaacttgcacaatgccccccagaaatgtttgatgttatattggatgaaaatcagcttgaggatgcatgtgaacatctaggggagtacctggaggcgtactggcgtgccacccacacaaccagtagcacacccatgaccccgctgctgggaaggaatttgggctccacggcactctcaccatatcccacagcaatttctgggttacagagtcagcgaatgaggcacagcaaccactccacagagaactctccaattgaaagacgaagtctaatgacctctgatgaaaattatcacaatgaaagggctcggaagagtaggaaccgcttgtcttccagttctcagcatagccgagatcattaccctcttgtggaagaagattaccctgactcataccaggacacttacaaaccccataggaaccgaggatcacctgggggatatagccatgactcccgacataggctttgagtctaatgaaacaaaaaatattcatctgttgacaatttgccatagcagtgctaggataaaccaatcatcttaacttggctaacatagcacagtatttactgtgctaatgggctgctgtcattttatgctaagtaaggggcaaaaaaaaaaattacattatgcccttgagtctagatggatattagatgcccgatcatatagatatttttaagtgcaacatttacatgataacagtacattttgttttcttcatagatttagacacatcaatttgtaatttagggtacttacaaggcacatataaa

SEQ ID NO: 4115 - DNA, 5476 bp, Homo sapiens
  source 1..5476: mol_type = unassigned DNA
gcgcagcccgcagaggcgctgcggcccgtgcagccccggaggcccctcgcggagaaggcggcggcggaggagaggccgagttaccgcccgccgcccgcgcccccccaaccccgccgccgccgccgccgccgccactgccccccctccccgcggcgccgcatcttgaatggaaacatggcggtgccggctcggacctgcggcgcctctcggcccggcccagcgcggactgcgcgcccctggcccggctgcggcccccaccctggccccggcacccggcgcccgacgtccgggcccccgcgcccgctgtggctgctgctgccgcttctaccgctgctcgccgcccccggcgcctctgcctacagcttcccccagcagcacacgatgcagcactgggcccggcgtctggagcaggaggtcgacggcgtgatgcggatttttggaggcgtccagcagctccgtgagatttacaaggacaaccggaacctgttcgaggtacaggagaatgagcctcagaagttggtggagaaggtggcaggggacattgagagccttctggacaggaaggtgcaggccctgaagagactggctgatgctgcagagaacttccagaaagcacaccgctggcaggacaacatcaaggaggaagacatcgtgtactatgacgccaaggctgacgctgagctggacgaccctgagagtgaggatgtggaaagggggtctaaggccagcaccctaaggctggacttcatcgaggacccaaacttcaagaacaaggtcaactattcatacgcggctgtacagatccctacggacatctacaaaggctccactgtcatcctcaatgagctcaactggacagaggccctggagaatgtgttcatggaaaaccgcagacaagaccccacactgctgtggcaggtcttcggcagcgccacaggagtcactcgctactacccggccaccccgtggcgagcccccaagaagatcgacctgtacgatgtccgaaggagaccctggtatatccagggggcctcgtcacccaaagacatggtcatcatcgtggatgtgagtggcagtgtgagcggcctgaccctgaagctgatgaagacatctgtctgcgagatgctggacacgctgtctgatgatgactatgtgaatgtggcctcgttcaacgagaaggcacagcctgtgtcatgcttcacacacctggtgcaggccaatgtgcgcaacaagaaggtgttcaaggaagctgtgcagggcatggtggccaagggcaccacaggctacaaggccggctttgagtatgcctttgaccagctgcagaactccaacatcactcgggccaactgcaacaagatgatcatgatgttcacggatggtggtgaggaccgcgtgcaggacgtctttgagaagtacaattggccaaaccggacggtgcgcgtgtttactttctccgtggggcagcataactatgacgtcacaccgctgcagtggatggcctgtgccaacaaaggctactattttgagatcccttccatcggagccatccgcatcaacacacaggaatatctagatgtgttgggcaggcccatggtgctggcaggcaaggaggccaagcaggtgcagtggaccaacgtgtatgaggatgcactgggactggggttggtggtaacagggaccctccctgttttcaacctgacacaggatggccctggggaaaagaagaaccagctgatcctgggcgtgatgggcattgacgtggctctgaatgacatcaagaggctgacccccaactacacgcttggagccaacggctatgtgtttgccattgacctgaacggctacgtgttgctgcaccccaatctcaagccccagaccaccaacttccgggagcctgtgactctggacttcctggatgcggagctagaggatgagaacaaggaagagatccgtcggagcatgattgatggcaacaagggccacaagcagatcagaacgttggtcaagtccctggatgagaggtacatagatgaggtgacacggaactacacctgggtgcctataaggagcactaactacagcctggggctggtgctcccaccctacagcaccttctacctccaagccaatctcagtgaccagatcctgcaggtcaagtattttgagttcctgctccccagcagctttgagtctgaaggacacgttttcattgctcccagagagtactgcaaggacctgaatgcctcagacaacaacaccgagttcctgaaaaactttattgagctcatggagaaagtgactccagactccaagcagtgcaacaacttccttctgcacaacctgatcttggacacgggcatcacgcagcagctggtagagcgtgtgtggagggaccaggatctcaacacgtacagcctactggccgtgttcgctgccacagacggtggcatcacccgagtcttccccaacaaggcagctgaggactggacagagaaccctgagcccttcaatgccagcttctaccgccgcagcctggataaccacggttatgtcttcaagcccccacaccaggatgccctgttaaggccgctggagctggagaatgacactgtgggcatcctcgtcagcacagctgtggagctcagcctaggcaggcgcacactgaggccagcagtggtgggcgtcaagctggacctagaggcttgggctgagaagttcaaggtgctagccagcaaccgtacccaccaagaccagcctcagaagtgcggccccaacagccactgtgagatggactgcgaggttaacaatgaggacttactctgtgtcctcattgatgatggaggattcctggtgctgtcaaaccagaaccatcagtgggaccaggtgggcaggttcttcagtgaggtggatgccaacctgatgctggcactctacaataactccttctacacccgcaaggagtcctatgactatcaggcagcctgtgcccctcagccccctggcaacctgggtgctgcaccccggggtgtctttgtgcccaccgttgcagatttccttaacctggcctggtggacctctgctgccgcctggtccctgttccagcagcttctctacggcctcatctaccacagctggttccaagcagaccccgcggaggccgaggggagccccgagacgcgcgagagcagctgcgtcatgaaacagacccagtactacttcggctcggtaaacgcctcctacaacgccatcatcgactgcggaaactgctccaggctgttccacgcgcagagactgaccaacaccaatcttctctttgtggtggccgagaagccgctgtgcagccagtgcgaggctggccggctgctgcagaaggagacgcactgcccagcggacggcccggagcagtgtgagctagtgcagagaccgcgataccggagaggcccgcacatctgcttcgactacaacgcgacagaagatacctcagactgtggccgcggggcctccttcccgccgtcgctgggcgtcctggtctccctgcaactgctgctcctcctgggcctgccgccccggccgcagcctcaagtcctcgtccacgcctctcgccgcctctgagcaccctgccccaccccacctccactcccacctcacccggcctcttcgcctttcccaccctcctgccccacactccccgccttagagcctcgtccctccctcactgaaggacctgagctggccaggccctgagagtctggtctgcgccttgggatggggagtcccaaagcgggacgccgcaggtgtttggcacccaaatcacatctcacctccgaactgttcaagtgtccccagacccttcttgcctgctgggctccccccagtgggatgggacagggaggccacacgcactggtgccaaaaccaggcctctgctgccgcccttcctggaggctgcctatgttgggggggaccctgcctcagctgacccggcctctctgccccacccaagcccaaacttggtttctgtgagaatagtggaggaaggtgagatggccagtttgaagcctgtgcctcccagcttaaatcctagcaggagagaggctctggggcagcccccatgggctcctgcccctttcaggcctacagccacatccccaagcccaccaggtgtcaggatagtcacagtgataccagttcagacactaccccatatacacctggaacattgaggatggaaactggactcacattcgacataccccactgggcacacgcacaaacacacacactatggggtggggtgggtgtaggggcttacaaagccttacacagggcgaggggttggtgggagggttggcacctgcacactccatctcctgctcaccacctgcctctaatctgagctgcagcctggctggtcctcccatttctaaagctgaatgtcaaacagtgccaaatgctggggcagggggtgaagaaccctctgtcccacccctagccaccagtgtcctccaagtgccccctcacctctccaggtgctcattgtaaccatttctcactagtgtcaggcccccagtgggaccacatgccactgcctgcacctttcggcagaggaacccccaccagacatcaccctttgccttagcaggggtgactttgtctctcctggctgggccatccttccgccaatctggcccttacacactcaggcctgtgcccactccctatctccttcccacccctacacacacactccctgcttgcaggaggccaaactgtccctcccttgctgaacacacacacacacacacacacacaggtggggactgggcacagctcttcacaccattcattctggtcatttcccccaaaggcatcccagcctgggggccagtggggaactgagggcaaggggatatagtgatggggctcagatggactgggaggagggggagggtgatgcattaattaatggcttcgttaattaatgtcatgttgcttgtcgctttctcagtgtgtgtgtgtggtccatgcccactgctggtgccagggtgggtgtccatgtgcacccggcctggatgccagctgtgtccttcgggggcgtgcgtgtaactgtagtgtagtcaggtgctcaatggagaatataaacatatacagaaaaatatatattttaagtttaaaaaacagaaaaacagacaaaacaatccccatcaggtagctgtctaacccccagctgggtctaatccttctcattacccacccgacctggctgcccctcaccttgggctgggggactggggggccatttccttttctctgccctttttttgttgttctattttgtacagacaagttggaaaaacaacagcgacaaaaaagtcaagaaactttgtaaaatatcgtgtgtgtgattccttgtaaaatattttcaaatggtttattacagaagatcagttattaaataatgttcatattttcacttc

SEQ ID NO: 4116 - DNA, 5272 bp, Homo sapiens
  source 1..5272: mol_type = unassigned DNA
gcgaagcgagtggctgcagagggctgcatcctgccgtccccagccccccacaaccgtacagccgtgcccaggtttccgcttagggaaccaggaggtccaggccctttctgccagcagccgggcgtgcaagcccccgacagagagaaatcttaaagatagctagagccacgggggctgatgcagcactgggcccggcgtctggagcaggaggtcgacggcgtgatgcggatttttggaggcgtccagcagctccgtgagatttacaaggacaaccggaacctgttcgaggtacaggagaatgagcctcagaagttggtggagaaggtggcaggggacattgagagccttctggacaggaaggtgcaggccctgaagagactggctgatgctgcagagaacttccagaaagcacaccgctggcaggacaacatcaaggaggaagacatcgtgtactatgacgccaaggctgacgctgagctggacgaccctgagagtgaggatgtggaaagggggtctaaggccagcaccctaaggctggacttcatcgaggacccaaacttcaagaacaaggtcaactattcatacgcggctgtacagatccctacggacatctacaaaggctccactgtcatcctcaatgagctcaactggacagaggccctggagaatgtgttcatggaaaaccgcagacaagaccccacactgctgtggcaggtcttcggcagcgccacaggagtcactcgctactacccggccaccccgtggcgagcccccaagaagatcgacctgtacgatgtccgaaggagaccctggtatatccagggggcctcgtcacccaaagacatggtcatcatcgtggatgtgagtggcagtgtgagcggcctgaccctgaagctgatgaagacatctgtctgcgagatgctggacacgctgtctgatgatgactatgtgaatgtggcctcgttcaacgagaaggcacagcctgtgtcatgcttcacacacctggtgcaggccaatgtgcgcaacaagaaggtgttcaaggaagctgtgcagggcatggtggccaagggcaccacaggctacaaggccggctttgagtatgcctttgaccagctgcagaactccaacatcactcgggccaactgcaacaagatgatcatgatgttcacggatggtggtgaggaccgcgtgcaggacgtctttgagaagtacaattggccaaaccggacggtgcgcgtgtttactttctccgtggggcagcataactatgacgtcacaccgctgcagtggatggcctgtgccaacaaaggctactattttgagatcccttccatcggagccatccgcatcaacacacaggaatatctagatgtgttgggcaggcccatggtgctggcaggcaaggaggccaagcaggtgcagtggaccaacgtgtatgaggatgcactgggactggggttggtggtaacagggaccctccctgttttcaacctgacacaggatggccctggggaaaagaagaaccagctgatcctgggcgtgatgggcattgacgtggctctgaatgacatcaagaggctgacccccaactacacgcttggagccaacggctatgtgtttgccattgacctgaacggctacgtgttgctgcaccccaatctcaagccccagaccaccaacttccgggagcctgtgactctggacttcctggatgcggagctagaggatgagaacaaggaagagatccgtcggagcatgattgatggcaacaagggccacaagcagatcagaacgttggtcaagtccctggatgagaggtacatagatgaggtgacacggaactacacctgggtgcctataaggagcactaactacagcctggggctggtgctcccaccctacagcaccttctacctccaagccaatctcagtgaccagatcctgcaggtcaagtattttgagttcctgctccccagcagctttgagtctgaaggacacgttttcattgctcccagagagtactgcaaggacctgaatgcctcagacaacaacaccgagttcctgaaaaactttattgagctcatggagaaagtgactccagactccaagcagtgcaacaacttccttctgcacaacctgatcttggacacgggcatcacgcagcagctggtagagcgtgtgtggagggaccaggatctcaacacgtacagcctactggccgtgttcgctgccacagacggtggcatcacccgagtcttccccaacaaggcagctgaggactggacagagaaccctgagcccttcaatgccagcttctaccgccgcagcctggataaccacggttatgtcttcaagcccccacaccaggatgccctgttaaggccgctggagctggagaatgacactgtgggcatcctcgtcagcacagctgtggagctcagcctaggcaggcgcacactgaggccagcagtggtgggcgtcaagctggacctagaggcttgggctgagaagttcaaggtgctagccagcaaccgtacccaccaagaccagcctcagaagtgcggccccaacagccactgtgagatggactgcgaggttaacaatgaggacttactctgtgtcctcattgatgatggaggattcctggtgctgtcaaaccagaaccatcagtgggaccaggtgggcaggttcttcagtgaggtggatgccaacctgatgctggcactctacaataactccttctacacccgcaaggagtcctatgactatcaggcagcctgtgcccctcagccccctggcaacctgggtgctgcaccccggggtgtctttgtgcccaccgttgcagatttccttaacctggcctggtggacctctgctgccgcctggtccctgttccagcagcttctctacggcctcatctaccacagctggttccaagcagaccccgcggaggccgaggggagccccgagacgcgcgagagcagctgcgtcatgaaacagacccagtactacttcggctcggtaaacgcctcctacaacgccatcatcgactgcggaaactgctccaggctgttccacgcgcagagactgaccaacaccaatcttctctttgtggtggccgagaagccgctgtgcagccagtgcgaggctggccggctgctgcagaaggagacgcactgcccagcggacggcccggagcagtgtgagctagtgcagagaccgcgataccggagaggcccgcacatctgcttcgactacaacgcgacagaagatacctcagactgtggccgcggggcctccttcccgccgtcgctgggcgtcctggtctccctgcaactgctgctcctcctgggcctgccgccccggccgcagcctcaagtcctcgtccacgcctctcgccgcctctgagcaccctgccccaccccacctccactcccacctcacccggcctcttcgcctttcccaccctcctgccccacactccccgccttagagcctcgtccctccctcactgaaggacctgagctggccaggccctgagagtctggtctgcgccttgggatggggagtcccaaagcgggacgccgcaggtgtttggcacccaaatcacatctcacctccgaactgttcaagtgtccccagacccttcttgcctgctgggctccccccagtgggatgggacagggaggccacacgcactggtgccaaaaccaggcctctgctgccgcccttcctggaggctgcctatgttgggggggaccctgcctcagctgacccggcctctctgccccacccaagcccaaacttggtttctgtgagaatagtggaggaaggtgagatggccagtttgaagcctgtgcctcccagcttaaatcctagcaggagagaggctctggggcagcccccatgggctcctgcccctttcaggcctacagccacatccccaagcccaccaggtgtcaggatagtcacagtgataccagttcagacactaccccatatacacctggaacattgaggatggaaactggactcacattcgacataccccactgggcacacgcacaaacacacacactatggggtggggtgggtgtaggggcttacaaagccttacacagggcgaggggttggtgggagggttggcacctgcacactccatctcctgctcaccacctgcctctaatctgagctgcagcctggctggtcctcccatttctaaagctgaatgtcaaacagtgccaaatgctggggcagggggtgaagaaccctctgtcccacccctagccaccagtgtcctccaagtgccccctcacctctccaggtgctcattgtaaccatttctcactagtgtcaggcccccagtgggaccacatgccactgcctgcacctttcggcagaggaacccccaccagacatcaccctttgccttagcaggggtgactttgtctctcctggctgggccatccttccgccaatctggcccttacacactcaggcctgtgcccactccctatctccttcccacccctacacacacactccctgcttgcaggaggccaaactgtccctcccttgctgaacacacacacacacacacacacacaggtggggactgggcacagctcttcacaccattcattctggtcatttcccccaaaggcatcccagcctgggggccagtggggaactgagggcaaggggatatagtgatggggctcagatggactgggaggagggggagggtgatgcattaattaatggcttcgttaattaatgtcatgttgcttgtcgctttctcagtgtgtgtgtgtggtccatgcccactgctggtgccagggtgggtgtccatgtgcacccggcctggatgccagctgtgtccttcgggggcgtgcgtgtaactgtagtgtagtcaggtgctcaatggagaatataaacatatacagaaaaatatatattttaagtttaaaaaacagaaaaacagacaaaacaatccccatcaggtagctgtctaacccccagctgggtctaatccttctcattacccacccgacctggctgcccctcaccttgggctgggggactggggggccatttccttttctctgccctttttttgttgttctattttgtacagacaagttggaaaaacaacagcgacaaaaaagtcaagaaactttgtaaaatatcgtgtgtgtgattccttgtaaaatattttcaaatggtttattacagaagatcagttattaaataatgttcatattttcacttc

SEQ ID NO: 4117 - DNA, 5479 bp, Homo sapiens
  source 1..5479: mol_type = unassigned DNA
gcgcagcccgcagaggcgctgcggcccgtgcagccccggaggcccctcgcggagaaggcggcggcggaggagaggccgagttaccgcccgccgcccgcgcccccccaaccccgccgccgccgccgccgccgccactgccccccctccccgcggcgccgcatcttgaatggaaacatggcggtgccggctcggacctgcggcgcctctcggcccggcccagcgcggactgcgcgcccctggcccggctgcggcccccaccctggccccggcacccggcgcccgacgtccgggcccccgcgcccgctgtggctgctgctgccgcttctaccgctgctcgccgcccccggcgcctctgcctacagcttcccccagcagcacacgatgcagcactgggcccggcgtctggagcaggaggtcgacggcgtgatgcggatttttggaggcgtccagcagctccgtgagatttacaaggacaaccggaacctgttcgaggtacaggagaatgagcctcagaagttggtggagaaggtggcaggggacattgagagccttctggacaggaaggtgcaggccctgaagagactggctgatgctgcagagaacttccagaaagcacaccgctggcaggacaacatcaaggaggaagacatcgtgtactatgacgccaaggctgacgctgagctggacgaccctgagagtgaggatgtggaaagggggtctaaggccagcaccctaaggctggacttcatcgaggacccaaacttcaagaacaaggtcaactattcatacgcggctgtacagatccctacggacatctacaaaggctccactgtcatcctcaatgagctcaactggacagaggccctggagaatgtgttcatggaaaaccgcagacaagaccccacactgctgtggcaggtcttcggcagcgccacaggagtcactcgctactacccggccaccccgtggcgagcccccaagaagatcgacctgtacgatgtccgaaggagaccctggtatatccagggggcctcgtcacccaaagacatggtcatcatcgtggatgtgagtggcagtgtgagcggcctgaccctgaagctgatgaagacatctgtctgcgagatgctggacacgctgtctgatgatgactatgtgaatgtggcctcgttcaacgagaaggcacagcctgtgtcatgcttcacacacctggtgcaggccaatgtgcgcaacaagaaggtgttcaaggaagctgtgcagggcatggtggccaagggcaccacaggctacaaggccggctttgagtatgcctttgaccagctgcagaactccaacatcactcgggccaactgcaacaagatgatcatgatgttcacggatggtggtgaggaccgcgtgcaggacgtctttgagaagtacaattggccaaaccggacggtgcgcgtgtttactttctccgtggggcagcataactatgacgtcacaccgctgcagtggatggcctgtgccaacaaaggctactattttgagatcccttccatcggagccatccgcatcaacacacaggaatatctagatgtgttgggcaggcccatggtgctggcaggcaaggaggccaagcaggtgcagtggaccaacgtgtatgaggatgcactgggactggggttggtggtaacagggaccctccctgttttcaacctgacacaggatggccctggggaaaagaagaaccagctgatcctgggcgtgatgggcattgacgtggctctgaatgacatcaagaggctgacccccaactacacgcttggagccaacggctatgtgtttgccattgacctgaacggctacgtgttgctgcaccccaatctcaagccccagaccaccaacttccgggagcctgtgactctggacttcctggatgcggagctagaggatgagaacaaggaagagatccgtcggagcatgattgatggcaacaagggccacaagcagatcagaacgttggtcaagtccctggatgagaggtacatagatgaggtgacacggaactacacctgggtgcctataaggagcactaactacagcctggggctggtgctcccaccctacagcaccttctacctccaagccaatctcagtgaccagatcctgcaggtcaagtattttgagttcctgctccccagcagctttgagtctgaaggacacgttttcattgctcccagagagtactgcaaggacctgaatgcctcagacaacaacaccgagttcctgaaaaactttattgagctcatggagaaagtgactccagactccaagcagtgcaacaacttccttctgcacaacctgatcttggacacgggcatcacgcagcagctggtagagcgtgtgtggagggaccaggatctcaacacgtacagcctactggccgtgttcgctgccacagacggtggcatcacccgagtcttccccaacaaggcagctgaggactggacagagaaccctgagcccttcaatgccagcttctaccgccgcagcctggataaccacggttatgtcttcaagcccccacaccaggatgccctgttaaggccgctggagctggagaatgacactgtgggcatcctcgtcagcacagctgtggagctcagcctaggcaggcgcacactgaggccagcagtggtgggcgtcaagctggacctagaggcttgggctgagaagttcaaggtgctagccagcaaccgtacccaccaagaccagcctcagaagtgcggccccaacagccactgtgagatggactgcgaggttaacaatgaggacttactctgtgtcctcattgatgatggaggattcctggtgctgtcaaaccagaaccatcagtgggaccaggtgggcaggttcttcagtgaggtggatgccaacctgatgctggcactctacaataactccttctacacccgcaaggagtcctatgactatcaggcagcctgtgcccctcagccccctggcaacctgggtgctgcaccccggggtgtctttgtgcccaccgttgcagatttccttaacctggcctggtggacctctgctgccgcctggtccctgttccagcagcttctctacggcctcatctaccacagctggttccaagcagaccccgcggaggccgaggggagccccgagacgcgcgagagcagctgcgtcatgaaacagacccagtactacttcggctcggtaaacgcctcctacaacgccatcatcgactgcggaaactgctccaggctgttccacgcgcagagactgaccaacaccaatcttctctttgtggtggccgagaagccgctgtgcagccagtgcgaggctggccggctgctgcagaaggagacgcactgttgcccagcggacggcccggagcagtgtgagctagtgcagagaccgcgataccggagaggcccgcacatctgcttcgactacaacgcgacagaagatacctcagactgtggccgcggggcctccttcccgccgtcgctgggcgtcctggtctccctgcaactgctgctcctcctgggcctgccgccccggccgcagcctcaagtcctcgtccacgcctctcgccgcctctgagcaccctgccccaccccacctccactcccacctcacccggcctcttcgcctttcccaccctcctgccccacactccccgccttagagcctcgtccctccctcactgaaggacctgagctggccaggccctgagagtctggtctgcgccttgggatggggagtcccaaagcgggacgccgcaggtgtttggcacccaaatcacatctcacctccgaactgttcaagtgtccccagacccttcttgcctgctgggctccccccagtgggatgggacagggaggccacacgcactggtgccaaaaccaggcctctgctgccgcccttcctggaggctgcctatgttgggggggaccctgcctcagctgacccggcctctctgccccacccaagcccaaacttggtttctgtgagaatagtggaggaaggtgagatggccagtttgaagcctgtgcctcccagcttaaatcctagcaggagagaggctctggggcagcccccatgggctcctgcccctttcaggcctacagccacatccccaagcccaccaggtgtcaggatagtcacagtgataccagttcagacactaccccatatacacctggaacattgaggatggaaactggactcacattcgacataccccactgggcacacgcacaaacacacacactatggggtggggtgggtgtaggggcttacaaagccttacacagggcgaggggttggtgggagggttggcacctgcacactccatctcctgctcaccacctgcctctaatctgagctgcagcctggctggtcctcccatttctaaagctgaatgtcaaacagtgccaaatgctggggcagggggtgaagaaccctctgtcccacccctagccaccagtgtcctccaagtgccccctcacctctccaggtgctcattgtaaccatttctcactagtgtcaggcccccagtgggaccacatgccactgcctgcacctttcggcagaggaacccccaccagacatcaccctttgccttagcaggggtgactttgtctctcctggctgggccatccttccgccaatctggcccttacacactcaggcctgtgcccactccctatctccttcccacccctacacacacactccctgcttgcaggaggccaaactgtccctcccttgctgaacacacacacacacacacacacacaggtggggactgggcacagctcttcacaccattcattctggtcatttcccccaaaggcatcccagcctgggggccagtggggaactgagggcaaggggatatagtgatggggctcagatggactgggaggagggggagggtgatgcattaattaatggcttcgttaattaatgtcatgttgcttgtcgctttctcagtgtgtgtgtgtggtccatgcccactgctggtgccagggtgggtgtccatgtgcacccggcctggatgccagctgtgtccttcgggggcgtgcgtgtaactgtagtgtagtcaggtgctcaatggagaatataaacatatacagaaaaatatatattttaagtttaaaaaacagaaaaacagacaaaacaatccccatcaggtagctgtctaacccccagctgggtctaatccttctcattacccacccgacctggctgcccctcaccttgggctgggggactggggggccatttccttttctctgccctttttttgttgttctattttgtacagacaagttggaaaaacaacagcgacaaaaaagtcaagaaactttgtaaaatatcgtgtgtgtgattccttgtaaaatattttcaaatggtttattacagaagatcagttattaaataatgttcatattttcacttc

SEQ ID NO: 4118 - DNA, 5206 bp, Homo sapiens
  source 1..5206: mol_type = unassigned DNA
atggcggtgccggctcggacctgcggcgcctctcggcccggcccagcgcggactgcgcgcccctggcccggctgcggcccccaccctggccccggcacccggcgcccgacgtccgggcccccgcgcccgctgtggctgctgctgccgcttctaccgctgctcgccgcccccggcgcctctgcctacagcttcccccagcagcacacgatgcagcactgggcccggcgtctggagcaggaggtcgacggcgtgatgcggatttttggaggcgtccagcagctccgtgagatttacaaggacaaccggaacctgttcgaggtacaggagaatgagcctcagaagttggtggagaaggtggcaggggacattgagagccttctggacaggaaggtgcaggccctgaagagactggctgatgctgcagagaacttccagaaagcacaccgctggcaggacaacatcaaggaggaagacatcgtgtactatgacgccaaggctgacgctgagctggacgaccctgagagtgaggatgtggaaagggggtctaaggccagcaccctaaggctggacttcatcgaggacccaaacttcaagaacaaggtcaactattcatacgcggctgtacagatccctacggacatctacaaaggctccactgtcatcctcaatgagctcaactggacagaggccctggagaatgtgttcatggaaaaccgcagacaagaccccacactgctgtggcaggtcttcggcagcgccacaggagtcactcgctactacccggccaccccgtggcgagcccccaagaagatcgacctgtacgatgtccgaaggagaccctggtatatccagggggcctcgtcacccaaagacatggtcatcatcgtggatgtgagtggcagtgtgagcggcctgaccctgaagctgatgaagacatctgtctgcgagatgctggacacgctgtctgatgatgactatgtgaatgtggcctcgttcaacgagaaggcacagcctgtgtcatgcttcacacacctggtgcaggccaatgtgcgcaacaagaaggtgttcaaggaagctgtgcagggcatggtggccaagggcaccacaggctacaaggccggctttgagtatgcctttgaccagctgcagaactccaacatcactcgggccaactgcaacaagatgatcatgatgttcacggatggtggtgaggaccgcgtgcaggacgtctttgagaagtacaattggccaaaccggacggtgcgcgtgtttactttctccgtggggcagcataactatgacgtcacaccgctgcagtggatggcctgtgccaacaaaggctactattttgagatcccttccatcggagccatccgcatcaacacacaggaatatctagatgtgttgggcaggcccatggtgctggcaggcaaggaggccaagcaggtgcagtggaccaacgtgtatgaggatgcactgggactggggttggtggtaacagggaccctccctgttttcaacctgacacaggatggccctggggaaaagaagaaccagctgatcctgggcgtgatgggcattgacgtggctctgaatgacatcaagaggctgacccccaactacacgcttggagccaacggctatgtgtttgccattgacctgaacggctacgtgttgctgcaccccaatctcaagccccagaccaccaacttccgggagcctgtgactctggacttcctggatgcggagctagaggatgagaacaaggaagagatccgtcggagcatgattgatggcaacaagggccacaagcagatcagaacgttggtcaagtccctggatgagaggtacatagatgaggtgacacggaactacacctgggtgcctataaggagcactaactacagcctggggctggtgctcccaccctacagcaccttctacctccaagccaatctcagtgaccagatcctgcaggtcaagtattttgagttcctgctccccagcagctttgagtctgaaggacacgttttcattgctcccagagagtactgcaaggacctgaatgcctcagacaacaacaccgagttcctgaaaaactttattgagctcatggagaaagtgactccagactccaagcagtgcaacaacttccttctgcacaacctgatcttggacacgggcatcacgcagcagctggtagagcgtgtgtggagggaccaggatctcaacacgtacagcctactggccgtgttcgctgccacagacggtggcatcacccgagtcttccccaacaaggcagctgaggactggacagagaaccctgagcccttcaatgccagcttctaccgccgcagcctggataaccacggttatgtcttcaagcccccacaccaggatgccctgttaaggccgctggagctggagaatgacactgtgggcatcctcgtcagcacagctgtggagctcagcctaggcaggcgcacactgaggccagcagtggtgggcgtcaagctggacctagaggcttgggctgagaagttcaaggtgctagccagcaaccgtacccaccaagaccagcctcagaagtgcggccccaacagccactgtgagatggactgcgaggttaacaatgaggacttactctgtgtcctcattgatgatggaggattcctggtgctgtcaaaccagaaccatcagtgggaccaggtgggcaggttcttcagtgaggtggatgccaacctgatgctggcactctacaataactccttctacacccgcaaggagtcctatgactatcaggcagcctgtgcccctcagccccctggcaacctgggtgctgcaccccggggtgtctttgtgcccaccgttgcagatttccttaacctggcctggtggacctctgctgccgcctggtccctgttccagcagcttctctacggcctcatctaccacagctggttccaagcagaccccgcggaggccgaggggagccccgagacgcgcgagagcagctgcgtcatgaaacagacccagtactacttcggctcggtaaacgcctcctacaacgccatcatcgactgcggaaactgctccaggctgttccacgcgcagagactgaccaacaccaatcttctctttgtggtggccgagaagccgctgtgcagccagtgcgaggctggccggctgctgcagaaggagacgcactcggacggcccggagcagtgtgagctagtgcagagaccgcgataccggagaggcccgcacatctgcttcgactacaacgcgacagaagatacctcagactgtggccgcggggcctccttcccgccgtcgctgggcgtcctggtctccctgcaactgctgctcctcctgggcctgccgccccggccgcagcctcaagtcctcgtccacgcctctcgccgcctctgagcaccctgccccaccccacctccactcccacctcacccggcctcttcgcctttcccaccctcctgccccacactccccgccttagagcctcgtccctccctcactgaaggacctgagctggccaggccctgagagtctggtctgcgccttgggatggggagtcccaaagcgggacgccgcaggtgtttggcacccaaatcacatctcacctccgaactgttcaagtgtccccagacccttcttgcctgctgggctccccccagtgggatgggacagggaggccacacgcactggtgccaaaaccaggcctctgctgccgcccttcctggaggctgcctatgttgggggggaccctgcctcagctgacccggcctctctgccccacccaagcccaaacttggtttctgtgagaatagtggaggaaggtgagatggccagtttgaagcctgtgcctcccagcttaaatcctagcaggagagaggctctggggcagcccccatgggctcctgcccctttcaggcctacagccacatccccaagcccaccaggtgtcaggatagtcacagtgataccagttcagacactaccccatatacacctggaacattgaggatggaaactggactcacattcgacataccccactgggcacacgcacaaacacacacactatggggtggggtgggtgtaggggcttacaaagccttacacagggcgaggggttggtgggagggttggcacctgcacactccatctcctgctcaccacctgcctctaatctgagctgcagcctggctggtcctcccatttctaaagctgaatgtcaaacagtgccaaatgctggggcagggggtgaagaaccctctgtcccacccctagccaccagtgtcctccaagtgccccctcacctctccaggtgctcattgtaaccatttctcactagtgtcaggcccccagtgggaccacatgccactgcctgcacctttcggcagaggaacccccaccagacatcaccctttgccttagcaggggtgactttgtctctcctggctgggccatccttccgccaatctggcccttacacactcaggcctgtgcccactccctatctccttcccacccctacacacacactccctgcttgcaggaggccaaactgtccctcccttgctgaacacacacacacacacacacacacaggtggggactgggcacagctcttcacaccattcattctggtcatttcccccaaaggcatcccagcctgggggccagtggggaactgagggcaaggggatatagtgatggggctcagatggactgggaggagggggagggtgatgcattaattaatggcttcgttaattaatgtcatgttgcttgtcgctttctcagtgtgtgtgtgtggtccatgcccactgctggtgccagggtgggtgtccatgtgcacccggcctggatgccagctgtgtccttcgggggcgtgcgtgtaactgtagtgtagtcaggtgctcaatggagaatataaacatatacagaaaaatatatattttaagtttaaaaaacagaaaaacagacaaaacaatccccatcaggtagctgtctaacccccagctgggtctaatccttctcattacccacccgacctggctgcccctcaccttgggctgggggactggggggccatttccttttctctgccctttttttgttgttctattttgtacagacaagttggaaaaacaacagcgacaaaaaagtcaagaaactttgt

SEQ ID NO: 4119 - DNA, 5500 bp, Homo sapiens
  source 1..5500: mol_type = unassigned DNA
gcgcagcccgcagaggcgctgcggcccgtgcagccccggaggcccctcgcggagaaggcggcggcggaggagaggccgagttaccgcccgccgcccgcgcccccccaaccccgccgccgccgccgccgccgccactgccccccctccccgcggcgccgcatcttgaatggaaacatggcggtgccggctcggacctgcggcgcctctcggcccggcccagcgcggactgcgcgcccctggcccggctgcggcccccaccctggccccggcacccggcgcccgacgtccgggcccccgcgcccgctgtggctgctgctgccgcttctaccgctgctcgccgcccccggcgcctctgcctacagcttcccccagcagcacacgatgcagcactgggcccggcgtctggagcaggaggtcgacggcgtgatgcggatttttggaggcgtccagcagctccgtgagatttacaaggacaaccggaacctgttcgaggtacaggagaatgagcctcagaagttggtggagaaggtggcaggggacattgagagccttctggacaggaaggtgcaggccctgaagagactggctgatgctgcagagaacttccagaaagcacaccgctggcaggacaacatcaaggaggaagacatcgtgtactatgacgccaaggctgacgctgagctggacgaccctgagagtgaggatgtggaaagggggtctaaggccagcaccctaaggctggacttcatcgaggacccaaacttcaagaacaaggtcaactattcatacgcggctgtacagatccctacggacatctacaaaggctccactgtcatcctcaatgagctcaactggacagaggccctggagaatgtgttcatggaaaaccgcagacaagaccccacactgctgtggcaggtcttcggcagcgccacaggagtcactcgctactacccggccaccccgtggcgagcccccaagaagatcgacctgtacgatgtccgaaggagaccctggtatatccagggggcctcgtcacccaaagacatggtcatcatcgtggatgtgagtggcagtgtgagcggcctgaccctgaagctgatgaagacatctgtctgcgagatgctggacacgctgtctgatgatgactatgtgaatgtggcctcgttcaacgagaaggcacagcctgtgtcatgcttcacacacctggtgcaggccaatgtgcgcaacaagaaggtgttcaaggaagctgtgcagggcatggtggccaagggcaccacaggctacaaggccggctttgagtatgcctttgaccagctgcagaactccaacatcactcgggccaactgcaacaagatgatcatgatgttcacggatggtggtgaggaccgcgtgcaggacgtctttgagaagtacaattggccaaaccggacggtgcgcgtgtttactttctccgtggggcagcataactatgacgtcacaccgctgcagtggatggcctgtgccaacaaaggctactattttgagatcccttccatcggagccatccgcatcaacacacaggaatatctagatgtgttgggcaggcccatggtgctggcaggcaaggaggccaagcaggtgcagtggaccaacgtgtatgaggatgcactgggactggggttggtggtaacagggaccctccctgttttcaacctgacacaggatggccctggggaaaagaagaaccagctgatcctgggcgtgatgggcattgacgtggctctgaatgacatcaagaggctgacccccaactacacgcttggagccaacggctatgtgtttgccattgacctgaacggctacgtgttgctgcaccccaatctcaagccccagaccaccaacttccgggagcctgtgactctggacttcctggatgcggagctagaggatgagaacaaggaagagatccgtcggagcatgattgatggcaacaagggccacaagcagatcagaacgttggtcaagtccctggatgagaggtacatagatgaggtgacacggaactacacctgggtgcctataaggagcactaactacagcctggggctggtgctcccaccctacagcaccttctacctccaagccaatctcagtgaccagatcctgcaggtcaagttgccaatcagcaaactgaaggattttgagttcctgctccccagcagctttgagtctgaaggacacgttttcattgctcccagagagtactgcaaggacctgaatgcctcagacaacaacaccgagttcctgaaaaactttattgagctcatggagaaagtgactccagactccaagcagtgcaacaacttccttctgcacaacctgatcttggacacgggcatcacgcagcagctggtagagcgtgtgtggagggaccaggatctcaacacgtacagcctactggccgtgttcgctgccacagacggtggcatcacccgagtcttccccaacaaggcagctgaggactggacagagaaccctgagcccttcaatgccagcttctaccgccgcagcctggataaccacggttatgtcttcaagcccccacaccaggatgccctgttaaggccgctggagctggagaatgacactgtgggcatcctcgtcagcacagctgtggagctcagcctaggcaggcgcacactgaggccagcagtggtgggcgtcaagctggacctagaggcttgggctgagaagttcaaggtgctagccagcaaccgtacccaccaagaccagcctcagaagtgcggccccaacagccactgtgagatggactgcgaggttaacaatgaggacttactctgtgtcctcattgatgatggaggattcctggtgctgtcaaaccagaaccatcagtgggaccaggtgggcaggttcttcagtgaggtggatgccaacctgatgctggcactctacaataactccttctacacccgcaaggagtcctatgactatcaggcagcctgtgcccctcagccccctggcaacctgggtgctgcaccccggggtgtctttgtgcccaccgttgcagatttccttaacctggcctggtggacctctgctgccgcctggtccctgttccagcagcttctctacggcctcatctaccacagctggttccaagcagaccccgcggaggccgaggggagccccgagacgcgcgagagcagctgcgtcatgaaacagacccagtactacttcggctcggtaaacgcctcctacaacgccatcatcgactgcggaaactgctccaggctgttccacgcgcagagactgaccaacaccaatcttctctttgtggtggccgagaagccgctgtgcagccagtgcgaggctggccggctgctgcagaaggagacgcactgttgcccagcggacggcccggagcagtgtgagctagtgcagagaccgcgataccggagaggcccgcacatctgcttcgactacaacgcgacagaagatacctcagactgtggccgcggggcctccttcccgccgtcgctgggcgtcctggtctccctgcaactgctgctcctcctgggcctgccgccccggccgcagcctcaagtcctcgtccacgcctctcgccgcctctgagcaccctgccccaccccacctccactcccacctcacccggcctcttcgcctttcccaccctcctgccccacactccccgccttagagcctcgtccctccctcactgaaggacctgagctggccaggccctgagagtctggtctgcgccttgggatggggagtcccaaagcgggacgccgcaggtgtttggcacccaaatcacatctcacctccgaactgttcaagtgtccccagacccttcttgcctgctgggctccccccagtgggatgggacagggaggccacacgcactggtgccaaaaccaggcctctgctgccgcccttcctggaggctgcctatgttgggggggaccctgcctcagctgacccggcctctctgccccacccaagcccaaacttggtttctgtgagaatagtggaggaaggtgagatggccagtttgaagcctgtgcctcccagcttaaatcctagcaggagagaggctctggggcagcccccatgggctcctgcccctttcaggcctacagccacatccccaagcccaccaggtgtcaggatagtcacagtgataccagttcagacactaccccatatacacctggaacattgaggatggaaactggactcacattcgacataccccactgggcacacgcacaaacacacacactatggggtggggtgggtgtaggggcttacaaagccttacacagggcgaggggttggtgggagggttggcacctgcacactccatctcctgctcaccacctgcctctaatctgagctgcagcctggctggtcctcccatttctaaagctgaatgtcaaacagtgccaaatgctggggcagggggtgaagaaccctctgtcccacccctagccaccagtgtcctccaagtgccccctcacctctccaggtgctcattgtaaccatttctcactagtgtcaggcccccagtgggaccacatgccactgcctgcacctttcggcagaggaacccccaccagacatcaccctttgccttagcaggggtgactttgtctctcctggctgggccatccttccgccaatctggcccttacacactcaggcctgtgcccactccctatctccttcccacccctacacacacactccctgcttgcaggaggccaaactgtccctcccttgctgaacacacacacacacacacacacacaggtggggactgggcacagctcttcacaccattcattctggtcatttcccccaaaggcatcccagcctgggggccagtggggaactgagggcaaggggatatagtgatggggctcagatggactgggaggagggggagggtgatgcattaattaatggcttcgttaattaatgtcatgttgcttgtcgctttctcagtgtgtgtgtgtggtccatgcccactgctggtgccagggtgggtgtccatgtgcacccggcctggatgccagctgtgtccttcgggggcgtgcgtgtaactgtagtgtagtcaggtgctcaatggagaatataaacatatacagaaaaatatatattttaagtttaaaaaacagaaaaacagacaaaacaatccccatcaggtagctgtctaacccccagctgggtctaatccttctcattacccacccgacctggctgcccctcaccttgggctgggggactggggggccatttccttttctctgccctttttttgttgttctattttgtacagacaagttggaaaaacaacagcgacaaaaaagtcaagaaactttgtaaaatatcgtgtgtgtgattccttgtaaaatattttcaaatggtttattacagaagatcagttattaaataatgttcatattttcacttc

SEQ ID NO: 4120 - DNA, 3453 bp, Homo sapiens
  source 1..3453: mol_type = unassigned DNA
atggcggtgccggctcggacctgcggcgcctctcggcccggcccagcgcggactgcgcgcccctggcccggctgcggcccccaccctggccccggcacccggcgcccgacgtccgggcccccgcgcccgctgtggctgctgctgccgcttctaccgctgctcgccgcccccggcgcctctgcctacagcttcccccagcagcacacgatgcagcactgggcccggcgtctggagcaggaggtcgacggcgtgatgcggatttttggaggcgtccagcagctccgtgagatttacaaggacaaccggaacctgttcgaggtacaggagaatgagcctcagaagttggtggagaaggtggcaggggacattgagagccttctggacaggaaggtgcaggccctgaagagactggctgatgctgcagagaacttccagaaagcacaccgctggcaggacaacatcaaggaggaagacatcgtgtactatgacgccaaggctgacgctgagctggacgaccctgagagtgaggatgtggaaagggggtctaaggccagcaccctaaggctggacttcatcgaggacccaaacttcaagaacaaggtcaactattcatacgcggctgtacagatccctacggacatctacaaaggctccactgtcatcctcaatgagctcaactggacagaggccctggagaatgtgttcatggaaaaccgcagacaagaccccacactgctgtggcaggtcttcggcagcgccacaggagtcactcgctactacccggccaccccgtggcgagcccccaagaagatcgacctgtacgatgtccgaaggagaccctggtatatccagggggcctcgtcacccaaagacatggtcatcatcgtggatgtgagtggcagtgtgagcggcctgaccctgaagctgatgaagacatctgtctgcgagatgctggacacgctgtctgatgatgactatgtgaatgtggcctcgttcaacgagaaggcacagcctgtgtcatgcttcacacacctggtgcaggccaatgtgcgcaacaagaaggtgttcaaggaagctgtgcagggcatggtggccaagggcaccacaggctacaaggccggctttgagtatgcctttgaccagctgcagaactccaacatcactcgggccaactgcaacaagatgatcatgatgttcacggatggtggtgaggaccgcgtgcaggacgtctttgagaagtacaattggccaaaccggacggtgcgcgtgtttactttctccgtggggcagcataactatgacgtcacaccgctgcagtggatggcctgtgccaacaaaggctactattttgagatcccttccatcggagccatccgcatcaacacacaggaatatctagatgtgttgggcaggcccatggtgctggcaggcaaggaggccaagcaggtgcagtggaccaacgtgtatgaggatgcactgggactggggttggtggtaacagggaccctccctgttttcaacctgacacaggatggccctggggaaaagaagaaccagctgatcctgggcgtgatgggcattgacgtggctctgaatgacatcaagaggctgacccccaactacacgcttggagccaacggctatgtgtttgccattgacctgaacggctacgtgttgctgcaccccaatctcaagccccagaccaccaacttccgggagcctgtgactctggacttcctggatgcggagctagaggatgagaacaaggaagagatccgtcggagcatgattgatggcaacaagggccacaagcagatcagaacgttggtcaagtccctggatgagaggtacatagatgaggtgacacggaactacacctgggtgcctataaggagcactaactacagcctggggctggtgctcccaccctacagcaccttctacctccaagccaatctcagtgaccagatcctgcaggtcaagttgccaatcagcaaactgaaggattttgagttcctgctccccagcagctttgagtctgaaggacacgttttcattgctcccagagagtactgcaaggacctgaatgcctcagacaacaacaccgagttcctgaaaaactttattgagctcatggagaaagtgactccagactccaagcagtgcaacaacttccttctgcacaacctgatcttggacacgggcatcacgcagcagctggtagagcgtgtgtggagggaccaggatctcaacacgtacagcctactggccgtgttcgctgccacagacggtggcatcacccgagtcttccccaacaaggcagctgaggactggacagagaaccctgagcccttcaatgccagcttctaccgccgcagcctggataaccacggttatgtcttcaagcccccacaccaggatgccctgttaaggccgctggagctggagaatgacactgtgggcatcctcgtcagcacagctgtggagctcagcctaggcaggcgcacactgaggccagcagtggtgggcgtcaagctggacctagaggcttgggctgagaagttcaaggtgctagccagcaaccgtacccaccaagaccagcctcagaagtgcggccccaacagccactgtgagatggactgcgaggttaacaatgaggacttactctgtgtcctcattgatgatggaggattcctggtgctgtcaaaccagaaccatcagtgggaccaggtgggcaggttcttcagtgaggtggatgccaacctgatgctggcactctacaataactccttctacacccgcaaggagtcctatgactatcaggcagcctgtgcccctcagccccctggcaacctgggtgctgcaccccggggtgtctttgtgcccaccgttgcagatttccttaacctggcctggtggacctctgctgccgcctggtccctgttccagcagcttctctacggcctcatctaccacagctggttccaagcagaccccgcggaggccgaggggagccccgagacgcgcgagagcagctgcgtcatgaaacagacccagtactacttcggctcggtaaacgcctcctacaacgccatcatcgactgcggaaactgctccaggctgttccacgcgcagagactgaccaacaccaatcttctctttgtggtggccgagaagccgctgtgcagccagtgcgaggctggccggctgctgcagaaggagacgcactcggacggcccggagcagtgtgagctagtgcagagaccgcgataccggagaggcccgcacatctgcttcgactacaacgcgacagaagatacctcagactgtggccgcggggcctccttcccgccgtcgctgggcgtcctggtctccctgcaactgctgctcctcctgggcctgccgccccggccgcagcctcaagtcctcgtccacgcctctcgccgcctctga

SEQ ID NO: 4121 - DNA, 3671 bp, Homo sapiens
  source 1..3671: mol_type = unassigned DNA
cggccgctctcgtcgccgccgcagcgggcgcgtcggagggagcccagcatggccgggccgggctcgccgcgccgcgcgtcccggggggcctcggcgcttctcgctgccgcgcttctctacgccgcgctgggggacgtggtgcgctcggagcagcagataccgctctccgtggtgaagctctgggcctcggcttttggtggggagataaaatccattgctgctaagtactccggttcccagcttctgcaaaagaaatacaaagagtatgagaaagacgttgccatagaagaaattgatggcctccaactggtaaagaagctggcaaagaacatggaagagatgtttcacaagaagtctgaggccgtcaggcgtctggtggaggctgcagaagaagcacacctgaaacatgaatttgatgcagacttacagtatgaatacttcaatgctgtgctgataaatgaaagggacaaagacgggaattttttggagctgggaaaggaattcatcttagccccaaatgaccattttaataatttgcctgtgaacatcagtctaagtgacgtccaagtaccaacgaacatgtacaacaaagaccctgcaattgtcaatggggtttattggtctgaatctctaaacaaagtttttgtagataactttgaccgtgacccatctctcatatggcagtactttggaagtgcaaagggcttttttaggcagtatccggggattaaatgggaaccagatgagaatggagtcattgccttcgactgcaggaaccgaaaatggtacatccaggcagcaacttctccgaaagacgtggtcattttagttgacgtcagtggcagcatgaaaggactccgtctgactatcgcgaagcaaacagtctcatccattttggatacacttggggatgatgacttcttcaacataattgcttataatgaggagcttcactatgtggaaccttgcctgaatggaactttggtgcaagccgacaggacaaacaaagagcacttcagggagcatctggacaaacttttcgccaaaggaattggaatgttggatatagctctgaatgaggccttcaacattctgagtgatttcaaccacacgggacaaggaagtatctgcagtcaggccatcatgctcataactgatggggcggtggacacctatgatacaatctttgcaaaatacaattggccagatcgaaaggttcgcatcttcacatacctcattggacgagaggctgcgtttgcagacaatctaaagtggatggcctgtgccaacaaaggattttttacccagatctccaccttggctgatgtgcaggagaatgtcatggaataccttcacgtgcttagccggcccaaagtcatcgaccaggagcatgatgtggtgtggaccgaagcttacattgacagcactctccctcaggcacaaaagctgactgatgatcagggccccgtcctgatgaccactgtagccatgcctgtgtttagtaagcagaacgaaaccagatcgaagggcattcttctgggagtggttggcacagatgtcccagtgaaagaacttctgaagaccatccccaaatacaagttagggattcacggttatgcctttgcaatcacaaataatggatatatcctgacgcatccggaactcaggctgctgtacgaagaaggaaaaaagcgaaggaaacctaactatagtagcgttgacctctctgaggtggagtgggaagaccgagatgacgtgttgagaaatgctatggtgaatcgaaagacggggaagttttccatggaggtgaagaagacagtggacaaagggaaacgggttttggtgatgacaaatgactactattatacagacatcaagggtactcctttcagtttaggtgtggcgctttccagaggtcatgggaaatatttcttccgagggaatgtaaccatcgaagaaggcctgcatgacttagaacatcccgatgtgtccttggcagatgaatggtcctactgcaacactgacctacaccctgagcaccgccatctgtctcagttagaagcgattaagctctacctaaaaggcaaagaacctctgctccagtgtgataaagaattgatccaagaagtcctttttgacgcggtggtgagtgcccccattgaagcgtattggaccagcctggccctcaacaaatctgaaaattctgacaagggcgtggaggttgccttcctcggcactcgcacgggcctctccagaatcaacctgtttgtcggggctgagcagctcaccaatcaggacttcctgaaagctggcgacaaggagaacatttttaacgcagaccatttccctctctggtaccgaagagccgctgagcagattccagggagcttcgtctactcgatcccattcagcactggaccagtcaataaaagcaatgtggtgacagcaagtacatccatccagctcctggatgaacggaaatctcctgtggtggcagctgtaggcattcagatgaaacttgaatttttccaaaggaagttctggactgccagcagacagtgtgcttccctggatggcaaatgctccatcagctgtgatgatgagactgtgaattgttacctcatagacaataatggatttattttggtgtctgaagactacacacagactggagacttttttggtgagatcgagggagctgtgatgaacaaattgctaacaatgggctcctttaaaagaattaccctttatgactaccaagccatgtgtagagccaacaaggaaagcagcgatggcgcccatggcctcctggatccttataatgccttcctctctgcagtaaaatggatcatgacagaacttgtcttgttcctggtggaatttaacctctgcagttggtggcactccgatatgacagctaaagcccagaaattgaaacagaccctggagccttgtgatactgaatatccagcattcgtctctgagcgcaccatcaaggagactacagggaatattgcttgtgaagactgctccaagtcctttgtcatccagcaaatcccaagcagcaacctgttcatggtggtggtggacagcagctgcctctgtgaatctgtggcccccatcaccatggcacccattgaaatcaggtataatgaatcccttaagtgtgaacgtctaaaggcccagaagatcagaaggcgcccagaatcttgtcatggcttccatcctgaggagaatgcaagggagtgtgggggtgcgccgagtctccaagcccagacagtcctccttctgctccctctgcttttgatgctcttctcaaggtgacactgactgagatgttctcttactgactgagatgttctcttggcatgctaaatcatggataaactgtgaaccaaaatatggtgcaacatacgagacatgaatatagtccaaccatcagcatctcatcatgattttaaactgtgcgtgatataaactcttaaagatatgttgacaaaaagttatctatcatctttttactttgccagtcatgcaaatgtgagtttgccacatgataatcacccttcatcagaaatgggaccgcaagtggtaggcagtgtcccttctgcttgaaacctattgaaaccaatttaaaactgtgtactttttaaataaagtatattaaaatc

SEQ ID NO: 4122 - DNA, 3264 bp, Homo sapiens
  source 1..3264: mol_type = unassigned DNA
atgggggagttaaggcaagagagaagcacagccttacagcgtctggtggaggctgcagaagaagcacacctgaaacatgaatttgatgcagacttacagtatgaatacttcaatgctgtgctgataaatgaaagggacaaagacgggaattttttggagctgggaaaggaattcatcttagccccaaatgaccattttaataatttgcctgtgaacatcagtctaagtgacgtccaagtaccaacgaacatgtacaacaaagaccctgcaattgtcaatggggtttattggtctgaatctctaaacaaagtttttgtagataactttgaccgtgacccatctctcatatggcagtactttggaagtgcaaagggcttttttaggcagtatccggggattaaatgggaaccagatgagaatggagtcattgccttcgactgcaggaaccgaaaatggtacatccaggcagcaacttctccgaaagacgtggtcattttagttgacgtcagtggcagcatgaaaggactccgtctgactatcgcgaagcaaacagtctcatccattttggatacacttggggatgatgacttcttcaacataattgcttataatgaggagcttcactatgtggaaccttgcctgaatggaactttggtgcaagccgacaggacaaacaaagagcacttcagggagcatctggacaaacttttcgccaaaggaattggaatgttggatatagctctgaatgaggccttcaacattctgagtgatttcaaccacacgggacaaggaagtatctgcagtcaggccatcatgctcataactgatggggcggtggacacctatgatacaatctttgcaaaatacaattggccagatcgaaaggttcgcatcttcacatacctcattggacgagaggctgcgtttgcagacaatctaaagtggatggcctgtgccaacaaaggattttttacccagatctccaccttggctgatgtgcaggagaatgtcatggaataccttcacgtgcttagccggcccaaagtcatcgaccaggagcatgatgtggtgtggaccgaagcttacattgacagcactgtgagtcaggccgagcaactgactgatgatcagggccccgtcctgatgaccactgtagccatgcctgtgtttagtaagcagaacgaaaccagatcgaagggcattcttctgggagtggttggcacagatgtcccagtgaaagaacttctgaagaccatccccaaatacaagttagggattcacggttatgcctttgcaatcacaaataatggatatatcctgacgcatccggaactcaggctgctgtacgaagaaggaaaaaagcgaaggaaacctaactatagtagcgttgacctctctgaggtggagtgggaagaccgagatgacgtgttgagaaatgctatggtgaatcgaaagacggggaagttttccatggaggtgaagaagacagtggacaaagggaaacgggttttggtgatgacaaatgactactattatacagacatcaagggtactcctttcagtttaggtgtggcgctttccagaggtcatgggaaatatttcttccgagggaatgtaaccatcgaagaaggcctgcatgacttagaacatcccgatgtgtccttggcagatgaatggtcctactgcaacactgacctacaccctgagcaccgccatctgtctcagttagaagcgattaagctctacctaaaaggcaaagaacctctgctccagtgtgataaagaattgatccaagaagtcctttttgacgcggtggtgagtgcccccattgaagcgtattggaccagcctggccctcaacaaatctgaaaattctgacaagggcgtggaggttgccttcctcggcactcgcacgggcctctccagaatcaacctgtttgtcggggctgagcagctcaccaatcaggacttcctgaaagctggcgacaaggagaacatttttaacgcagaccatttccctctctggtaccgaagagccgctgagcagattccagggagcttcgtctactcgatcccattcagcactggaccagtcaataaaagcaatgtggtgacagcaagtacatccatccagctcctggatgaacggaaatctcctgtggtggcagctgtaggcattcagatgaaacttgaatttttccaaaggaagttctggactgccagcagacagtgtgcttccctggatggcaaatgctccatcagctgtgatgatgagactgtgaattgttacctcatagacaataatggatttattttggtgtctgaagactacacacagactggagacttttttggtgagatcgagggagctgtgatgaacaaattgctaacaatgggctcctttaaaagaattaccctttatgactaccaagccatgtgtagagccaacaaggaaagcagcgatggcgcccatggcctcctggatccttataatgccttcctctctgcagtaaaatggatcatgacagaacttgtcttgttcctggtggaatttaacctctgcagttggtggcactccgatatgacagctaaagcccagaaattgaaacagaccctggagccttgtgatactgaatatccagcattcgtctctgagcgcaccatcaaggagactacagggaatattgcttgtgaagactgctccaagtcctttgtcatccagcaaatcccaagcagcaacctgttcatggtggtggtggacagcagctgcctctgtgaatctgtggcccccatcaccatggcacccattgaaatcagtcaacataatgaatcccttaagtgtgaacgtctaaaggcccagaagatcagaaggcgcccagaatcttgtcatggcttccatcctgaggagaatgcaagggagtgtgggggtgcgccgagtctccaagcccagacagtcctccttctgctccctctgcttttgatgctcttctcaaggtgacactgactgagatgttctcttactgactgagatgttctcttggcatgctaaatcatggataaactgtgaaccaaaatatggtgcaacatacgagacatgaatatagtccaaccatcagcatctcatcatgattttaaactgtgcgtgatataaactcttaaagatatgttgacaaaaagttatctatcatctttttactttgccagtcatgcaaatgtgagtttgccacatgataatcacccttcatcagaaatgggaccgcaagtg

SEQ ID NO: 4123 - DNA, 3661 bp, Homo sapiens
  source 1..3661: mol_type = unassigned DNA
cacccgctcctttttctgctccccaagtgagccgggcgctcgcccaccgcccgctccgcgcagctccccgcggccgctctcgtcgccgccgcagcgggcgcgtcggagggagcccagcatggccgggccgggctcgccgcgccgcgcgtcccggggggcctcggcgcttctcgctgccgcgcttctctacgccgcgctgggggacgtggtgcgctcggagcagcagataccgctctccgtggtgaagctctgggcctcggcttttggtggggagataaaatccattgctgctaagtactccggttcccagcttctgcaaaagaaatacaaagagtatgagaaagacgttgccatagaagaaattgatggcctccaactggtaaagaagctggcaaagaacatggaagagatgtttcacaagaagtctgaggccgtcaggcgtctggtggaggctgcagaagaagcacacctgaaacatgaatttgatgcagacttacagtatgaatacttcaatgctgtgctgataaatgaaagggacaaagacgggaattttttggagctgggaaaggaattcatcttagccccaaatgaccattttaataatttgcctgtgaacatcagtctaagtgacgtccaagtaccaacgaacatgtacaacaaagaccctgcaattgtcaatggggtttattggtctgaatctctaaacaaagtttttgtagataactttgaccgtgacccatctctcatatggcagtactttggaagtgcaaagggcttttttaggcagtatccggggattaaatgggaaccagatgagaatggagtcattgccttcgactgcaggaaccgaaaatggtacatccaggcagcaacttctccgaaagacgtggtcattttagttgacgtcagtggcagcatgaaaggactccgtctgactatcgcgaagcaaacagtctcatccattttggatacacttggggatgatgacttcttcaacataattgcttataatgaggagcttcactatgtggaaccttgcctgaatggaactttggtgcaagccgacaggacaaacaaagagcacttcagggagcatctggacaaacttttcgccaaaggaattggaatgttggatatagctctgaatgaggccttcaacattctgagtgatttcaaccacacgggacaaggaagtatctgcagtcaggccatcatgctcataactgatggggcggtggacacctatgatacaatctttgcaaaatacaattggccagatcgaaaggttcgcatcttcacatacctcattggacgagaggctgcgtttgcagacaatctaaagtggatggcctgtgccaacaaaggattttttacccagatctccaccttggctgatgtgcaggagaatgtcatggaataccttcacgtgcttagccggcccaaagtcatcgaccaggagcatgatgtggtgtggaccgaagcttacattgacagcactctccctcaggcacaaaagctgactgatgatcagggccccgtcctgatgaccactgtagccatgcctgtgtttagtaagcagaacgaaaccagatcgaagggcattcttctgggagtggttggcacagatgtcccagtgaaagaacttctgaagaccatccccaaatacaagttagggattcacggttatgcctttgcaatcacaaataatggatatatcctgacgcatccggaactcaggctgctgtacgaagaaggaaaaaagcgaaggaaacctaactatagtagcgttgacctctctgaggtggagtgggaagaccgagatgacgtgttgagaaatgctatggtgaatcgaaagacggggaagttttccatggaggtgaagaagacagtggacaaagggaaacgggttttggtgatgacaaatgactactattatacagacatcaagggtactcctttcagtttaggtgtggcgctttccagaggtcatgggaaatatttcttccgagggaatgtaaccatcgaagaaggcctgcatgacttagaacatcccgatgtgtccttggcagatgaatggtcctactgcaacactgacctacaccctgagcaccgccatctgtctcagttagaagcgattaagctctacctaaaaggcaaagaacctctgctccagtgtgataaagaattgatccaagaagtcctttttgacgcggtggtgagtgcccccattgaagcgtattggaccagcctggccctcaacaaatctgaaaattctgacaagggcgtggaggttgccttcctcggcactcgcacgggcctctccagaatcaacctgtttgtcggggctgagcagctcaccaatcaggacttcctgaaagctggcgacaaggagaacatttttaacgcagaccatttccctctctggtaccgaagagccgctgagcagattccagggagcttcgtctactcgatcccattcagcactggaccagtcaataaaagcaatgtggtgacagcaagtacatccatccagctcctggatgaacggaaatctcctgtggtggcagctgtaggcattcagatgaaacttgaatttttccaaaggaagttctggactgccagcagacagtgtgcttccctggatggcaaatgctccatcagctgtgatgatgagactgtgaattgttacctcatagacaataatggatttattttggtgtctgaagactacacacagactggagacttttttggtgagatcgagggagctgtgatgaacaaattgctaacaatgggctcctttaaaagaattaccctttatgactaccaagccatgtgtagagccaacaaggaaagcagcgatggcgcccatggcctcctggatccttataatgccttcctctctgcagtaaaatggatcatgacagaacttgtcttgttcctggtggaatttaacctctgcagttggtggcactccgatatgacagctaaagcccagaaattgaaacagaccctggagccttgtgatactgaatatccagcattcgtctctgagcgcaccatcaaggagactacagggaatattgcttgtgaagactgctccaagtcctttgtcatccagcaaatcccaagcagcaacctgttcatggtggtggtggacagcagctgcctctgtgaatctgtggcccccatcaccatggcacccattgaaatcaggtataatgaatcccttaagtgtgaacgtctaaaggcccagaagatcagaaggcgcccagaatcttgtcatggcttccatcctgaggagaatgcaagggagtgtgggggtgcgccgagtctccaagcccagacagtcctccttctgctccctctgcttttgatgctcttctcaaggtgacactgactgagatgttctcttactgactgagatgttctcttggcatgctaaatcatggataaactgtgaaccaaaatatggtgcaacatacgagacatgaatatagtccaaccatcagcatctcatcatgattttaaactgtgcgtgatataaactcttaaagatatgttgacaaaaagttatctatcatctttttactttgccagtcatgcaaatgtgagtttgccacatgataatcacccttcatcagaaatgggaccgcaagtg

SEQ ID NO: 4124 - DNA, 1554 bp, Homo sapiens
  source 1..1554: mol_type = unassigned DNA
gaaatattatttcaccaaatgcaaaatcaaattaaacgtctggtggaggctgcagaagaagcacacctgaaacatgaatttgatgcagacttacagtatgaatacttcaatgctgtgctgataaatgaaagggacaaagacgggaattttttggagctgggaaaggaattcatcttagccccaaatgaccattttaataatttgcctgtgaacatcagtctaagtgacgtccaagtaccaacgaacatgtacaacaaagaccctgcaattgtcaatggggtttattggtctgaatctctaaacaaagtttttgtagataactttgaccgtgacccatctctcatatggcagtactttggaagtgcaaagggcttttttaggcagtatccggggattaaatgggaaccagatgagaatggagtcattgccttcgactgcaggaaccgaaaatggtacatccaggcagcaacttctccgaaagacgtggtcattttagttgacgtcagtggcagcatgaaaggactccgtctgactatcgcgaagcaaacagtctcatccattttggatacacttggggatgatgacttcttcaacataattgcttataatgaggagcttcactatgtggaaccttgcctgaatggaactttggtgcaagccgacaggacaaacaaagagcacttcagggagcatctggacaaacttttcgccaaaggaattggaatgttggatatagctctgaatgaggccttcaacattctgagtgatttcaaccacacgggacaaggaagtatctgcagtcaggccatcatgctcataactgatggggcggtggacacctatgatacaatctttgcaaaatacaattggccagatcgaaaggttcgcatcttcacatacctcattggacgagaggctgcgtttgcagacaatctaaagtggatggcctgtgccaacaaaggattttttacccagatctccaccttggctgatgtgcaggagaatgtcatggaataccttcacgtgcttagccggcccaaagtcatcgaccaggagcatgatgtggtgtggaccgaagcttacattgacagcactctgactgatgatcagggccccgtcctgatgaccactgtagccatgcctgtgtttagtaagcagaacgaaaccagatcgaagggcattcttctgggagtggttggcacagatgtcccagtgaaagaacttctgaagaccatccccaaatacaagttagggattcacggttatgcctttgcaatcacaaataatggatatatcctgacgcatccggaactcaggctgctgtacgaagaaggaaaaaagcgaaggaaacctaactatagtagcgttgacctctctgaggtggagtgggaagaccgagatgacgtgttgagaaatgctatggtgaatcgaaagacggggaagttttccatggaggtgaagaagacagtggacaaagggtttaggtgtggcgctttccagaggtcatgggaaatatttcttccgagggaatgtaaccatcgaagaagacctgct

SEQ ID NO: 4125 - DNA, 3675 bp, Homo sapiens
  source 1..3675: mol_type = unassigned DNA
cggccgctctcgtcgccgccgcagcgggcgcgtcggagggagcccagcatggccgggccgggctcgccgcgccgcgcgtcccggggggcctcggcgcttctcgctgccgcgcttctctacgccgcgctgggggacgtggtgcgctcggagcagcagataccgctctccgtggtgaagctctgggcctcggcttttggtggggagataaaatccattgctgctaagtactccggttcccagcttctgcaaaagaaatacaaagagtatgagaaagacgttgccatagaagaaattgatggcctccaactggtaaagaagctggcaaagaacatggaagagatgtttcacaagaagtctgaggccgtcaggcgtctggtggaggctgcagaagaagcacacctgaaacatgaatttgatgcagacttacagtatgaatacttcaatgctgtgctgataaatgaaagggacaaagacgggaattttttggagctgggaaaggaattcatcttagccccaaatgaccattttaataatttgcctgtgaacatcagtctaagtgacgtccaagtaccaacgaacatgtacaacaaagaccctgcaattgtcaatggggtttattggtctgaatctctaaacaaagtttttgtagataactttgaccgtgacccatctctcatatggcagtactttggaagtgcaaagggcttttttaggcagtatccggggattaaatgggaaccagatgagaatggagtcattgccttcgactgcaggaaccgaaaatggtacatccaggcagcaacttctccgaaagacgtggtcattttagttgacgtcagtggcagcatgaaaggactccgtctgactatcgcgaagcaaacagtctcatccattttggatacacttggggatgatgacttcttcaacataattgcttataatgaggagcttcactatgtggaaccttgcctgaatggaactttggtgcaagccgacaggacaaacaaagagcacttcagggagcatctggacaaacttttcgccaaaggaattggaatgttggatatagctctgaatgaggccttcaacattctgagtgatttcaaccacacgggacaaggaagtatctgcagtcaggccatcatgctcataactgatggggcggtggacacctatgatacaatctttgcaaaatacaattggccagatcgaaaggttcgcatcttcacatacctcattggacgagaggctgcgtttgcagacaatctaaagtggatggcctgtgccaacaaaggattttttacccagatctccaccttggctgatgtgcaggagaatgtcatggaataccttcacgtgcttagccggcccaaagtcatcgaccaggagcatgatgtggtgtggaccgaagcttacattgacagcactctccctcaggcacaaaagctgactgatgatcagggccccgtcctgatgaccactgtagccatgcctgtgtttagtaagcagaacgaaaccagatcgaagggcattcttctgggagtggttggcacagatgtcccagtgaaagaacttctgaagaccatccccaaatacaagttagggattcacggttatgcctttgcaatcacaaataatggatatatcctgacgcatccggaactcaggctgctgtacgaagaaggaaaaaagcgaaggaaacctaactatagtagcgttgacctctctgaggtggagtgggaagaccgagatgacgtgttgagaaatgctatggtgaatcgaaagacggggaagttttccatggaggtgaagaagacagtggacaaagggaaacgggttttggtgatgacaaatgactactattatacagacatcaagggtactcctttcagtttaggtgtggcgctttccagaggtcatgggaaatatttcttccgagggaatgtaaccatcgaagaaggcctgcatgacttagaacatcccgatgtgtccttggcagatgaatggtcctactgcaacactgacctacaccctgagcaccgccatctgtctcagttagaagcgattaagctctacctaaaaggcaaagaacctctgctccagtgtgataaagaattgatccaagaagtcctttttgacgcggtggtgagtgcccccattgaagcgtattggaccagcctggccctcaacaaatctgaaaattctgacaagggcgtggaggttgccttcctcggcactcgcacgggcctctccagaatcaacctgtttgtcggggctgagcagctcaccaatcaggacttcctgaaagctggcgacaaggagaacatttttaacgcagaccatttccctctctggtaccgaagagccgctgagcagattccagggagcttcgtctactcgatcccattcagcactggaccagtcaataaaagcaatgtggtgacagcaagtacatccatccagctcctggatgaacggaaatctcctgtggtggcagctgtaggcattcagatgaaacttgaatttttccaaaggaagttctggactgccagcagacagtgtgcttccctggatggcaaatgctccatcagctgtgatgatgagactgtgaattgttacctcatagacaataatggatttattttggtgtctgaagactacacacagactggagacttttttggtgagatcgagggagctgtgatgaacaaattgctaacaatgggctcctttaaaagaattaccctttatgactaccaagccatgtgtagagccaacaaggaaagcagcgatggcgcccatggcctcctggatccttataatgccttcctctctgcagtaaaatggatcatgacagaacttgtcttgttcctggtggaatttaacctctgcagttggtggcactccgatatgacagctaaagcccagaaattgaaacagaccctggagccttgtgatactgaatatccagcattcgtctctgagcgcaccatcaaggagactacagggaatattgcttgtgaagactgctccaagtcctttgtcatccagcaaatcccaagcagcaacctgttcatggtggtggtggacagcagctgcctctgtgaatctgtggcccccatcaccatggcacccattgaaatcaggtataatgaatcccttaagtgtgaacgtctaaaggcccagaagatcagaaggcgcccagaatcttgtcatggcttccatcctgaggagaatgcaagggagtgtgggggtgcgccgagtctccaagcccagacagtcctccttctgctccctctgcttttgatgctcttctcaaggtgacactgactgagatgttctcttactgactgagatgttctcttggcatgctaaatcatggataaactgtgaaccaaaatatggtgcaacatacgagacatgaatatagtccaaccatcagcatctcatcatgattttaaactgtgcgtgatataaactcttaaagatatgttgacaaaaagttatctatcatctttttactttgccagtcatgcaaatgtgagtttgccacatgataatcacccttcatcagaaatgggaccgcaagtggtaggcagtgtcccttctgcttgaaacctattgaaaccaatttaaaactgtgtactttttaaataaagtatattaaaatcataa

SEQ ID NO: 4126 - DNA, 1972 bp, Homo sapiens
  source 1..1972: mol_type = unassigned DNA
gttacatatcttcctgtgccccttctccctgtagggtgaagctctgggcctcggcttttggtggggagataaaatccattgctgctaagtactccggttcccagcttctgcaaaagaaatacaaagagtatgagaaagacgttgccatagaagaaattgatggcctccaactggtaaagaagctggcaaagaacatggaagagatgtttcacaagaagtctgaggccgtcaggcgtctggtggaggctgcagaagaagcacacctgaaacatgaatttgatgcagacttacagtatgaatacttcaatgctgtgctgataaatgaaagggacaaagacgggaattttttggagctgggaaaggaattcatcttagccccaaatgaccattttaataatttgcctgtgaacatcagtctaagtgacgtccaagtaccaacgaacatgtacaacaaagaccctgcaattgtcaatggggtttattggtctgaatctctaaacaaagtttttgtagataactttgaccgtgacccatctctcatatggcagtactttggaagtgcaaagggcttttttaggcagtatccggggattaaatgggaaccagatgagaatggagtcattgccttcgactgcaggaaccgaaaatggtacatccaggcagcaacttctccgaaagacgtggtcattttagttgacgtcagtggcagcatgaaaggactccgtctgactatcgcgaagcaaacagtctcatccattttggatacacttggggatgatgacttcttcaacataattgcttataatgaggagcttcactatgtggaaccttgcctgaatggaactttggtgcaagccgacaggacaaacaaagagcacttcagggagcatctggacaaacttttcgccaaaggaattggaatgttggatatagctctgaatgaggccttcaacattctgagtgatttcaaccacacgggacaaggaagtatctgcagtcaggccatcatgctcataactgatggggcggtggacacctatgatacaatctttgcaaaatacaattggccagatcgaaaggttcgcatcttcacatacctcattggacgagaggctgcgtttgcagacaatctaaagtggatggcctgtgccaacaaaggattttttacccagatctccaccttggctgatgtgcaggagaatgtcatggaataccttcacgtgcttagccggcccaaagtcatcgaccaggagcatgatgtggtgtggaccgaagcttacattgacagcactctccctcaggcacaaaagctgactgatgatcagggccccgtcctgatgaccactgtagccatgcctgtgtttagtaagcagaacgaaaccagatcgaagggcattcttctgggagtggttggcacagatgtcccagtgaaagaacttctgaagaccatccccaaatacaagttagggattcacggttatgcctttgcaatcacaaataatggatatatcctgacgcatccggaactcaggctgctgtacgaagaaggaaaaaagcgaaggaaacctaactatagtagcgttgacctctctgaggtggagtgggaagaccgagatgacgtgttgagaaatgctatggtgaatcgaaagacggggaagttttccatggaggtgaagaagacagtggacaaagggtttaggtgtggcgctttccagaggtcatgggaaatatttcttccgagggaatgtaaccatcgaagaaggcctgcatgacttagaacatcccgatgtgtccttggcagatgaatggtcctactgcaacactgacctacaccctgagcaccgccatctgtctcagttagaagcgattaagctctacctaaaaggcaaagaacctctgctccagtgtgataaagaattgatccaagaagtcctttttgacgcggtggtgagtgcccccattgaagcgtatt

SEQ ID NO: 4127 - DNA, 3557 bp, Homo sapiens
  source 1..3557: mol_type = unassigned DNA
gttgactgtgacacgggtgttacatatcttcctgtgccccttctccctgtagggtgaagctctgggcctcggcttttggtggggagataaaatccattgctgctaagtactccggttcccagcttctgcaaaagaaatacaaagagtatgagaaagacgttgccatagaagaaattgatggcctccaactggtaaagaagctggcaaagaacatggaagagatgtttcacaagaagtctgaggccgtcaggcgtctggtggaggctgcagaagaagcacacctgaaacatgaatttgatgcagacttacagtatgaatacttcaatgctgtgctgataaatgaaagggacaaagacgggaattttttggagctgggaaaggaattcatcttagccccaaatgaccattttaataatttgcctgtgaacatcagtctaagtgacgtccaagtaccaacgaacatgtacaacaaagaccctgcaattgtcaatggggtttattggtctgaatctctaaacaaagtttttgtagataactttgaccgtgacccatctctcatatggcagtactttggaagtgcaaagggcttttttaggcagtatccggggattaaatgggaaccagatgagaatggagtcattgccttcgactgcaggaaccgaaaatggtacatccaggcagcaacttctccgaaagacgtggtcattttagttgacgtcagtggcagcatgaaaggactccgtctgactatcgcgaagcaaacagtctcatccattttggatacacttggggatgatgacttcttcaacataattgcttataatgaggagcttcactatgtggaaccttgcctgaatggaactttggtgcaagccgacaggacaaacaaagagcacttcagggagcatctggacaaacttttcgccaaaggaattggaatgttggatatagctctgaatgaggccttcaacattctgagtgatttcaaccacacgggacaaggaagtatctgcagtcaggccatcatgctcataactgatggggcggtggacacctatgatacaatctttgcaaaatacaattggccagatcgaaaggttcgcatcttcacatacctcattggacgagaggctgcgtttgcagacaatctaaagtggatggcctgtgccaacaaaggattttttacccagatctccaccttggctgatgtgcaggagaatgtcatggaataccttcacgtgcttagccggcccaaagtcatcgaccaggagcatgatgtggtgtggaccgaagcttacattgacagcactctccctcaggcacaaaagctgactgatgatcagggccccgtcctgatgaccactgtagccatgcctgtgtttagtaagcagaacgaaaccagatcgaagggcattcttctgggagtggttggcacagatgtcccagtgaaagaacttctgaagaccatccccaaatacaagttagggattcacggttatgcctttgcaatcacaaataatggatatatcctgacgcatccggaactcaggctgctgtacgaagaaggaaaaaagcgaaggaaacctaactatagtagcgttgacctctctgaggtggagtgggaagaccgagatgacgtgttgagaaatgctatggtgaatcgaaagacggggaagttttccatggaggtgaagaagacagtggacaaagggaaacgggttttggtgatgacaaatgactactattatacagacatcaagggtactcctttcagtttaggtgtggcgctttccagaggtcatgggaaatatttcttccgagggaatgtaaccatcgaagaaggcctgcatgacttagaacatcccgatgtgtccttggcagatgaatggtcctactgcaacactgacctacaccctgagcaccgccatctgtctcagttagaagcgattaagctctacctaaaaggcaaagaacctctgctccagtgtgataaagaattgatccaagaagtcctttttgacgcggtggtgagtgcccccattgaagcgtattggaccagcctggccctcaacaaatctgaaaattctgacaagggcgtggaggttgccttcctcggcactcgcacgggcctctccagaatcaacctgtttgtcggggctgagcagctcaccaatcaggacttcctgaaagctggcgacaaggagaacatttttaacgcagaccatttccctctctggtaccgaagagccgctgagcagattccagggagcttcgtctactcgatcccattcagcactggaccagtcaataaaagcaatgtggtgacagcaagtacatccatccagctcctggatgaacggaaatctcctgtggtggcagctgtaggcattcagatgaaacttgaatttttccaaaggaagttctggactgccagcagacagtgtgcttccctggatggcaaatgctccatcagctgtgatgatgagactgtgaattgttacctcatagacaataatggatttattttggtgtctgaagactacacacagactggagacttttttggtgagatcgagggagctgtgatgaacaaattgctaacaatgggctcctttaaaagaattaccctttatgactaccaagccatgtgtagagccaacaaggaaagcagcgatggcgcccatggcctcctggatccttataatgccttcctctctgcagtaaaatggatcatgacagaacttgtcttgttcctggtggaatttaacctctgcagttggtggcactccgatatgacagctaaagcccagaaattgaaacagaccctggagccttgtgatactgaatatccagcattcgtctctgagcgcaccatcaaggagactacagggaatattgcttgtgaagactgctccaagtcctttgtcatccagcaaatcccaagcagcaacctgttcatggtggtggtggacagcagctgcctctgtgaatctgtggcccccatcaccatggcacccattgaaatcaggtataatgaatcccttaagtgtgaacgtctaaaggcccagaagatcagaaggcgcccagaatcttgtcatggcttccatcctgaggagaatgcaagggagtgtgggggtgcgccgagtctccaagcccagacagtcctccttctgctccctctgcttttgatgctcttctcaaggtgacactgactgagatgttctcttactgactgagatgttctcttggcatgctaaatcatggataaactgtgaaccaaaatatggtgcaacatacgagacatgaatatagtccaaccatcagcatctcatcatgattttaaactgtgcgtgatataaactcttaaagatatgttgacaaaaagttatctatcatctttttactttgccagtcatgcaaatgtgagtttgccacatgataatcacccttcatcagaaatgggaccgcaagtggtaggcagtgtcccttctgcttgaaacctattgaaaccaatttaaaactgtgtactttttaaataaagtatattaaaatcataa

SEQ ID NO: 4128 - DNA, 559 bp, Homo sapiens
  source 1..559: mol_type = unassigned DNA
cccctatatttatctttaacctcaagtgaatgttgctgcctttgtagttcatgagcaatgtatactcttgaattccagctctgtgaaatcggtagaaaatgagaaatacaaagagtatgagaaagacgttgccatagaagaaattgatggcctccaactggtaaagaagctggcaaagaacatggaagagatgtttcacaagaagtctgaggccgtcaggcgtctggtggaggctgcagaagaagcacacctgaaacatgaatttgatgcagacttacagtatgaatacttcaatgctgtgctgataaatgaaagggacaaagacgggaattttttggagctgggaaaggaattcatcttagccccaaatgaccattttaataatttgcctgtgaacatcagtctaagtgacgtccaagtaccaacgaacatgtacaacaaagaccctgcaattgtcaatggggtttattggtctgaatctctaaacaaagtttttgtagataactttgaccgtgacccatctctcatatggcagtactttggaagtgcaaagggcttt

SEQ ID NO: 4129 - DNA, 5934 bp, Homo sapiens
  source 1..5934: mol_type = unassigned DNA
acagcctctcccccagtccctgtctccgaggcctgcttgctaggtggggcgactcttctgtgagctgcagctgtggggcagagagaagccctccccacccaggactgagaggctggagaccccaggctcgccaaggcacggaagacaaaggcctggggcgtcctggggtctgggaggaaggcagacagagctcatggtctgtggctgctctgccctccttcccctccccaaccccaggcccaccatgcctgcaactcccaacttcctcgcaaaccccagctccagcagccgctggattcccctccagccaatgcccgtggcctgggcctttgtgcagaagacctcggccctcctgtggctgctgcttctaggcacctccctgtcccctgcgtggggacaggccaagattcctctggaaacagtgaagctatgggctgacaccttcggcggggacctgtataacactgtgaccaaatactcaggctctctcttgctgcagaagaagtacaaggatgtggagtccagtctgaagatcgaggaggtggatggcttggagctggtgaggaagttctcagaggacatggagaacatgctgcggaggaaagtcgaggcggtccagaatctggtggaagctgccgaggaggccgacctgaaccacgaattcaatgaatccctggtgttcgactattacaactcggtcctgatcaacgagagggacgagaagggcaacttcgtggagctgggcgccgagttcctcctggagtccaatgctcacttcagcaacctgccggtgaacacctccatcagcagcgtgcagctgcccaccaacgtgtacaacaaagacccagatattttaaatggagtctacatgtctgaagccttgaatgctgtcttcgtggagaacttccagagagacccaacgttgacctggcaatattttggcagtgcaactggattcttcaggatctatccaggtataaaatggacacctgatgagaatggagtcattacttttgactgccgaaaccgcggctggtacattcaagctgctacttctcccaaggacatagtgattttggtggacgtgagcggcagtatgaaggggctgaggatgactattgccaagcacaccatcaccaccatcttggacaccctgggggagaatgacttcattaatatcatagcgtacaatgactacgtccattacatcgagccttgttttaaagggatcctcgtccaggcggaccgagacaatcgagagcatttcaaactgctggtggaggagttgatggtcaaaggtgtgggggtcgtggaccaagccctgagagaagccttccagatcctgaagcagttccaagaggccaagcaaggaagcctctgcaaccaggccatcatgctcatcagcgacggcgccgtggaggactacgagccggtgtttgagaagtataactggccagactgtaaggtccgagttttcacttacctcattgggagagaagtgtcttttgctgaccgcatgaagtggattgcatgcaacaacaaaggctactacacgcagatctcaacgctggcggacacccaggagaacgtgatggaatacctgcacgtgctcagccgccccatggtcatcaaccacgaccacgacatcatctggacagaggcctacatggacagcaagctcctcagctcgcaggctcagagcctgacactgctcaccactgtggccatgccagtcttcagcaagaagaacgaaacgcgatcccatggcattctcctgggtgtggtgggctcagatgtggccctgagagagctgatgaagctggcgccccggtacaagcttggagtgcacggatacgcctttctgaacaccaacaatggctacatcctctcccatcccgacctccggcccctgtacagagaggggaagaaactaaaacccaaacctaactacaacagtgtggatctctccgaagtggagtgggaagaccaggctgaatctctgagaacagccatgatcaatagggaaacaggtactctctcgatggatgtgaaggttccgatggataaagggaagcgagttcttttcctgaccaatgactacttcttcacggacatcagcgacacccctttcagtttgggggtggtgctgtcccggggccacggagaatacatccttctggggaacacgtctgtggaagaaggcctgcatgacttgcttcacccagacctggccctggccggtgactggatctactgcatcacagatattgacccagaccaccggaagctcagccagctagaggccatgatccgcttcctcaccaggaaggacccagacctggagtgtgacgaggagctggtccgggaggtgctgtttgacgcggtggtgacagcccccatggaagcctactggacagcgctggccctcaacatgtccgaggagtctgaacacgtggtggacatggccttcctgggcacccgggctggcctcctgagaagcagcttgttcgtgggctccgagaaggtctccgacaggaagttcctgacacctgaggacgaggccagcgtgttcaccctggaccgcttcccgctgtggtaccgccaggcctcagagcatcctgctggcagcttcgtcttcaacctccgctgggcagaaggaccagaaagtgcgggtgaacccatggtggtgacggcaagcacagctgtggcggtgaccgtggacaagaggacagccattgctgcagccgcgggcgtccaaatgaagctggaattcctccagcgcaaattctgggcggcaacgcggcagtgcagcactgtggatgggccgtgcacacagagctgcgaggacagtgatctggactgcttcgtcatcgacaacaacgggttcattctgatctccaagaggtcccgagagacgggaagatttctgggggaggtggatggtgctgtcctgacccagctgctcagcatgggggtgttcagccaagtgactatgtatgactatcaggccatgtgcaaaccctcgagtcaccaccacagtgcagcccagcccctggtcagcccaatttctgccttcttgacggcgaccaggtggctgctgcaggagctggtgctgtgagtgggggtagacacggggctggtggagggctgcatgcgagggtggcttaggagggtgtccttgagcaggaggctgcaaggtctccaggacaacccacttgctaccagaccccggggaaggagggcacaatccctgggcatggacgccacctcttccctgcatgctgcccctgggagggacctcattgctcaaccagagccctcaagcagggaagagggtgtcctggaggagaggggatgggccgggggctgtcagggatactccagctccttgggaacccaagtcgggagggctcagaggtctccgagattcagtcctgtgtctgacaggttcctgctggagtggagtgtctggggctcctggtacgacagaggggccgagggtgagtgcacggagctgcagggccatgtgctgaagagcagtggcattttggtccactaacgtgagaccattccctgtggggtgggtgacagtggggataggtgaccctgaagcatcgttgttcacatctcaccctgcgtggccttctctcatcacatccctcactcctggctctgtgtgtgacatcatcttgggacaccgccactccatgtgccatcatcaccaccccatgacatcctgccctcatgtgccaccatgttttcctgtgccgtgtccaccctgtgctgggcttatgttccggccagccaaaagtgtcttccatcactcccacaaacacaagaagcaggacccgctgcagccctgcgacacggagtaccccgtgttcgtgtaccagccggccatccgggaggccaacgggatcgtggagtgcgggccctgccagaaggtatttgtggtgcagcagattcccaacagtaacctcctcctcctggtgacagaccccacctgtgactgcagcatcttcccaccagtgctgcaggaggcgacagaagtcaaataatgcctctgtcaaatgtgaccggatgcgctcccagaagctccgccggcgaccagactcctgccacgccttccatccagaggagaatgcccaggactgcggcggcgcctcggacacctcagcctcgccgcccctactcctgctgcctgtgtgtgcctgggggctactgccccaactcctgcggtgacaccacccagcctgacctgtgttttggcaaggtgatccttccagagccatcccaaaaagtcagcactgacatgggatgcagctaactgcagttgggtcgcccccaggccaacgctcctctcaatcctgggctggtggcccctggctccggagaatgctggatggaacaggaaaccaatcacctggcaccactttcaagatgcttcatggtgcccggtaccatctgccctaggtctcaacatgagcatacttctgacctaaccttcctgtctcctcttcgggaagccagcgtgagctcagcttggaccaagacaaaataatttagttcttcctgtactccagagtccagacccagccaagaaagggtcagttgtttctgaccctttctgtcggagtggtctctggtagaacccaaggacttctgggtactgagaagcagcagcagaatgaggccaaatgcagagatgaggctaaggcaagaatatgccccaactaaagcatagattccccaaagtgaggctcatggtgggaggccactcaccttcctagctgctgctcgaaaaggttttgactgtgttggggtgggggttgggtaagggaatggtcaagactgagaaaggaatgaaatccattcaggaaatatcgacagggctacacgtgatgtccccaaactgctgctattgaagaacttcccaaaacttctttacaaagccctaaaggaaagtttgcatctatgaaaagccaataggctgagacatccaattgctgcatggaaattgatgtacattcaggggacggcaaaaatagctgtaaaatagtgaaaaagagcagtggttgtgctcttttctggccaatgatttacaaaagaatctacttgactctgtccctggagtgaaatccttagggttggaacttgtgggaacattccaacttgctaagcagggtccactgggagggaagctctatctgggaactcacccccagcgcacacacatctcccccagggtcccaaggccccgcagcttcctcccccgaccaaaccccaagacctggatcccaggagacaacagtctccacagtgagagcaacattaagggcaaagccatggagaaatgtgggagaggccggcctcaaatctttccatttaacaaaccccagtgatgggtatggacagcatgcagggcttttggggcgcttccccccgctcctccatcaccctcagcctccacacttcaaagttcaagttcaaagctgttcaagtttcctaccagcaaatagccctaacttgcctctagagtaggccaaatgccaactctgtaaaacacacttacattatcggttacagaatgtcactcttaccgtcatgtcttgcaacaaccctgtgagggcagtattaatgcccccttacagcagaagacactgcagctcgaagacagcttaagtggcagaataatgctagaacagctaaggtttacatgtaccaaataacatgtttcagctcattccatcctcacaacagccccctgaaagtgggtactatcattagtcccatgttatagaaactgcagcagagttgaaaattgcctccaaattaccggaagagtgtatgaagattgaatgtgatgtattcacgtaacatgcttgaaactgcctggcatatactaaacgctaaataaatacatgctaactgcga

SEQ ID NO: 4130 - DNA, 4601 bp, Homo sapiens
  source 1..4601: mol_type = unassigned DNA
cacaggaacggggctgcctctttaaagcagaggggtgcactatagccctgagggaaccagctgcagttgtggtaatcttgggaggcagctccccaccccctgccaccccctccctgctgtcaggagaggattagaggagaggccagcggattaaagggtttcatgttgccacagcctctcccccagtccctgtctccgaggcctgcttgctaggtggggcgactcttctgtgagctgcagctgtggggcagagagaagccctccccacccaggactgagaggctggagaccccaggctcgccaaggcacggaagacaaaggcctggggcgtcctggggtctgggaggaaggcagacagagctcatggtctgtggctgctctgccctccttcccctccccaaccccaggcccaccatgcctgcaactcccaacttcctcgcaaaccccagctccagcagccgctggattcccctccagccaatgcccgtggcctgggcctttgtgcagaagacctcggccctcctgtggctgctgcttctaggcacctccctgtcccctgcgtggggacaggccaagattcctctggaaacagtgaagctatgggctgacaccttcggcggggacctgtataacactgtgaccaaatactcaggctctctcttgctgcagaagaagtacaaggatgtggagtccagtctgaagatcgaggaggtggatggcttggagctggtgaggaagttctcagaggacatggagaacatgctgcggaggaaagtcgaggcggtccagaatctggtggaagctgccgaggaggccgacctgaaccacgaattcaatgaatccctggtgttcgactattacaactcggtcctgatcaacgagagggacgagaagggcaacttcgtggagctgggcgccgagttcctcctggagtccaatgctcacttcagcaacctgccggtgaacacctccatcagcagcgtgcagctgcccaccaacgtgtacaacaaagacccagatattttaaatggagtctacatgtctgaagccttgaatgctgtcttcgtggagaacttccagagagacccaacgttgacctggcaatattttggcagtgcaactggattcttcaggatctatccaggtataaaatggacacctgatgagaatggagtcattacttttgactgccgaaaccgcggctggtacattcaagctgctacttctcccaaggacatagtgattttggtggacgtgagcggcagtatgaaggggctgaggatgactattgccaagcacaccatcaccaccatcttggacaccctgggggagaatgacttcattaatatcatagcgtacaatgactacgtccattacatcgagccttgttttaaagggatcctcgtccaggcggaccgagacaatcgagagcatttcaaactgctggtggaggagttgatggtcaaaggtgtgggggtcgtggaccaagccctgagagaagccttccagatcctgaagcagttccaagaggccaagcaaggaagcctctgcaaccaggccatcatgctcatcagcgacggcgccgtggaggactacgagccggtgtttgagaagtataactggccagactgtaaggtccgagttttcacttacctcattgggagagaagtgtcttttgctgaccgcatgaagtggattgcatgcaacaacaaaggctactacacgcagatctcaacgctggcggacacccaggagaacgtgatggaatacctgcacgtgctcagccgccccatggtcatcaaccacgaccacgacatcatctggacagaggcctacatggacagcaagctcctcagctcgcaggctcagagcctgacactgctcaccactgtggccatgccagtcttcagcaagaagaacgaaacgcgatcccatggcattctcctgggtgtggtgggctcagatgtggccctgagagagctgatgaagctggcgccccggtacaagcttggagtgcacggatacgcctttctgaacaccaacaatggctacatcctctcccatcccgacctccggcccctgtacagagaggggaagaaactaaaacccaaacctaactacaacagtgtggatctctccgaagtggagtgggaagaccaggctgaatctctgagaacagccatgatcaatagggaaacaggtactctctcgatggatgtgaaggttccgatggataaagggaagcgagttcttttcctgaccaatgactacttcttcacggacatcagcgacacccctttcagtttgggggtggtgctgtcccggggccacggagaatacatccttctggggaacacgtctgtggaagaaggcctgcatgacttgcttcacccagacctggccctggccggtgactggatctactgcatcacagatattgacccagaccaccggaagctcagccagctagaggccatgatccgcttcctcaccaggaaggacccagacctggagtgtgacgaggagctggtccgggaggtgctgtttgacgcggtggtgacagcccccatggaagcctactggacagcgctggccctcaacatgtccgaggagtctgaacacgtggtggacatggccttcctgggcacccgggctggcctcctgagaagcagcttgttcgtgggctccgagaaggtctccgacaggaagttcctgacacctgaggacgaggccagcgtgttcaccctggaccgcttcccgctgtggtaccgccaggcctcagagcatcctgctggcagcttcgtcttcaacctccgctgggcagaaggaccagaaagtgcgggtgaacccatggtggtgacggcaagcacagctgtggcggtgaccgtggacaagaggacagccattgctgcagccgcgggcgtccaaatgaagctggaattcctccagcgcaaattctgggcggcaacgcggcagtgcagcactgtggatgggccgtgcacacagagctgcgaggacagtgatctggactgcttcgtcatcgacaacaacgggttcattctgatctccaagaggtcccgagagacgggaagatttctgggggaggtggatggtgctgtcctgacccagctgctcagcatgggggtgttcagccaagtgactatgtatgactatcaggccatgtgcaaaccctcgagtcaccaccacagtgcagcccagcccctggtcagcccaatttctgccttcttgacggcgaccaggtggctgctgcaggagctggtgctgttcctgctggagtggagtgtctggggctcctggtacgacagaggggccgaggccaaaagtgtcttccatcactcccacaaacacaagaagcaggacccgctgcagccctgcgacacggagtaccccgtgttcgtgtaccagccggccatccgggaggccaacgggatcgtggagtgcgggccctgccagaaggtatttgtggtgcagcagattcccaacagtaacctcctcctcctggtgacagaccccacctgtgactgcagcatcttcccaccagtgctgcaggaggcgacagaagtcaaatataatgcctctgtcaaatgtgaccggatgcgctcccagaagctccgccggcgaccagactcctgccacgccttccatccagaggagaatgcccaggactgcggcggcgcctcggacacctcagcctcgccgcccctactcctgctgcctgtgtgtgcctgggggctactgccccaactcctgcggtgacaccacccagcctgacctgtgttttggcaaggtgatccttccagagccatcccaaaaagtcagcactgacatgggatgcagctaactgcagttgggtcgcccccaggccaacgctcctctcaatcctgggctggtggcccctggctccggagaatgctggatggaacaggaaaccaatcacctggcaccactttcaagatgcttcatggtgcccggtaccatctgccctaggtctcaacatgagcatacttctgacctaaccttcctgtctcctcttcgggaagccagcgtgagctcagcttggaccaagacaaaataatttagttcttcctgtactccagagtccagacccagccaagaaagggtcagttgtttctgaccctttctgtcggagtggtctctggtagaacccaaggacttctgggtactgagaagcagcagcagaatgaggccaaatgcagagatgaggctaaggcaagaatatgccccaactaaagcatagattccccaaagtgaggctcatggtgggaggccactcaccttcctagctgctgctcgaaaaggttttgactgtgttggggtgggggttgggtaagggaatggtcaagactgagaaaggaatgaaatccattcaggaaatatcgacagggctacacgtgatgtccccaaactgctgctattgaagaacttcccaaaacttctttacaaagccctaaaggaaagtttgcatctatgaaaagccaataggctgagacatccaattgctgcatggaaattgatgtacattcaggggacggcaaaaatagctgtaaaatagtgaaaaa

SEQ ID NO: 4131 - DNA, 4920 bp, Homo sapiens
  source 1..4920: mol_type = unassigned DNA
atggctgtagctttagggacaaggaggagggacagagtgaagctatgggctgacaccttcggcggggacctgtataacactgtgaccaaatactcaggctctctcttgctgcagaagaagtacaaggatgtggagtccagtctgaagatcgaggaggtggatggcttggagctggtgaggaagttctcagaggacatggagaacatgctgcggaggaaagtcgaggcggtccagaatctggtggaagctgccgaggaggccgacctgaaccacgaattcaatgaatccctggtgttcgactattacaactcggtcctgatcaacgagagggacgagaagggcaacttcgtggagctgggcgccgagttcctcctggagtccaatgctcacttcagcaacctgccggtgaacacctccatcagcagcgtgcagctgcccaccaacgtgtacaacaaagacccagatattttaaatggagtctacatgtctgaagccttgaatgctgtcttcgtggagaacttccagagagacccaacgttgacctggcaatattttggcagtgcaactggattcttcaggatctatccaggtataaaatggacacctgatgagaatggagtcattacttttgactgccgaaaccgcggctggtacattcaagctgctacttctcccaaggacatagtgattttggtggacgtgagcggcagtatgaaggggctgaggatgactattgccaagcacaccatcaccaccatcttggacaccctgggggagaatgacttcattaatatcatagcgtacaatgactacgtccattacatcgagccttgttttaaagggatcctcgtccaggcggaccgagacaatcgagagcatttcaaactgctggtggaggagttgatggtcaaaggtgtgggggtcgtggaccaagccctgagagaagccttccagatcctgaagcagttccaagaggccaagcaaggaagcctctgcaaccaggccatcatgctcatcagcgacggcgccgtggaggactacgagccggtgtttgagaagtataactggccagactgtaaggtccgagttttcacttacctcattgggagagaagtgtcttttgctgaccgcatgaagtggattgcatgcaacaacaaaggctactacacgcagatctcaacgctggcggacacccaggagaacgtgatggaatacctgcacgtgctcagccgccccatggtcatcaaccacgaccacgacatcatctggacagaggcctacatggacagcaagctcctcagctcgcaggctcagagcctgacactgctcaccactgtggccatgccagtcttcagcaagaagaacgaaacgcgatcccatggcattctcctgggtgtggtgggctcagatgtggccctgagagagctgatgaagctggcgccccggtacaagcttggagtgcacggatacgcctttctgaacaccaacaatggctacatcctctcccatcccgacctccggcccctgtacagagaggggaagaaactaaaacccaaacctaactacaacagtgtggatctctccgaagtggagtgggaagaccaggctgaatctctgagaacagccatgatcaatagggaaacaggtactctctcgatggatgtgaaggttccgatggataaagggaagcgagttcttttcctgaccaatgactacttcttcacggacatcagcgacacccctttcagtttgggggtggtgctgtcccggggccacggagaatacatccttctggggaacacgtctgtggaagaaggcctgcatgacttgcttcacccagacctggccctggccggtgactggatctactgcatcacagatattgacccagaccaccggaagctcagccagctagaggccatgatccgcttcctcaccaggaaggacccagacctggagtgtgacgaggagctggtccgggaggtgctgtttgacgcggtggtgacagcccccatggaagcctactggacagcgctggccctcaacatgtccgaggagtctgaacacgtggtggacatggccttcctgggcacccgggctggcctcctgagaagcagcttgttcgtgggctccgagaaggtctccgacaggaagttcctgacacctgaggacgaggccagcgtgttcaccctggaccgcttcccgctgtggtaccgccaggcctcagagcatcctgctggcagcttcgtcttcaacctccgctgggcagaaggaccagaaagtgcgggtgaacccatggtggtgacggcaagcacagctgtggcggtgaccgtggacaagaggacagccattgctgcagccgcgggcgtccaaatgaagctggaattcctccagcgcaaattctgggcggcaacgcggcagtgcagcactgtggatgggccgtgcacacagagctgcgaggacagtgatctggactgcttcgtcatcgacaacaacgggttcattctgatctccaagaggtcccgagagacgggaagatttctgggggaggtggatggtgctgtcctgacccagctgctcagcatgggggtgttcagccaagtgactatgtatgactatcaggccatgtgcaaaccctcgagtcaccaccacagtgcagcccagcccctggtcagcccaatttctgccttcttgacggcgaccaggtggctgctgcaggagctggtgctgttcctgctggagtggagtgtctggggctcctggtacgacagaggggccgaggccaaaagtgtcttccatcactcccacaaacacaagaagcaggacccgctgcagccctgcgacacggagtaccccgtgttcgtgtaccagccggccatccgggaggccaacgggatcgtggagtgcgggccctgccagaaggtatttgtggtgcagcagattcccaacagtaacctcctcctcctggtgacagaccccacctgtgactgcagcatcttcccaccagtgctgcaggaggcgacagaagtcaaatataatgcctctgtcaaatgtgaccggatgcgctcccagaagctccgccggcgaccagactcctgccacgccttccatccagaggagaatgcccaggactgcggcggcgcctcggacacctcagcctcgccgcccctactcctgctgcctgtgtgtgcctgggggctactgccccaactcctgcggtgacaccacccagcctgacctgtgttttggcaaggtgatccttccagagccatcccaaaaagtcagcactgacatgggatgcagctaactgcagttgggtcgcccccaggccaacgctcctctcaatcctgggctggtggcccctggctccggagaatgctggatggaacaggaaaccaatcacctggcaccactttcaagatgcttcatggtgcccggtaccatctgccctaggtctcaacatgagcatacttctgacctaaccttcctgtctcctcttcgggaagccagcgtgagctcagcttggaccaagacaaaataatttagttcttcctgtactccagagtccagacccagccaagaaagggtcagttgtttctgaccctttctgtcggagtggtctctggtagaacccaaggacttctgggtactgagaagcagcagcagaatgaggccaaatgcagagatgaggctaaggcaagaatatgccccaactaaagcatagattccccaaagtgaggctcatggtgggaggccactcaccttcctagctgctgctcgaaaaggttttgactgtgttggggtgggggttgggtaagggaatggtcaagactgagaaaggaatgaaatccattcaggaaatatcgacagggctacacgtgatgtccccaaactgctgctattgaagaacttcccaaaacttctttacaaagccctaaaggaaagtttgcatctatgaaaagccaataggctgagacatccaattgctgcatggaaattgatgtacattcaggggacggcaaaaatagctgtaaaatagtgaaaaagagcagtggttgtgctcttttctggccaatgatttacaaaagaatctacttgactctgtccctggagtgaaatccttagggttggaacttgtgggaacattccaacttgctaagcagggtccactgggagggaagctctatctgggaactcacccccagcgcacacacatctcccccagggtcccaaggccccgcagcttcctcccccgaccaaaccccaagacctggatcccaggagacaacagtctccacagtgagagcaacattaagggcaaagccatggagaaatgtgggagaggccggcctcaaatctttccatttaacaaaccccagtgatgggtatggacagcatgcagggcttttggggcgcttccccccgctcctccatcaccctcagcctccacacttcaaagttcaagttcaaagctgttcaagtttcctaccagcaaatagccctaacttgcctctagagtaggccaaatgccaactctgtaaaacacacttacattatcggttacagaatgtcactcttaccgtcatgtcttgcaacaaccctgtgagggcagtattaatgcccccttacagcagaagacactgcagctcgaagacagcttaagtggcagaataatgctagaacagctaaggtttacatgtaccaaataacatgtttcagctcattccatcctcacaacagccccctgaaagtgggtactatcattagtcccatgttatagaaactgcagcagagttgaaaattgcctccaaattaccggaagagtgtatgaagattgaatgtgatgtattcacgtaacatgcttgaaactgcctggcatatactaaacgctaaataaatacatgctaactgcgatcatta

SEQ ID NO: 4132 - DNA, 2876 bp, Homo sapiens
  source 1..2876: mol_type = unassigned DNA
ggagctggtccgggaggtgctgtttgacgcggtggtgacagcccccatggaagcctactggacagcgctggccctcaacatgtccgaggagtctgaacacgtggtggacatggccttcctgggcacccgggctggcctcctgagaagcagcttgttcgtgggctccgagaaggtctccgacaggaagttcctgacacctgaggacgaggccagcgtgttcaccctggaccgcttcccgctgtggtaccgccaggcctcagagcatcctgctggcagcttcgtcttcaacctccgctgggcagaaggaccagaaagtgcgggtgaacccatggtggtgacggcaagcacagctgtggcggtgaccgtggacaagaggacagccattgctgcagccgcgggcgtccaaatgaagctggaattcctccagcgcaaattctgggcggcaacgcggcagtgcagcactgtggatgggccgtgcacacagagctgcgaggacagtgatctggactgcttcgtcatcgacaacaacgggttcattctgatctccaagaggtcccgagagagtgactatgtatgactatcaggccatgtgcaaaccctcgagtcaccaccacagtgcagcccagcccctggtcagcccaatttctgccttcttgacggcgaccaggtggctgctgcaggagctggtgctgttcctgctggagtggagtgtctggggctcctggtacgacagaggggccgaggccaaaagtgtcttccatcactcccacaaacacaagaagcaggacccgctgcagccctgcgacacggagtaccccgtgttcgtgtaccagccggccatccgggaggccaacgggatcgtggagtgcgggccctgccagaaggtatttgtggtgcagcagattcccaacagtaacctcctcctcctggtgacagaccccacctgtgactgcagcatcttcccaccagtgctgcaggaggcgacagaagtcaaatataatgcctctgtcaaatgtgaccggatgcgctcccagaagctccgccggcgaccagactcctgccacgccttccatccagaggagaatgcccaggactgcggcggcgcctcggacacctcagcctcgccgcccctactcctgctgcctgtgtgtgcctgggggctactgccccaactcctgcggtgacaccacccagcctgacctgtgttttggcaaggtgatccttccagagccatcccaaaaagtcagcactgacatgggatgcagctaactgcagttgggtcgcccccaggccaacgctcctctcaatcctgggctggtggcccctggctccggagaatgctggatggaacaggaaaccaatcacctggcaccactttcaagatgcttcatggtgcccggtaccatctgccctaggtctcaacatgagcatacttctgacctaaccttcctgtctcctcttcgggaagccagcgtgagctcagcttggaccaagacaaaataatttagttcttcctgtactccagagtccagacccagccaagaaagggtcagttgtttctgaccctttctgtcggagtggtctctggtagaacccaaggacttctgggtactgagaagcagcagcagaatgaggccaaatgcagagatgaggctaaggcaagaatatgccccaactaaagcatagattccccaaagtgaggctcatggtgggaggccactcaccttcctagctgctgctcgaaaaggttttgactgtgttggggtgggggttgggtaagggaatggtcaagactgagaaaggaatgaaatccattcaggaaatatcgacagggctacacgtgatgtccccaaactgctgctattgaagaacttcccaaaacttctttacaaagccctaaaggaaagtttgcatctatgaaaagccaataggctgagacatccaattgctgcatggaaattgatgtacattcaggggacggcaaaaatagctgtaaaatagtgaaaaagagcagtggttgtgctcttttctggccaatgatttacaaaagaatctacttgactctgtccctggagtgaaatccttagggttggaacttgtgggaacattccaacttgctaagcagggtccactgggagggaagctctatctgggaactcacccccagcgcacacacatctcccccagggtcccaaggccccgcagcttcctcccccgaccaaaccccaagacctggatcccaggagacaacagtctccacagtgagagcaacattaagggcaaagccatggagaaatgtgggagaggccggcctcaaatctttccatttaacaaaccccagtgatgggtatggacagcatgcagggcttttggggcgcttccccccgctcctccatcaccctcagcctccacacttcaaagttcaagttcaaagctgttcaagtttcctaccagcaaatagccctaacttgcctctagagtaggccaaatgccaactctgtaaaacacacttacattatcggttacagaatgtcactcttaccgtcatgtcttgcaacaaccctgtgagggcagtattaatgcccccttacagcagaagacactgcagctcgaagacagcttaagtggcagaataatgctagaacagctaaggtttacatgtaccaaataacatgtttcagctcattccatcctcacaacagccccctgaaagtgggtactatcattagtcccatgttatagaaactgcagcagagttgaaaattgcctccaaattaccggaagagtgtatgaagattgaatgtgatgtattcacgtaacatgcttgaaactgcctggcatatactaaacgctaaataaatacatgctaactgcga

SEQ ID NO: 4133 - DNA, 1498 bp, Homo sapiens
  source 1..1498: mol_type = unassigned DNA
aacttgactctatttttttctctccccgtctcttccctggccttgccctctctctttctgccctgtagccgcgggcgtccaaatgaagctggaattcctccagcgcaaattctgggcggcaacgcggcaggatctggactgcttcgtcatcgacaacaacgggttcattctgatctccaagaggtcccgagagacgggaagatttctgggggaggtggatggtgctgtcctgacccagctgctcagcatgggggtgttcagccaagtgactatgtatgactatcaggccatgtgcaaaccctcgagtcaccaccacagtgcagcccagcccctggtcagcccaatttctgccttcttgacggcgaccaggtggctgctgcaggagctggtgctgttcctgctggagtggagtgtctggggctcctggtacgacagaggggccgaggccaaaagtgtcttccatcactcccacaaacacaagaagcaggacccgctgcagccctgcgacacggagtaccccgtgttcgtgtaccagccggccatccgggaggccaacgggatcgtggagtgcgggccctgccagaaggtatttgtggtgcagcagattcccaacagtaacctcctcctcctggtgacagaccccacctgtgactgcagcatcttcccaccagtgctgcaggaggcgacagaagtcaaatataatgcctctgtcaaatgtgaccggatgcgctcccagaagctccgccggcgaccagactcctgccacgccttccatccagaggagaatgcccaggactgcggcggcgcctcggacacctcagcctcgccgcccctactcctgctgcctgtgtgtgcctgggggctactgccccaactcctgcggtgacaccacccagcctgacctgtgttttggcaaggtgatccttccagagccatcccaaaaagtcagcactgacatgggatgcagctaactgcagttgggtcgcccccaggccaacgctcctctcaatcctgggctggtggcccctggctccggagaatgctggatggaacaggaaaccaatcacctggcaccactttcaagatgcttcatggtgcccggtaccatctgccctaggtctcaacatgagcatacttctgacctaaccttcctgtctcctcttcgggaagccagcgtgagctcagcttggaccaagacaaaataatttagttcttcctgtactccagagtccagacccagccaagaaagggtcagttgtttctgaccctttctgtcggagtggtctctggtagaacccaaggacttctgggtactgagaagcagcagcagaatgaggccaaatgcagagatgaggctaaggcaagaatatgccccaactaaagcatagattccccaaagtgaggctcatggtgggaggccactcaccttcctagctgctgctcgaaaaggttttgactgtgttggggtgggggttgggtaagggaatggtcaagactg

SEQ ID NO: 4134 - DNA, 1498 bp, Homo sapiens; identical to SEQ ID NO: 4133
  source 1..1498: mol_type = unassigned DNA

SEQ ID NO: 4135 - DNA, 1619 bp, Homo sapiens
  source 1..1619: mol_type = unassigned DNA
gtagccgcgggcgtccaaatgaagctggaattcctccagcgcaaattctgggcggcaacgcggcaggatctggactgcttcgtcatcgacaacaacgggttcattctgatctccaagaggtcccgagagagtgactatgtatgactatcaggccatgtgcaaaccctcgagtcaccaccacagtgcagcccagcccctggtcagcccaatttctgccttcttgacggcgaccaggtggctgctgcaggagctggtgctgttcctgctggagtggagtgtctggggctcctggtacgacagaggggccgaggccaaaagtgtcttccatcactcccacaaacacaagaagcaggacccgctgcagccctgcgacacggagtaccccgtgttcgtgtaccagccggccatccgggaggccaacgggatcgtggagtgcgggccctgccagaaggtatttgtggtgcagcagattcccaacagtaacctcctcctcctggtgacagaccccacctgtgactgcagcatcttcccaccagtgctgcaggaggcgacagaagtcaaatataatgcctctgtcaaatgtgaccggatgcgctcccagaagctccgccggcgaccagactcctgccacgccttccatccagaggagaatgcccaggactgcggcggcgcctcggacacctcagcctcgccgcccctactcctgctgcctgtgtgtgcctgggggctactgccccaactcctgcggtgacaccacccagcctgacctgtgttttggcaaggtgatccttccagagccatcccaaaaagtcagcactgacatgggatgcagctaactgcagttgggtcgcccccaggccaacgctcctctcaatcctgggctggtggcccctggctccggagaatgctggatggaacaggaaaccaatcacctggcaccactttcaagatgcttcatggtgcccggtaccatctgccctaggtctcaacatgagcatacttctgacctaaccttcctgtctcctcttcgggaagccagcgtgagctcagcttggaccaagacaaaataatttagttcttcctgtactccagagtccagacccagccaagaaagggtcagttgtttctgaccctttctgtcggagtggtctctggtagaacccaaggacttctgggtactgagaagcagcagcagaatgaggccaaatgcagagatgaggctaaggcaagaatatgccccaactaaagcatagattccccaaagtgaggctcatggtgggaggccactcaccttcctagctgctgctcgaaaaggttttgactgtgttggggtgggggttgggtaagggaatggtcaagactgagaaaggaatgaaatccattcaggaaatatcgacagggctacacgtgatgtccccaaactgctgctattgaagaacttcccaaaacttctttacaaagccctaaaggaaagtttgcatctatgaaaagccaataggctgagacatccaattgctgcatggaaattgatgtacattcaggggacggcaaaaatagctgtaaaatagtgaaaaagagcagtggttgtgctcttttctggccaatgatttacaaaagaa

SEQ ID NO: 4136 - DNA, 1835 bp, Homo sapiens
  source 1..1835: mol_type = unassigned DNA
cgagggaaggcaggaaggaggcagccgaaggccgagctgggtggctggaccgggtgctggctgcgccgcgctgctttcggctcccacggcctctcccatgcgctgagggagcccggctgggccgggccggcggcgggaggggaggctcctctccatggtccagaagaccagcatgtcccggggcccttacccaccctcccaggagatccccatggaggtcttcgaccccagcccgcagggcaaatacagcaagaggaaagggcgattcaaacggtcagatgggagcacgtcctcggataccacatccaacagctttgtccgccagggctcagcggagtcctacaccagccgtccatcagactctgatgtatctctggaggaggaccgggaagccttaaggaaggaagcagagcgccaggcattagcgcagctcgagaaggccaagaccaagccagtggcatttgctgtgcggacaaatgttggctacaatccgtctccaggggatgaggtgcctgtgcagggagtggccatcaccttcgagcccaaagacttcctgcacatcaaggagaaatacaataatgactggtggatcgggcggctggtgaaggagggctgtgaggttggcttcattcccagccccgtcaaactggacagccttcgcctgctgcaggaacagaagctgcgccagaaccgcctcggctccagcaaatcaggcgataactccagttccagtctgggagatgtggtgactggcacccgccgccccacaccccctgccagtggtaatgaaatgactaacttagcctttgaactagaccccctagagttagaggaggaagaggctgagcttggtgagcagagtggctctgccaagactagtgttagcagtgtcaccaccccgccaccccatggcaaacgcatccccttctttaagaagacagagcatgtgcccccctatgacgtggtgccttccatgaggcccatcatcctggtgggaccgtcgctcaagggctacgaggttacagacatgatgcagaaagctttatttgacttcttgaagcatcggtttgatggcaggatctccatcactcgtgtgacggcagatatttccctggctaagcgctcagttctcaacaaccccagcaaacacatcatcattgagcgctccaacacacgctccagcctggctgaggtgcagagtgaaatcgagcgaatcttcgagctggcccggacccttcagttggtcgctctggatgctgacaccatcaatcacccagcccagctgtccaagacctcgctggcccccatcattgtttacatcaagatcacctctcccaaggtacttcaaaggctcatcaagtcccgaggaaagtctcagtccaaacacctcaatgtccaaatagcggcctcggaaaagctggcacagtgcccccctgaaatgtttgacatcatcctggatgagaaccaattggaggatgcctgcgagcatctggcggagtacttggaagcctattggaaggccacacacccgcccagcagcacgccacccaatccgctgctgaaccgcaccatggctaccgcagccctggctgccagccctgcccctgtctccaacctccaggtacaggtgctcacctcgctcaggagaaacctcggcttctggggcgggctggagtcctcacagcggggcagtgtggtgccccaggagcaggaacatgccatgtagtgggcgccctgcccgtcttccctcctgctctggggtcggaactggagtgcagggaacatggaggaggaagggaagagctttattttgtaaaaaaataagatgagcggca

SEQ ID NO: 4137 - DNA, 3343 bp, Homo sapiens
  source 1..3343: mol_type = unassigned DNA
cgagggaaggcaggaaggaggcagccgaaggccgagctgggtggctggaccgggtgctggctgcgccgcgctgctttcggctcccacggcctctcccatgcgctgagggagcccggctgggccgggccggcggcgggaggggaggctcctctccatggtccagaagaccagcatgtcccggggcccttacccaccctcccaggagatccccatggaggtcttcgaccccagcccgcagggcaaatacagcaagaggaaagggcgattcaaacggtcagatgggagcacgtcctcggataccacatccaacagctttgtccgccagggctcagcggagtcctacaccagccgtccatcagactctgatgtatctctggaggaggaccgggaagccttaaggaaggaagcagagcgccaggcattagcgcagctcgagaaggccaagaccaagccagtggcatttgctgtgcggacaaatgttggctacaatccgtctccaggggatgaggtgcctgtgcagggagtggccatcaccttcgagcccaaagacttcctgcacatcaaggagaaatacaataatgactggtggatcgggcggctggtgaaggagggctgtgaggttggcttcattcccagccccgtcaaactggacagccttcgcctgctgcaggaacagaagctgcgccagaaccgcctcggctccagcaaatcaggcgataactccagttccagtctgggagatgtggtgactggcacccgccgccccacaccccctgccagtgccaaacagaagcagaagtcgacagagcatgtgcccccctatgacgtggtgccttccatgaggcccatcatcctggtgggaccgtcgctcaagggctacgaggttacagacatgatgcagaaagctttatttgacttcttgaagcatcggtttgatggcaggatctccatcactcgtgtgacggcagatatttccctggctaagcgctcagttctcaacaaccccagcaaacacatcatcattgagcgctccaacacacgctccagcctggctgaggtgcagagtgaaatcgagcgaatcttcgagctggcccggacccttcagttggtcgctctggatgctgacaccatcaatcacccagcccagctgtccaagacctcgctggcccccatcattgtttacatcaagatcacctctcccaaggtacttcaaaggctcatcaagtcccgaggaaagtctcagtccaaacacctcaatgtccaaatagcggcctcggaaaagctggcacagtgcccccctgaaatgtttgacatcatcctggatgagaaccaattggaggatgcctgcgagcatctggcggagtacttggaagcctattggaaggccacacacccgcccagcagcacgccacccaatccgctgctgaaccgcaccatggctaccgcagccctggctgccagccctgcccctgtctccaacctccagggaccctaccttgcttccggggaccagccactggaacgggccaccggggagcacgccagcatgcacgagtacccaggggagctgggccagcccccaggcctttaccccagcagccacccaccaggccgggcaggcacgctacgggcactgtcccgccaagacacttttgatgccgacacccccggcagccgaaactctgcctacacggagctgggagactcatgtgtggacatggagactgacccctcagaggggccagggcttggagaccctgcagggggcggcacgcccccagcccgacagggatcctgggaggacgaggaagaagactatgaggaagagctgaccgacaaccggaaccggggccggaataaggcccgctactgcgctgagggtgggggtccagttttggggcgcaacaagaatgagctggagggctggggacgaggcgtctacattcgctgagaggcaggggccacacggcgggaggaagggctctgagcccaggggaggggagggagcgaggggctcacacctgacatgtattcgcctccagggggcgctgtctccctcctttcagatgcctttgctcaaagcttggggtttctttggtgttaccatcccagctcccgggaggcccttaagccccagctgtcggtttttacctgcctgttgtggatggatgggggatacccacctttctgaagtgtcccctttctcccatcttaaggggctctcctccctcaccctcctagagaaaaggtgcacttccttaactctttctactcggggccctaagtgacggtcctaagtgggatggctctccttctcccaagctgcagtactggggaagggctgggcgcttttcctggaaagggaggccacagattctttcccatgggggctctcttccccagaccccagatccaaggtccctcaccctgcctgccccttcctcccagcttcctggcagcatcgtctggtcggtgaaagccatagcatggacaccccatggggagcttgtcttggggagggttctgggtggaagctggcaggcatacagcaccctctaccctccgtggccatggcaacgtccagggcccagaaccctgaggagtgagcggccgagacgctgctccccaccccccacctccatgcctcagcctttgcctaccccaggaatgagcttggcctccaacatcccttgcctgctgccattagtagagggggcccctctgcatctgagccccccatccctgtgccacctgggtgtggagcccatggaacactctggtccgcctcattttaaaccaaaaaactgctccttcaccctcaccctgaggccccaggggagaggacccgtgggatggtgcccaggggttgccttgggacctcggatctcctctggggggcttggctgctgctgttgctgctctgtatttgcctctcgtgattctgtttgttacccatgttcacttcccccaggagaggccttggtaccccctctcccctggggcatccctttgccttggcatccctgtagcccagcaaccctgcccctccccagcatcccagctgggccagagagagccgagtgtgccaacaaggactggggcctgcccggctgcccgcctcagggatgggcacctcatgcctgtctcgccacctcctgtgccaatgtcccaccctccacctgggggtggggtgcagcttccacttactgattagaagacaccactgccctcccttcccccctccctgtctggtgtcctgtgcccccatctgtctgtctatatttgtctgtactcccctaggagaagtattttgccatatataaaaccactgtcctgtcctttg

SEQ ID NO: 4138 - DNA, 1699 bp, Homo sapiens
  source 1..1699: mol_type = unassigned DNA
gagggaaggcaggaaggaggcagccgaaggccgagctgggtggctggaccgggtgctggctgcgccgcgctgctttcggctcccacggcctctcccatgcgctgagggagcccggctgggccgggccggcggcgggaggggaggctcctctccatggtccagaagaccagcatgtcccggggcccttacccaccctcccaggagatccccatggaggtcttcgaccccagcccgcagggcaaatacagcaagaggaaagggcgattcaaacggtcagatgggagcacgtcctcggataccacatccaacagctttgtccgccagggctcagcggagtcctacaccagccgtccatcagactctgatgtatctctggaggaggaccgggaagccttaaggaaggaagcagagcgccaggcattagcgcagctcgagaaggccaagaccaagccagtggcatttgctgtgcggacaaatgttggctacaatccgtctccaggggatgaggtgcctgtgcagggagtggccatcaccttcgagcccaaagacttcctgcacatcaaggagaaatacaataatgactggtggatcgggcggctggtgaaggagggctgtgaggttggcttcattcccagccccgtcaaactggacagccttcgcctgctgcaggaacagaagctgcgccagaaccgcctcggctccagcaaatcaggcgataactccagttccagtctgggagatgtggtgactggcacccgccgccccacaccccctgccagtgccaaacagaagcagaagtcgacagagcatgtgcccccctatgacgtggtgccttccatgaggcccatcatcctggtgggaccgtcgctcaagggctacgaggttacagacatgatgcagaaagctttatttgacttcttgaagcatcggtttgatggcaggatctccatcactcgtgtgacggcagatatttccctggctaagcgctcagttctcaacaaccccagcaaacacatcatcattgagcgctccaacacacgctccagcctggctgaggtgcagagtgaaatcgagcgaatcttcgagctggcccggacccttcagttggtcgctctggatgctgacaccatcaatcacccagcccagctgtccaagacctcgctggcccccatcattgtttacatcaagatcacctctcccaaggtacttcaaaggctcatcaagtcccgaggaaagtctcagtccaaacacctcaatgtccaaatagcggcctcggaaaagctggcacagtgcccccctgaaatgtttgacatcatcctggatgagaaccaattggaggatgcctgcgagcatctggcggagtacttggaagcctattggaaggccacacacccgcccagcagcacgccacccaatccgctgctgaaccgcaccatggctaccgcagccctggctgccagccctgcccctgtctccaacctccaggtacaggtgctcacctcgctcaggagaaacctcggcttctggggcgggctggagtcctcacagcggggcagtgtggtgccccaggagcaggaacatgccatgtagtgggcgccctgcccgtcttccctcctgctctggggtcggaactggagtgcagggaacatggaggaggaagggaagagctttattttgtaaaaaaataagatgagcggca

SEQ ID NO: 4139 - DNA, 1417 bp, Homo sapiens
  source 1..1417: mol_type = unassigned DNA
aggcactgagggtgccgggatggaggcgcccagccggaccgtggtggtgggctcagcggagtcctacaccagccgtccatcagactctgatgtatctctggaggaggaccgggaagccttaaggaaggaagcagagcgccaggcattagcgcagctcgagaaggccaagaccaagccagtggcatttgctgtgcggacaaatgttggctacaatccgtctccaggggatgaggtgcctgtgcagggagtggccatcaccttcgagcccaaagacttcctgcacatcaaggagaaatacaataatgactggtggatcgggcggctggtgaaggagggctgtgaggttggcttcattcccagccccgtcaaactggacagccttcgcctgctgcaggaacagaagctgcgccagaaccgcctcggctccagcaaatcaggcgataactccagttccagtctgggagatgtggtgactggcacccgccgccccacaccccctgccagtgactctccggtccagacagagcatgtgcccccctatgacgtggtgccttccatgaggcccatcatcctggtgggaccgtcgctcaagggctacgaggttacagacatgatgcagaaagctttatttgacttcttgaagcatcggtttgatggcaggatctccatcactcgtgtgacggcagatatttccctggctaagcgctcagttctcaacaaccccagcaaacacatcatcattgagcgctccaacacacgctccagcctggctgaggtgcagagtgaaatcgagcgaatcttcgagctggcccggacccttcagttggtcgctctggatgctgacaccatcaatcacccagcccagctgtccaagacctcgctggcccccatcattgtttacatcaagatcacctctcccaaggtacttcaaaggctcatcaagtcccgaggaaagtctcagtccaaacacctcaatgtccaaatagcggcctcggaaaagctggcacagtgcccccctgaaatgtttgacatcatcctggatgagaaccaattggaggatgcctgcgagcatctggcggagtacttggaagcctattggaaggccacacacccgcccagcagcacgccacccaatccgctgctgaaccgcaccatggctaccgcagccctggctgccagccctgcccctgtctccaacctccaggtacaggtgctcacctcgctcaggagaaacctcggcttctggggcgggctggagtcctcacagcggggcagtgtggtgccccaggagcaggaacatgccatgtagtgggcgccctgcccgtcttccctcctgctctggggtcggaactggagtgcagggaacatggaggaggaagggaagagctttattttgtaaaaaaataagatgagcggc

SEQ ID NO: 4140 - DNA, 3384 bp, Homo sapiens
  source 1..3384: mol_type = unassigned DNA
tctggctctctctattttcagggctcagcggagtcctacaccagccgtccatcagactctgatgtatctctggaggaggaccgggaagccttaaggaaggaagcagagcgccaggcattagcgcagctcgagaaggccaagaccaagccagtggcatttgctgtgcggacaaatgttggctacaatccgtctccaggggatgaggtgcctgtgcagggagtggccatcaccttcgagcccaaagacttcctgcacatcaaggagaaatacaataatgactggtggatcgggcggctggtgaaggagggctgtgaggttggcttcattcccagccccgtcaaactggacagccttcgcctgctgcaggaacagaagctgcgccagaaccgcctcggctccagcaaatcaggcgataactccagttccagtctgggagatgtggtgactggcacccgccgccccacaccccctgccagtggtaagagccatcgccatgcaacagagcatgtgcccccctatgacgtggtgccttccatgaggcccatcatcctggtgggaccgtcgctcaagggctacgaggttacagacatgatgcagaaagctttatttgacttcttgaagcatcggtttgatggcaggatctccatcactcgtgtgacggcagatatttccctggctaagcgctcagttctcaacaaccccagcaaacacatcatcattgagcgctccaacacacgctccagcctggctgaggtgcagagtgaaatcgagcgaatcttcgagctggcccggacccttcagttggtcgctctggatgctgacaccatcaatcacccagcccagctgtccaagacctcgctggcccccatcattgtttacatcaagatcacctctcccaaggtacttcaaaggctcatcaagtcccgaggaaagtctcagtccaaacacctcaatgtccaaatagcggcctcggaaaagctggcacagtgcccccctgaaatgtttgacatcatcctggatgagaaccaattggaggatgcctgcgagcatctggcggagtacttggaagcctattggaaggccacacacccgcccagcagcacgccacccaatccgctgctgaaccgcaccatggctaccgcagccctggctgccagccctgcccctgtctccaacctccagggaccctaccttgcttccggggaccagccactggaacgggccaccggggagcacgccagcatgcacgagtacccaggggagctgggccagcccccaggcctttaccccagcagccacccaccaggccgggcaggcacgctacgggcactgtcccgccaagacacttttgatgccgacacccccggcagccgaaactctgcctacacggagctgggagactcatgtgtggacatggagactgacccctcagaggggccagggcttggagaccctgcagggggcggcacgcccccagcccgacagggatcctgggaggacgaggaagaagactatgaggaagagctgaccgacaaccggaaccggggccggaataaggcccgctactgcgctgagggtgggggtccagttttggggcgcaacaagaatgagctggagggctggggacgaggcgtctacattcgctgagaggcaggggccacacggcgggaggaagggctctgagcccaggggaggggagggagcgaggggctcacacctgacatgtattcgcctccagggggcgctgtctccctcctttcagatgcctttgctcaaagcttggggtttctttggtgttaccatcccagctcccgggaggcccttaagccccagctgtcggtttttacctgcctgttgtggatggatgggggatacccacctttctgaagtgtcccctttctcccatcttaaggggctctcctccctcaccctcctagagaaaaggtgcacttccttaactctttctactcggggccctaagtgacggtcctaagtgggatggctctccttctcccaagctgcagtactggggaagggctgggcgcttttcctggaaagggaggccacagattctttcccatgggggctctcttccccagaccccagatccaaggtccctcaccctgcctgccccttcctcccagcttcctggcagcatcgtctggtcggtgaaagccatagcatggacaccccatggggagcttgtcttggggagggttctgggtggaagctggcaggcatacagcaccctctaccctccgtggccatggcaacgtccagggcccagaaccctgaggagtgagcggccgagacgctgctccccaccccccacctccatgcctcagcctttgcctaccccaggaatgagcttggcctccaacatcccttgcctgctgccattagtagagggggcccctctgcatctgagccccccatccctgtgccacctgggtgtggagcccatggaacactctggtccgcctcattttaaaccaaaaaactgctccttcaccctcaccctgaggccccaggggagaggacccgtgggatggtgcccaggggttgccttgggacctcggatctcctctggggggcttggctgctgctgttgctgctctgtatttgcctctcgtgattctgtttgttacccatgttcacttcccccaggagaggccttggtaccccctctcccctggggcatccctttgccttggcatccctgtagcccagcaaccctgcccctccccagcatcccagctgggccagagagagccgagtgtgccaacaaggactggggcctgcccggctgcccgcctcagggatgggcacctcatgcctgtctcgccacctcctgtgccaatgtcccaccctccacctgggggtggggtgcagcttccacttactgattagaagacaccactgccctcccttcccccctccctgtctggtgtcctgtgcccccatctgtctgtctatatttgtctgtactcccctaggagaagtattttgccatatataaaaccactgtcctgtcctttgtggctgcctcccaagcctgcttctttgtcctcgccacatagtcgtcagcgtaggcacctgggagctgctgatatgcacggggagttgaaagggtgggtgcctgaagatgttgtgccctgagtcattgactcaaaagaaaagatgatcctttgattttggccctctgatgtattgtgcccaagccaggagctgcttgggcagtcccagctccacactggccctgagccccttcacttacctgtctctccacaagtagagccaaaggcaatgggaagctcaatgttgctcagtgggtgagatccagacccactggtgcaatgtcttaaatacacatgactgtttttc

SEQ ID NO: 4141 - DNA, 3524 bp, Homo sapiens
  source 1..3524: mol_type = unassigned DNA
cacctcctcccctcgtcgcctgcccaccctctgctcctctcctggcgccggggaccctgcccctttgcgccttttcctggctctgcctcggcttccatttttctctgcttccgaaaagccagtggggaagggcgggggagacctgccagtcctcccagacttctcccgggttgctccagctggccctcctcgccccttcccgggagaggcacatggagagacatgaatcaggggagtggactggacctgctgaagatctcatatggaaaaggagccagaaggaaaaacagatttaaaggatctgatggaagcacgtcatctgatactacctcaaatagttttgttcgccagggttcggcagactcctacactagccgtccatccgattccgatgtatctctggaggaggaccgggaggcagtgcgcagagaagcggagcggcaggcccaggcacagttggaaaaagcaaagacaaagcccgttgcatttgcggttcggacaaatgtcagctacagtgcggcccatgaagatgatgttccagtgcctggcatggccatctcattcgaagcaaaagattttctgcatgttaaggaaaaatttaacaatgactggtggatagggcgattggtaaaagaaggctgtgaaatcggattcattccaagcccagtcaaactagaaaacatgaggctgcagcatgaacagagagccaagcaagggaaattctactccagtaaatcaggaggaaattcatcatccagtttgggtgacatagtacctagttccagaaaatcaacacctccatcatctgctatagacatagatgctactggcttagatgcagaagaaaatgatattccagcaaaccaccgctcccctaaacccagtgcaaacagtgtaacgtcaccccactccaaagagaaaagaatgcccttctttaagaagacagagcacactcctccgtatgatgtggtaccttccatgcgaccagtggtcctagtgggcccttctctgaagggctacgaggtcacagatatgatgcaaaaagcgctgtttgattttttaaaacacagatttgaagggcggatatccatcacaagggtcaccgctgacatctcgcttgccaaacgctcggtattaaacaatcccagtaagcacgcaataatagaaagatccaacacaaggtcaagcttagcggaagttcagagtgaaatcgaaaggatttttgaacttgcaagaacattgcagttggtggtccttgacgcggatacaattaatcatccagctcaactcagtaaaacctccttggcccctattatagtatatgtaaagatttcttctcctaaggttttacaaaggttaataaaatctcgagggaaatctcaagctaaacacctcaacgtccagatggtagcagctgataaactggctcagtgtcctccagagctgttcgatgtgatcttggatgagaaccagcttgaggatgcctgtgagcaccttgccgactatctggaggcctactggaaggccacccatcctcccagcagtagcctccccaaccctctccttagccgtacattagccacttcaagtctgcctcttagccccaccctagcctctaattcacagggttctcaaggtgatcagaggactgatcgctccgctcctatccgttctgcttcccaagctgaagaagaacctagtgtggaaccagtcaagaaatcccagcaccgctcttcctcctcagccccacaccacaaccatcgcagtgggacaagtcgcggcctctccaggcaagagacatttgactcggaaacccaggagagtcgagactctgcctacgtagagccaaaggaagattattcccatgaccacgtggaccactatgcctcacaccgtgaccacaaccacagagacgagacccacgggagcagtgaccacagacacagggagtcccggcaccgttcccgggacgtggatcgagagcaggaccacaacgagtgcaacaagcagcgcagccgtcataaatccaaggatcgctactgtgaaaaggatggagaagtgatatcaaaaaaacggaatgaggctggggagtggaacagggatgtttacatccgccaatgagttttgcccgtttgtgtttttttttttttttttttgaagtcttgtataactaacagcatccccaaaacaaagtctttggggtctacactgcaatcatatgtgatctgtcttgtaatattttgtattattgctgttgcttgaatagcaatagcatggatagagtattgagatactttttcttttgtaagtgctacataaattggcctggtatggctgcagtcctccggttgcatactggactcttcaaaaactgttttgggtagctgccacttgaacaaaatctgttgccacccaggtgatgttagtgttttaagaaatgtagttgatgtatccaacaagccagaatcagcacagataaaaagtggaatttcttgtttctccagatttttaatacgttaatacgcaggcatctgatttgcatattcattcatggaccactgtttcttgcttgtacctctggctgactaaatttggggacagattcagtcttgccttacacaaaggggatcataaagttagaatctattttctatgtactagtactgtgtactgtatagacagtttgtaaatgttatttctgcaaacaaacaccttcttattatatatataatatatatatatatcagtttgatcacactattttagagtcttaatgccaagtcagcagatttgctttatgaattacagggactagaaatgcccacattcaggaaatttgtaataacattgtctagacacctatcctcattctagtagaaagtgtgtacatactgtaaatatgtgtgattgcttgacttgaaaaggtttgaattctgaatgttataccatccttgtaagtaagtttgtaatttccaccataaattatggtaaatataaaactccagaggttgttctactccatacagttcacactgattgtgacacattcttagtagctagtgtctgttctagtcactgcactggagtctacgagccggaactcgctatatgcacgtgtgtgtgtccgtatgtaagaaagtgtgcaccgagtgactgaatggttgagatgaattggaatgctgaagactaacgaagaaactagagactgatatcgagcattctgcccacctcgctctgtatttaattaattgtgctatatgttgctttaacaacccattgagcagtcagggaatgtgagtaagcttgctgccaaaggtaactaggaaagcattcatctgctgcctccttgtttttgctcctagagagtgaaaatacaggcaattttactgtgagtgtttcactggaaatgtacaatctttgtgtgttagagtatttgttttagtaagaaatgtttacacagcttgtggaattatttcgtgggaaaataaatttttataacttctcccacttcaatttctaacctt

SEQ ID NO: 4142 - DNA, 3446 bp, Homo sapiens
  source 1..3446: mol_type = unassigned DNA
gaggaggaggggacccgccgccgggggctggctgcttcgctccgagccgacttttcgccaatggtccaaagggacatgtccaagtcgcctcccacagcggcggcggcggtggcgcaggagatccagatggaactgctagagaacgtggctcccgcgggggcgctcggagccgccgcacagtcatatggaaaaggagccagaaggaaaaacagatttaaaggatctgatggaagcacgtcatctgatactacctcaaatagttttgttcgccagggttcggcagactcctacactagccgtccatccgattccgatgtatctctggaggaggaccgggaggcagtgcgcagagaagcggagcggcaggcccaggcacagttggaaaaagcaaagacaaagcccgttgcatttgcggttcggacaaatgtcagctacagtgcggcccatgaagatgatgttccagtgcctggcatggccatctcattcgaagcaaaagattttctgcatgttaaggaaaaatttaacaatgactggtggatagggcgattggtaaaagaaggctgtgaaatcggattcattccaagcccagtcaaactagaaaacatgaggctgcagcatgaacagagagccaagcaagggaaattctactccagtaaatcaggaggaaattcatcatccagtttgggtgacatagtacctagttccagaaaatcaacacctccatcatctgctatagacatagatgctactggcttagatgcagaagaaaatgatattccagcaaaccaccgctcccctaaacccagtgcaaacagtgtaacgtcaccccactccaaagagaaaagaatgcccttctttaagaagacagagcacactcctccgtatgatgtggtaccttccatgcgaccagtggtcctagtgggcccttctctgaagggctacgaggtcacagatatgatgcaaaaagcgctgtttgattttttaaaacacagatttgaagggcggatatccatcacaagggtcaccgctgacatctcgcttgccaaacgctcggtattaaacaatcccagtaagcacgcaataatagaaagatccaacacaaggtcaagcttagcggaagttcagagtgaaatcgaaaggatttttgaacttgcaagaacattgcagttggtggtccttgacgcggatacaattaatcatccagctcaactcagtaaaacctccttggcccctattatagtatatgtaaagatttcttctcctaaggttttacaaaggttaataaaatctcgagggaaatctcaagctaaacacctcaacgtccagatggtagcagctgataaactggctcagtgtcctccagagctgttcgatgtgatcttggatgagaaccagcttgaggatgcctgtgagcaccttgccgactatctggaggcctactggaaggccacccatcctcccagcagtagcctccccaaccctctccttagccgtacattagccacttcaagtctgcctcttagccccaccctagcctctaattcacagggttctcaaggtgatcagaggactgatcgctccgctcctatccgttctgcttcccaagctgaagaagaacctagtgtggaaccagtcaagaaatcccagcaccgctcttcctcctcagccccacaccacaaccatcgcagtgggacaagtcgcggcctctccaggcaagagacatttgactcggaaacccaggagagtcgagactctgcctacgtagagccaaaggaagattattcccatgaccacgtggaccactatgcctcacaccgtgaccacaaccacagagacgagacccacgggagcagtgaccacagacacagggagtcccggcaccgttcccgggacgtggatcgagagcaggaccacaacgagtgcaacaagcagcgcagccgtcataaatccaaggatcgctactgtgaaaaggatggagaagtgatatcaaaaaaacggaatgaggctggggagtggaacagggatgtttacatccgccaatgagttttgcccgtttgtgtttttttttttttttttttgaagtcttgtataactaacagcatccccaaaacaaagtctttggggtctacactgcaatcatatgtgatctgtcttgtaatattttgtattattgctgttgcttgaatagcaatagcatggatagagtattgagatactttttcttttgtaagtgctacataaattggcctggtatggctgcagtcctccggttgcatactggactcttcaaaaactgttttgggtagctgccacttgaacaaaatctgttgccacccaggtgatgttagtgttttaagaaatgtagttgatgtatccaacaagccagaatcagcacagataaaaagtggaatttcttgtttctccagatttttaatacgttaatacgcaggcatctgatttgcatattcattcatggaccactgtttcttgcttgtacctctggctgactaaatttggggacagattcagtcttgccttacacaaaggggatcataaagttagaatctattttctatgtactagtactgtgtactgtatagacagtttgtaaatgttatttctgcaaacaaacaccttcttattatatatataatatatatatatatcagtttgatcacactattttagagtcttaatgccaagtcagcagatttgctttatgaattacagggactagaaatgcccacattcaggaaatttgtaataacattgtctagacacctatcctcattctagtagaaagtgtgtacatactgtaaatatgtgtgattgcttgacttgaaaaggtttgaattctgaatgttataccatccttgtaagtaagtttgtaatttccaccataaattatggtaaatataaaactccagaggttgttctactccatacagttcacactgattgtgacacattcttagtagctagtgtctgttctagtcactgcactggagtctacgagccggaactcgctatatgcacgtgtgtgtgtccgtatgtaagaaagtgtgcaccgagtgactgaatggttgagatgaattggaatgctgaagactaacgaagaaactagagactgatatcgagcattctgcccacctcgctctgtatttaattaattgtgctatatgttgctttaacaacccattgagcagtcagggaatgtgagtaagcttgctgccaaaggtaactaggaaagcattcatctgctgcctccttgtttttgctcctagagagtgaaaatacaggcaattttactgtgagtgtttcactggaaatgtacaatctttgtgtgttagagtatttgttttagtaagaaatgtttacacagcttgtggaattatttcgtgggaaaataaatttttataacttctcccacttcaatttctaacctt

SEQ ID NO: 4143 - DNA, 1911 bp, Homo sapiens
  source 1..1911: mol_type = unassigned DNA
atggtccaaagggacatgtccaagtcgcctcccacagcggcggcggcggtggcgcaggagatccagatggaactgctagagaacgtggctcccgcgggggcgctcggagccgccgcacagtcatatggaaaaggagccagaaggaaaaacagatttaaaggatctgatggaagcacgtcatctgatactacctcaaatagttttgttcgccagggttcggcagactcctacactagccgtccatccgattccgatgtatctctggaggaggaccgggaggcagtgcgcagagaagcggagcggcaggcccaggcacagttggaaaaagcaaagacaaagcccgttgcatttgcggttcggacaaatgtcagctacagtgcggcccatgaagatgatgttccagtgcctggcatggccatctcattcgaagcaaaagattttctgcatgttaaggaaaaatttaacaatgactggtggatagggcgattggtaaaagaaggctgtgaaatcggattcattccaagcccagtcaaactagaaaacatgaggctgcagcatgaacagagagccaagcaagggaaattctactccagtaaatcaggaggaaattcatcatccagtttgggtgacatagtacctagttccagaaaatcaacacctccatcatctggtgcaaaatctgcagatgaacaagaccagtggaaaactgcaggcttgttttggcggtttactacagagcacactcctccgtatgatgtggtaccttccatgcgaccagtggtcctagtgggcccttctctgaagggctacgaggtcacagatatgatgcaaaaagcgctgtttgattttttaaaacacagatttgaagggcggatatccatcacaagggtcaccgctgacatctcgcttgccaaacgctcggtattaaacaatcccagtaagcacgcaataatagaaagatccaacacaaggtcaagcttagcggaagttcagagtgaaatcgaaaggatttttgaacttgcaagaacattgcagttggtggtccttgacgcggatacaattaatcatccagctcaactcagtaaaacctccttggcccctattatagtatatgtaaagatttcttctcctaaggttttacaaaggttaataaaatctcgagggaaatctcaagctaaacacctcaacgtccagatggtagcagctgataaactggctcagtgtcctccagagctgttcgatgtgatcttggatgagaaccagcttgaggatgcctgtgagcaccttgccgactatctggaggcctactggaaggccacccatcctcccagcagtagcctccccaaccctctccttagccgtacattagccacttcaagtctgcctcttagccccaccctagcctctaattcacagggttctcaaggtgatcagaggactgatcgctccgctcctatccgttctgcttcccaagctgaagaagaacctagtgtggaaccagtcaagaaatcccagcaccgctcttcctcctcagccccacaccacaaccatcgcagtgggacaagtcgcggcctctccaggcaagagacatttgactcggaaacccaggagagtcgagactctgcctacgtagagccaaaggaagattattcccatgaccacgtggaccactatgcctcacaccgtgaccacaaccacagagacgagacccacgggagcagtgaccacagacacagggagtcccggcaccgttcccgggacgtggatcgagagcaggaccacaacgagtgcaacaagcagcgcagccgtcataaatccaaggatcgctactgtgaaaaggatggagaagtgatatcaaaaaaacggaatgaggctggggagtggaacagggatgtttacatccgccaatga

SEQ ID NO: 4144 - DNA, 3461 bp, Homo sapiens
  source 1..3461: mol_type = unassigned DNA
gtgtgttttcagcccctcctggaatgggaaaataagaatctccctggatgggagtcctctggggcagggagtgaaagccccggaggcagaaagggacggagaacaggggcttgcccagagcatggataggaaaggagctggggttctccggggctcagcgcgcactgagaacctgtgcccggggctgcagctgcggacgataaaggcgctgtctggctcatgaaggccacctggatcaggcttctgaaaagagccaagggaggaaggctgaagaattctgatatctgtggttcggcagactcctacactagccgtccatccgattccgatgtatctctggaggaggaccgggaggcagtgcgcagagaagcggagcggcaggcccaggcacagttggaaaaagcaaagacaaagcccgttgcatttgcggttcggacaaatgtcagctacagtgcggcccatgaagatgatgttccagtgcctggcatggccatctcattcgaagcaaaagattttctgcatgttaaggaaaaatttaacaatgactggtggatagggcgattggtaaaagaaggctgtgaaatcggattcattccaagcccagtcaaactagaaaacatgaggctgcagcatgaacagagagccaagcaagggaaattctactccagtaaatcaggaggaaattcatcatccagtttgggtgacatagtacctagttccagaaaatcaacacctccatcatctgctatagacatagatgctactggcttagatgcagaagaaaatgatattccagcaaaccaccgctcccctaaacccagtgcaaacagtgtaacgtcaccccactccaaagagaaaagaatgcccttctttaagaagacagagcacactcctccgtatgatgtggtaccttccatgcgaccagtggtcctagtgggcccttctctgaagggctacgaggtcacagatatgatgcaaaaagcgctgtttgattttttaaaacacagatttgaagggcggatatccatcacaagggtcaccgctgacatctcgcttgccaaacgctcggtattaaacaatcccagtaagcacgcaataatagaaagatccaacacaaggtcaagcttagcggaagttcagagtgaaatcgaaaggatttttgaacttgcaagaacattgcagttggtggtccttgacgcggatacaattaatcatccagctcaactcagtaaaacctccttggcccctattatagtatatgtaaagatttcttctcctaaggttttacaaaggttaataaaatctcgagggaaatctcaagctaaacacctcaacgtccagatggtagcagctgataaactggctcagtgtcctccagagctgttcgatgtgatcttggatgagaaccagcttgaggatgcctgtgagcaccttgccgactatctggaggcctactggaaggccacccatcctcccagcagtagcctccccaaccctctccttagccgtacattagccacttcaagtctgcctcttagccccaccctagcctctaattcacagggttctcaaggtgatcagaggactgatcgctccgctcctatccgttctgcttcccaagctgaagaagaacctagtgtggaaccagtcaagaaatcccagcaccgctcttcctcctcagccccacaccacaaccatcgcagtgggacaagtcgcggcctctccaggcaagagacatttgactcggaaacccaggagagtcgagactctgcctacgtagagccaaaggaagattattcccatgaccacgtggaccactatgcctcacaccgtgaccacaaccacagagacgagacccacgggagcagtgaccacagacacagggagtcccggcaccgttcccgggacgtggatcgagagcaggaccacaacgagtgcaacaagcagcgcagccgtcataaatccaaggatcgctactgtgaaaaggatggagaagtgatatcaaaaaaacggaatgaggctggggagtggaacagggatgtttacatccgccaatgagttttgcccgtttgtgtttttttttttttttttttgaagtcttgtataactaacagcatccccaaaacaaagtctttggggtctacactgcaatcatatgtgatctgtcttgtaatattttgtattattgctgttgcttgaatagcaatagcatggatagagtattgagatactttttcttttgtaagtgctacataaattggcctggtatggctgcagtcctccggttgcatactggactcttcaaaaactgttttgggtagctgccacttgaacaaaatctgttgccacccaggtgatgttagtgttttaagaaatgtagttgatgtatccaacaagccagaatcagcacagataaaaagtggaatttcttgtttctccagatttttaatacgttaatacgcaggcatctgatttgcatattcattcatggaccactgtttcttgcttgtacctctggctgactaaatttggggacagattcagtcttgccttacacaaaggggatcataaagttagaatctattttctatgtactagtactgtgtactgtatagacagtttgtaaatgttatttctgcaaacaaacaccttcttattatatatataatatatatatatatcagtttgatcacactattttagagtcttaatgccaagtcagcagatttgctttatgaattacagggactagaaatgcccacattcaggaaatttgtaataacattgtctagacacctatcctcattctagtagaaagtgtgtacatactgtaaatatgtgtgattgcttgacttgaaaaggtttgaattctgaatgttataccatccttgtaagtaagtttgtaatttccaccataaattatggtaaatataaaactccagaggttgttctactccatacagttcacactgattgtgacacattcttagtagctagtgtctgttctagtcactgcactggagtctacgagccggaactcgctatatgcacgtgtgtgtgtccgtatgtaagaaagtgtgcaccgagtgactgaatggttgagatgaattggaatgctgaagactaacgaagaaactagagactgatatcgagcattctgcccacctcgctctgtatttaattaattgtgctatatgttgctttaacaacccattgagcagtcagggaatgtgagtaagcttgctgccaaaggtaactaggaaagcattcatctgctgcctccttgtttttgctcctagagagtgaaaatacaggcaattttactgtgagtgtttcactggaaatgtacaatctttgtgtgttagagtatttgttttagtaagaaatgtttacacagcttgtggaattatttcgtgggaaaataaatttttataacttctcccacttcaatttctaacctt

SEQ ID NO: 4145 - DNA, 3116 bp, Homo sapiens
  source 1..3116: mol_type = unassigned DNA
cccctcttcatgcagtgctgcgggctggtgcatcgccggcgagtacgggtgtcctatggttcggcagactcctacactagccgtccatccgattccgatgtatctctggaggaggaccgggaggcagtgcgcagagaagcggagcggcaggcccaggcacagttggaaaaagcaaagacaaagcccgttgcatttgcggttcggacaaatgtcagctacagtgcggcccatgaagatgatgttccagtgcctggcatggccatctcattcgaagcaaaagattttctgcatgttaaggaaaaatttaacaatgactggtggatagggcgattggtaaaagaaggctgtgaaatcggattcattccaagcccagtcaaactagaaaacatgaggctgcagcatgaacagagagccaagcaagggaaattctactccagtaaatcaggaggaaattcatcatccagtttgggtgacatagtacctagttccagaaaatcaacacctccatcatctgctaagcagaagcagaaatcgacagagcacactcctccgtatgatgtggtaccttccatgcgaccagtggtcctagtgggcccttctctgaagggctacgaggtcacagatatgatgcaaaaagcgctgtttgattttttaaaacacagatttgaagggcggatatccatcacaagggtcaccgctgacatctcgcttgccaaacgctcggtattaaacaatcccagtaagcacgcaataatagaaagatccaacacaaggtcaagcttagcggaagttcagagtgaaatcgaaaggatttttgaacttgcaagaacattgcagttggtggtccttgacgcggatacaattaatcatccagctcaactcagtaaaacctccttggcccctattatagtatatgtaaagatttcttctcctaaggttttacaaaggttaataaaatctcgagggaaatctcaagctaaacacctcaacgtccagatggtagcagctgataaactggctcagtgtcctccagagctgttcgatgtgatcttggatgagaaccagcttgaggatgcctgtgagcaccttgccgactatctggaggcctactggaaggccacccatcctcccagcagtagcctccccaaccctctccttagccgtacattagccacttcaagtctgcctcttagccccaccctagcctctaattcacagggttctcaaggtgatcagaggactgatcgctccgctcctatccgttctgcttcccaagctgaagaagaacctagtgtggaaccagtcaagaaatcccagcaccgctcttcctcctcagccccacaccacaaccatcgcagtgggacaagtcgcggcctctccaggcaagagacatttgactcggaaacccaggagagtcgagactctgcctacgtagagccaaaggaagattattcccatgaccacgtggaccactatgcctcacaccgtgaccacaaccacagagacgagacccacgggagcagtgaccacagacacagggagtcccggcaccgttcccgggacgtggatcgagagcaggaccacaacgagtgcaacaagcagcgcagccgtcataaatccaaggatcgctactgtgaaaaggatggagaagtgatatcaaaaaaacggaatgaggctggggagtggaacagggatgtttacatccgccaatgagttttgcccgtttgtgtttttttttttttttttttgaagtcttgtataactaacagcatccccaaaacaaagtctttggggtctacactgcaatcatatgtgatctgtcttgtaatattttgtattattgctgttgcttgaatagcaatagcatggatagagtattgagatactttttcttttgtaagtgctacataaattggcctggtatggctgcagtcctccggttgcatactggactcttcaaaaactgttttgggtagctgccacttgaacaaaatctgttgccacccaggtgatgttagtgttttaagaaatgtagttgatgtatccaacaagccagaatcagcacagataaaaagtggaatttcttgtttctccagatttttaatacgttaatacgcaggcatctgatttgcatattcattcatggaccactgtttcttgcttgtacctctggctgactaaatttggggacagattcagtcttgccttacacaaaggggatcataaagttagaatctattttctatgtactagtactgtgtactgtatagacagtttgtaaatgttatttctgcaaacaaacaccttcttattatatatataatatatatatatatcagtttgatcacactattttagagtcttaatgccaagtcagcagatttgctttatgaattacagggactagaaatgcccacattcaggaaatttgtaataacattgtctagacacctatcctcattctagtagaaagtgtgtacatactgtaaatatgtgtgattgcttgacttgaaaaggtttgaattctgaatgttataccatccttgtaagtaagtttgtaatttccaccataaattatggtaaatataaaactccagaggttgttctactccatacagttcacactgattgtgacacattcttagtagctagtgtctgttctagtcactgcactggagtctacgagccggaactcgctatatgcacgtgtgtgtgtccgtatgtaagaaagtgtgcaccgagtgactgaatggttgagatgaattggaatgctgaagactaacgaagaaactagagactgatatcgagcattctgcccacctcgctctgtatttaattaattgtgctatatgttgctttaacaacccattgagcagtcagggaatgtgagtaagcttgctgccaaaggtaactaggaaagcattcatctgctgcctccttgtttttgctcctagagagtgaaaatacaggcaattttactgtgagtgtttcactggaaatgtacaatctttgtgtgttagagtatttgttttagtaagaaatgtttacacagcttgtggaattatttcgtgggaaaataaatttttataacttctcccacttcaatttctaacctt

SEQ ID NO: 4146 - DNA, 3396 bp, Homo sapiens
  source 1..3396: mol_type = unassigned DNA
ttgtgatccgacgaactttagaaagtcacactaactaagactacacaccccaagccagcaagaaaaaggaaagcagttgctatgctgttcagcaaagcaagacttggctgccttttagctagtcctgaattcttgctcctgtgaagaaaattcctgctggagtgctgggcgcacttggaattggtctagcatgcttgacagacgccttatagctcctcaaactaaatacattattcctgggggttcggcagactcctacactagccgtccatccgattccgatgtatctctggaggaggaccgggaggcagtgcgcagagaagcggagcggcaggcccaggcacagttggaaaaagcaaagacaaagcccgttgcatttgcggttcggacaaatgtcagctacagtgcggcccatgaagatgatgttccagtgcctggcatggccatctcattcgaagcaaaagattttctgcatgttaaggaaaaatttaacaatgactggtggatagggcgattggtaaaagaaggctgtgaaatcggattcattccaagcccagtcaaactagaaaacatgaggctgcagcatgaacagagagccaagcaagggaaattctactccagtaaatcaggaggaaattcatcatccagtttgggtgacatagtacctagttccagaaaatcaacacctccatcatctgctatagacatagatgctactggcttagatgcagaagaaaatgatattccagcaaaccaccgctcccctaaacccagtgcaaacagtgtaacgtcaccccactccaaagagaaaagaatgcccttctttaagaagacagagcacactcctccgtatgatgtggtaccttccatgcgaccagtggtcctagtgggcccttctctgaagggctacgaggtcacagatatgatgcaaaaagcgctgtttgattttttaaaacacagatttgaagggcggatatccatcacaagggtcaccgctgacatctcgcttgccaaacgctcggtattaaacaatcccagtaagcacgcaataatagaaagatccaacacaaggtcaagcttagcggaagttcagagtgaaatcgaaaggatttttgaacttgcaagaacattgcagttggtggtccttgacgcggatacaattaatcatccagctcaactcagtaaaacctccttggcccctattatagtatatgtaaagatttcttctcctaaggttttacaaaggttaataaaatctcgagggaaatctcaagctaaacacctcaacgtccagatggtagcagctgataaactggctcagtgtcctccagagctgttcgatgtgatcttggatgagaaccagcttgaggatgcctgtgagcaccttgccgactatctggaggcctactggaaggccacccatcctcccagcagtagcctccccaaccctctccttagccgtacattagccacttcaagtctgcctcttagccccaccctagcctctaattcacagggttctcaaggtgatcagaggactgatcgctccgctcctatccgttctgcttcccaagctgaagaagaacctagtgtggaaccagtcaagaaatcccagcaccgctcttcctcctcagccccacaccacaaccatcgcagtgggacaagtcgcggcctctccaggcaagagacatttgactcggaaacccaggagagtcgagactctgcctacgtagagccaaaggaagattattcccatgaccacgtggaccactatgcctcacaccgtgaccacaaccacagagacgagacccacgggagcagtgaccacagacacagggagtcccggcaccgttcccgggacgtggatcgagagcaggaccacaacgagtgcaacaagcagcgcagccgtcataaatccaaggatcgctactgtgaaaaggatggagaagtgatatcaaaaaaacggaatgaggctggggagtggaacagggatgtttacatccgccaatgagttttgcccgtttgtgtttttttttttttttttttgaagtcttgtataactaacagcatccccaaaacaaagtctttggggtctacactgcaatcatatgtgatctgtcttgtaatattttgtattattgctgttgcttgaatagcaatagcatggatagagtattgagatactttttcttttgtaagtgctacataaattggcctggtatggctgcagtcctccggttgcatactggactcttcaaaaactgttttgggtagctgccacttgaacaaaatctgttgccacccaggtgatgttagtgttttaagaaatgtagttgatgtatccaacaagccagaatcagcacagataaaaagtggaatttcttgtttctccagatttttaatacgttaatacgcaggcatctgatttgcatattcattcatggaccactgtttcttgcttgtacctctggctgactaaatttggggacagattcagtcttgccttacacaaaggggatcataaagttagaatctattttctatgtactagtactgtgtactgtatagacagtttgtaaatgttatttctgcaaacaaacaccttcttattatatatataatatatatatatatcagtttgatcacactattttagagtcttaatgccaagtcagcagatttgctttatgaattacagggactagaaatgcccacattcaggaaatttgtaataacattgtctagacacctatcctcattctagtagaaagtgtgtacatactgtaaatatgtgtgattgcttgacttgaaaaggtttgaattctgaatgttataccatccttgtaagtaagtttgtaatttccaccataaattatggtaaatataaaactccagaggttgttctactccatacagttcacactgattgtgacacattcttagtagctagtgtctgttctagtcactgcactggagtctacgagccggaactcgctatatgcacgtgtgtgtgtccgtatgtaagaaagtgtgcaccgagtgactgaatggttgagatgaattggaatgctgaagactaacgaagaaactagagactgatatcgagcattctgcccacctcgctctgtatttaattaattgtgctatatgttgctttaacaacccattgagcagtcagggaatgtgagtaagcttgctgccaaaggtaactaggaaagcattcatctgctgcctccttgtttttgctcctagagagtgaaaatacaggcaattttactgtgagtgtttcactggaaatgtacaatctttgtgtgttagagtatttgttttagtaagaaatgtttacacagcttgtggaattatttcgtgggaaaataaatttttataacttctccc

SEQ ID NO: 4147 - DNA, 1827 bp, Homo sapiens
  source 1..1827: mol_type = unassigned DNA
atgaatcaggggagtggactggacctgctgaagatctcatatggaaaaggagccagaaggaaaaacagatttaaaggatctgatggaagcacgtcatctgatactacctcaaatagttttgttcgccagggttcggcagactcctacactagccgtccatccgattccgatgtatctctggaggaggaccgggaggcagtgcgcagagaagcggagcggcaggcccaggcacagttggaaaaagcaaagacaaagcccgttgcatttgcggttcggacaaatgtcagctacagtgcggcccatgaagatgatgttccagtgcctggcatggccatctcattcgaagcaaaagattttctgcatgttaaggaaaaatttaacaatgactggtggatagggcgattggtaaaagaaggctgtgaaatcggattcattccaagcccagtcaaactagaaaacatgaggctgcagcatgaacagagagccaagcaagggaaattctactccagtaaatcaggaggaaattcatcatccagtttgggtgacatagtacctagttccagaaaatcaacacctccatcatctggtgcaaaatctgcagatgaacaagaccagtggaaaactgcaggcttgttttggcggtttactacagagcacactcctccgtatgatgtggtaccttccatgcgaccagtggtcctagtgggcccttctctgaagggctacgaggtcacagatatgatgcaaaaagcgctgtttgattttttaaaacacagatttgaagggcggatatccatcacaagggtcaccgctgacatctcgcttgccaaacgctcggtattaaacaatcccagtaagcacgcaataatagaaagatccaacacaaggtcaagcttagcggaagttcagagtgaaatcgaaaggatttttgaacttgcaagaacattgcagttggtggtccttgacgcggatacaattaatcatccagctcaactcagtaaaacctccttggcccctattatagtatatgtaaagatttcttctcctaaggttttacaaaggttaataaaatctcgagggaaatctcaagctaaacacctcaacgtccagatggtagcagctgataaactggctcagtgtcctccagagctgttcgatgtgatcttggatgagaaccagcttgaggatgcctgtgagcaccttgccgactatctggaggcctactggaaggccacccatcctcccagcagtagcctccccaaccctctccttagccgtacattagccacttcaagtctgcctcttagccccaccctagcctctaattcacagggttctcaaggtgatcagaggactgatcgctccgctcctatccgttctgcttcccaagctgaagaagaacctagtgtggaaccagtcaagaaatcccagcaccgctcttcctcctcagccccacaccacaaccatcgcagtgggacaagtcgcggcctctccaggcaagagacatttgactcggaaacccaggagagtcgagactctgcctacgtagagccaaaggaagattattcccatgaccacgtggaccactatgcctcacaccgtgaccacaaccacagagacgagacccacgggagcagtgaccacagacacagggagtcccggcaccgttcccgggacgtggatcgagagcaggaccacaacgagtgcaacaagcagcgcagccgtcataaatccaaggatcgctactgtgaaaaggatggagaagtgatatcaaaaaaacggaatgaggctggggagtggaacagggatgtttacatccgccaatga

SEQ ID NO: 4148 - DNA, 4464 bp, Homo sapiens
  source 1..4464: mol_type = unassigned DNA
cagcagcgtgctaagaagcagtcacataaacagcagcaggagtaggcctcctgcttttcaaaagcagagtactgcagggtcgcgaaatgcaagacactcagatgtttgaaaatctcccgagttgagaatggctactgtaaaagcgtcaccaagaaactctgacgatctggacagtcctaactctgtgttagcaatacttacttccggaaaattaatgctacttcttgtagatttttgcaaataggaaacccccttgaagaagatctcaaattacgccccccacccccaaaaaaagacaaacaggggagaacaaagttttggcatgcctgcaggaacggtggcttttttagaaactacctaggaggcagaagctaagtgatttgctcatgcctcttacctgggagtagaaggtgggaagaaatggaccgaggctgtgacgagaagacaaggcacagtgcagcttggtgaagccacacgctgactgcgttctgccccctcttcatgcagtgctgcgggctggtgcatcgccggcgagtacgggtgtcctatggttcggcagactcctacactagccgtccatccgattccgatgtatctctggaggaggaccgggaggcagtgcgcagagaagcggagcggcaggcccaggcacagttggaaaaagcaaagacaaagcccgttgcatttgcggttcggacaaatgtcagctacagtgcggcccatgaagatgatgttccagtgcctggcatggccatctcattcgaagcaaaagattttctgcatgttaaggaaaaatttaacaatgactggtggatagggcgattggtaaaagaaggctgtgaaatcggattcattccaagcccagtcaaactagaaaacatgaggctgcagcatgaacagagagccaagcaagggaaattctactccagtaaatcaggaggaaattcatcatccagtttgggtgacatagtacctagttccagaaaatcaacacctccatcatctgctatagacatagatgctactggcttagatgcagaagaaaatgatattccagcaaaccaccgctcccctaaacccagtgcaaacagtgtaacgtcaccccactccaaagagaaaagaatgcccttctttaagaagacagagcacactcctccgtatgatgtggtaccttccatgcgaccagtggtcctagtgggcccttctctgaagggctacgaggtcacagatatgatgcaaaaagcgctgtttgattttttaaaacacagatttgaagggcggatatccatcacaagggtcaccgctgacatctcgcttgccaaacgctcggtattaaacaatcccagtaagcacgcaataatagaaagatccaacacaaggtcaagcttagcggaagttcagagtgaaatcgaaaggatttttgaacttgcaagaacattgcagttggtggtccttgacgcggatacaattaatcatccagctcaactcagtaaaacctccttggcccctattatagtatatgtaaagatttcttctcctaaggttttacaaaggttaataaaatctcgagggaaatctcaagctaaacacctcaacgtccagatggtagcagctgataaactggctcagtgtcctccagagctgttcgatgtgatcttggatgagaaccagcttgaggatgcctgtgagcaccttgccgactatctggaggcctactggaaggccacccatcctcccagcagtagcctccccaaccctctccttagccgtacattagccacttcaagtctgcctcttagccccaccctagcctctaattcacagggttctcaaggtgatcagaggactgatcgctccgctcctatccgttctgcttcccaagctgaagaagaacctagtgtggaaccagtcaagaaatcccagcaccgctcttcctcctcagccccacaccacaaccatcgcagtgggacaagtcgcggcctctccaggcaagagacatttgactcggaaacccaggagagtcgagactctgcctacgtagagccaaaggaagattattcccatgaccacgtggaccactatgcctcacaccgtgaccacaaccacagagacgagacccacgggagcagtgaccacagacacagggagtcccggcaccgttcccgggacgtggatcgagagcaggaccacaacgagtgcaacaagcagcgcagccgtcataaatccaaggatcgctactgtgaaaaggatggagaagtgatatcaaaaaaacggaatgaggctggggagtggaacagggatgtttacatccgccaatgagttttgcccgtttgtgtttttttttttttttttttgaagtcttgtataactaacagcatccccaaaacaaagtctttggggtctacactgcaatcatatgtgatctgtcttgtaatattttgtattattgctgttgcttgaatagcaatagcatggatagagtattgagatactttttcttttgtaagtgctacataaattggcctggtatggctgcagtcctccggttgcatactggactcttcaaaaactgttttgggtagctgccacttgaacaaaatctgttgccacccaggtgatgttagtgttttaagaaatgtagttgatgtatccaacaagccagaatcagcacagataaaaagtggaatttcttgtttctccagatttttaatacgttaatacgcaggcatctgatttgcatattcattcatggaccactgtttcttgcttgtacctctggctgactaaatttggggacagattcagtcttgccttacacaaaggggatcataaagttagaatctattttctatgtactagtactgtgtactgtatagacagtttgtaaatgttatttctgcaaacaaacaccttcttattatatatataatatatatatatatcagtttgatcacactattttagagtcttaatgccaagtcagcagatttgctttatgaattacagggactagaaatgcccacattcaggaaatttgtaataacattgtctagacacctatcctcattctagtagaaagtgtgtacatactgtaaatatgtgtgattgcttgacttgaaaaggtttgaattctgaatgttataccatccttgtaagtaagtttgtaatttccaccataaattatggtaaatataaaactccagaggttgttctactccatacagttcacactgattgtgacacattcttagtagctagtgtctgttctagtcactgcactggagtctacgagccggaactcgctatatgcacgtgtgtgtgtccgtatgtaagaaagtgtgcaccgagtgactgaatggttgagatgaattggaatgctgaagactaacgaagaaactagagactgatatcgagcattctgcccacctcgctctgtatttaattaattgtgctatatgttgctttaacaacccattgagcagtcagggaatgtgagtaagcttgctgccaaaggtaactaggaaagcattcatctgctgcctccttgtttttgctcctagagagtgaaaatacaggcaattttactgtgagtgtttcactggaaatgtacaatctttgtgtgttagagtatttgttttagtaagaaatgtttacacagcttgtggaattatttcgtgggaaaataaatttttataacttctcccacttcaatttctaaccttgcctattgttcctgttgtttgtttacctcccagttacctaccattcctccccaccaccgactccagcaggttcactgtctgtcagaacccagaagtgcttcttataaccaaagtttctgttcttcagaagaaatcagggcaaaatggggtgacttgaagtgaataaaatgttaagaatattatcctacataagacatgtacacagaaggggaaccttgaagacattatctccatgcctcaattacactgctgtaagaagcttacaatgtcatcatgtttaaggctaagaccttttccgtgtctcaagtgtatattttgtccagttataactggatggtaagacagtattaagagtgcaagtacctggcacttgaagtttgtcccaggaaaatgcctgtgtataattacctaacttcagatctgcacattaacttatttaacaaaataaatcagccgggcgcagtggctcatgcctgtaatcccagcaatttgggaggctgaggagggtggatcacctgaggtcaggagttcaagaccagcctggccaacgtggcgaaaccccgtctctactaaaaagataaaaaattagccaggtgtggtggtgcacacctgtaatcccagctacttgggaggctgaggcaggagaattgcttgaacccaggaggtggagcctgcagtaagccaagatcacaccactgtactccagcctgggtgacagagtgagactccatctccaaaaaag

SEQ ID NO: 4149 - DNA, 2696 bp, Homo sapiens
  source 1..2696: mol_type = unassigned DNA
gtggggggagcggtgatctgagctccgagcagctggtcttcgcggctcgctccctccttcgcgctctctcgctccctgccgccgcccgcagggctgcggggctcggtggcatctcccgggcgcggcccgcagtccttgcccctgcctccgggccgctcccgcccccggcgccgctcgctcccccgacccggactcccccatgtatgacgactcctacgtgcccgggtttgaggactcggaggcgggttcagccgactcctacaccagccgcccatctctggactcagacgtctccctggaggaggaccgggagagtgcccggcgtgaagtagagagccaggctcagcagcagctcgaaagggccaagcacaaacctgtggcatttgcggtgaggaccaatgtcagctactgtggcgtactggatgaggagtgcccagtccagggctctggagtcaactttgaggccaaagattttctgcacattaaagagaagtacagcaatgactggtggatcgggcggctagtgaaagagggcggggacatcgccttcatccccagcccccagcgcctggagagcatccggctcaaacaggagcagaaggccaggagatctgggaacccttccagcctgagtgacattggcaaccgacgctcccctccgccatctctagccaagcagaagcaaaagcaggcggaacatgttcccccatatgacgtggtgccctccatgcggcctgtggtgctggtgggaccctctctgaaaggttatgaggtcacagacatgatgcagaaggctctcttcgacttcctcaaacacagatttgatggcaggatctccatcacccgagtcacagccgacctctccctggcaaagcgatctgtgctcaacaatccgggcaagaggaccatcattgagcgctcctctgcccgctccagcattgcggaagtgcagagtgagatcgagcgcatatttgagctggccaaatccctgcagctagtagtgttggacgctgacaccatcaaccacccagcacagctggccaagacctcgctggcccccatcatcgtctttgtcaaagtgtcctcaccaaaggtactccagcgtctcattcgctcccgggggaagtcacagatgaagcacctgaccgtacagatgatggcatatgataagctggttcagtgcccaccggagtcatttgatgtgattctggatgagaaccagctggaggatgcctgtgagcacctggctgagtacctggaggtttactggcgggccacgcaccacccagcccctggccccggacttctgggtcctcccagtgccatccccggacttcagaaccagcagctgctgggggagcgtggcgaggagcactccccccttgagcgggacagcttgatgccctctgatgaggccagcgagagctcccgccaagcctggacaggatcttcacagcgtagctcccgccacctggaggaggactatgcagatgcctaccaggacctgtaccagcctcaccgccaacacacctcggggctgcctagtgctaacgggcatgacccccaagaccggcttctagcccaggactcagagcacaaccacagtgaccggaactggcagcgcaaccggccttggcccaaggatagctactgacagcctcctgctgccctaccctggcaggcacaggcgcagctggctggggggcccactccaggcagggtggcgttagactggcatcaggctggcactaggctcagcccccaaaaccccctgcccagccccagcttcagggctgcctgtggtcccaaggttctgggagaaacaggggaccccctcacctcctgggcagtgacccctactaggctcccattccaggtactagctgtgtgttctgcacccctggcaccttcctctcctcccacacaggaagctgccccactgggcagtgccctcaggccaggatccccttagcagggtccttcccaccagactcagggaagggatgccccattaaagtgacaaaagggtggggtgtgggcaccatggcatgaggaagaaacaaggtccctgagcaggcacaagtcctgacagtcaagggactgctttggcatccagggcctccagtcacctcactgccatacattagaaatgagacaatcaaagcccccccagggtggcacacccatctgtttgctggggtgtggcagccacatccaagactggagcagcaggctggccacgctcgggccagagagagctcacagctgaagctcttggagggaagggctctcctcaccctgccaggaagcttcttaacatgtgacaggaccagggaccaggagcatggtgaagccaagtggcagatgggagccaacctggatgggggtttggggaaggagggcatgtgtagcagagaacttaggggggcctccttgcctttctcattcttttgccctgcatcctgtcatttctgttcttgtccctcatacatctttggagaaccgggctccagactttgttccctgactcatagctgccgcttgttaggttagggttagatggggagagacagggcacagaggacctgtctccccggctactcttgccttatggctctagtgtgtgacctacagagcatgctccacaagcccctgcctcacctcactgtcatcactaataaacatcatgcacagtc

SEQ ID NO: 4150 - DNA, 1566 bp, Homo sapiens
  source 1..1566: mol_type = unassigned DNA
atgtcctcctcctcctacgccaagaacgggaccgcggacgggccgcactcccccacctcgcaggtggcccgaggcaccacaacccggaggagcaggttgaaaagatccgatggcagcaccacttcgaccagcttcatcctcagacagggttcagcggattcctacacaagcaggccgtctgactccgatgtctctttggaagaggaccgggaagcaattcgacaggagagagaacagcaagcagctatccagcttgagagagcaaagtccaaacctgtagcatttgccgtgaagacaaatgtgagctactgcggcgccctggacgaggatgtgcctgttccaagcacagctatctcctttgatgctaaagactttctacatattaaagagaaatataacaatgattggtggataggaaggctggtgaaagagggctgtgaaattggcttcattccaagtccactcagattggagaacatacggatccagcaagaacaaaaaagaggacgttttcacggagggaaatcaagtggaaattcttcttcaagtcttggagaaatggtatctgggacattccgagcaactcccacatcaacagttaaaatggtattaaaaattcatacggagcacattcctccttacgatgttgtaccgtcaatgcgtccggtggtgttagtggggccgtcactgaaaggttacgaggtaacagacatgatgcagaaagccctctttgatttcctgaagcacaggtttgatgggaggatttcaataacgagagtgacagctgacatttctcttgctaagaggtctgtcctaaataatcccagcaagagagcaataattgaacgttcgaacacccggtccagcttagcggaagtacaaagtgaaattgaaagaatctttgagttggcaagatctttgcaactggttgttcttgatgcagacaccatcaatcacccagcacaacttataaagacttccttagcaccaattattgttcatgtaaaagtctcatctccaaaggttttacagcggttgattaaatctagaggaaagtcacaaagtaaacacttgaatgttcaactggtggcagctgataaacttgcacaatgccccccagaaatgtttgatgttatattggatgaaaatcagcttgaggatgcatgtgaacatctaggggagtacctggaggcgtactggcgtgccacccacacaaccagtagcacacccatgaccccgctgctgggaaggaatttgggctccacggcactctcaccatatcccacagcaatttctgggttacagagtcagcgaatgaggcacagcaaccactccacagagaactctccaattgaaagacgaagtctaatgacctctgatgaaaattatcacaatgaaagggctcggaagagtaggaaccgcttgtcttccagttctcagcatagccgagatcattaccctcttgtggaagaagattaccctgactcataccaggacacttacaaaccccataggaaccgaggatcacctgggggatatagccatgactcccgacataggctttga

SEQ ID NO: 4151 - DNA, 8055 bp, Homo sapiens
  source 1..8055: mol_type = unassigned DNA
agtctgtggttgaggaagggttttgctttttgtgctctgtattgggaaggcagataaaatgccaggtctggactgcctctggggataacctcaccctgtgggatgtgaatgaatagcatcttgcctggtaaatccacaggaattgataaggcaggcgcagttctcccaaacaggccttttctctttaagctgtagctgtggtttctgcagcaattttgtttttgccttgaaagaggtgctctggattatcacacctccatgtatgacaatttgtacctgcatggaattgaagactcggaggctggttcagcggattcctacacaagcaggccgtctgactccgatgtctctttggaagaggaccgggaagcaattcgacaggagagagaacagcaagcagctatccagcttgagagagcaaagtccaaacctgtagcatttgccgtgaagacaaatgtgagctactgcggcgccctggacgaggatgtgcctgttccaagcacagctatctcctttgatgctaaagactttctacatattaaagagaaatataacaatgattggtggataggaaggctggtgaaagagggctgtgaaattggcttcattccaagtccactcagattggagaacatacggatccagcaagaacaaaaaagaggacgttttcacggagggaaatcaagtggaaattcttcttcaagtcttggagaaatggtatctgggacattccgagcaactcccacatcaacagttaaaatggtattaaaaattcatacggagcacattcctccttacgatgttgtaccgtcaatgcgtccggtggtgttagtggggccgtcactgaaaggttacgaggtaacagacatgatgcagaaagccctctttgatttcctgaagcacaggtttgatgggaggatttcaataacgagagtgacagctgacatttctcttgctaagaggtctgtcctaaataatcccagcaagagagcaataattgaacgttcgaacacccggtccagcttagcggaagtacaaagtgaaattgaaagaatctttgagttggcaagatctttgcaactggttgttcttgatgcagacaccatcaatcacccagcacaacttataaagacttccttagcaccaattattgttcatgtaaaagtctcatctccaaaggttttacagcggttgattaaatctagaggaaagtcacaaagtaaacacttgaatgttcaactggtggcagctgataaacttgcacaatgccccccagaaatgtttgatgttatattggatgaaaatcagcttgaggatgcatgtgaacatctaggggagtacctggaggcgtactggcgtgccacccacacaaccagtagcacacccatgaccccgctgctgggaaggaatttgggctccacggcactctcaccatatcccacagcaatttctgggttacagagtcagcgaatgaggcacagcaaccactccacagagaactctccaattgaaagacgaagtctaatgacctctgatgaaaattatcacaatgaaagggctcggaagagtaggaaccgcttgtcttccagttctcagcatagccgagatcattaccctcttgtggaagaagattaccctgactcataccaggacacttacaaaccccataggaaccgaggatcacctgggggatatagccatgactcccgacataggctttgagtctaatgaaacaaaaaatattcatctgttgacaatttgccatagcagtgctaggataaaccaatcatcttaacttggctaacatagcacagtatttactgtgctaatgggctgctgtcattttatgctaagtaaggggcaaaaaaaaaaattacattatgcccttgagtctagatggatattagatgcccgatcatatagatatttttaagtgcaacatttacatgataacagtacattttgttttcttcatagatttagacacatcaatttgtaatttagggtacttacaaggcacatataaaataatttcccatgctggaaattccaaatgaccagttccagttggaaccaatttataaaccaattcctgttggaatttgggtgaattgactagaaagtctacttgagcatgttgtaatcaactgaaaaatctggggggaaaaaaaaaaaactaataagaaaatcgaaataccaatagaagccaaatccagctttggtatttatttgctggaagctaaatttacacttaaagttggagtgtataaacattttaatatatgttaatgttgccagaatgacttttcagacttaccaaatgtattgatagtgccaaaaaaaaaatctcagaaatcttaatgcagaaattatatagtctcctcagattttaatatttttatttctttcctggcacagctgttgtattcaaagtgttttgctttttgtttggtcagtactgttagctcatttgaagttggcaaaaacaaatacaaacaagcaaaaaacctcaaatttttttcagcagtgagagagaatagtaaagagaggcccaagcatagctggttatgtgaaatataaaatggggtgttgttctccctttaatcaatctgagcacaactacatacatccaggaatctgaagtcagatagtaaggatgtggtaccaatcctcccgagtgcaatgctaaacacttccaggtgggaattcatctatttcacttaacacaaacgcagggtctgtatttcctgccaacaagattgagtatctttccattgcttctctcagtctctgtctttgaatatctgaatgttctggcccttcaacaaattctttaaatcatgctaaggaatttcgttttatgtggacacactcaactttgatattcaggagatgtttttacaaaatgactaattgaaaaaagttgaaacaaatgattttaaaagcttgcagtaaaaaataaactcatagattcagcaaatatttgttgactaaaattatagcatttttaatgcagaaaattataaagaatttggagattgagctgccttatttctaatgaacactcctcttcatcttattaagtcttcacagtttttccagtggctataattatggaattggtgacctatgttttatattatcaaggaagccttagattcactctgatctaagaaattattgaaattgaccctttttacacaaatgtctttaaaaaaaaaaacttatttctaaatgtccatagtgcatgcattttctaaaaccccaataagtccagccataaaagttcttttctgctagtacatgtcatgaagcctatttttgaaaataatgataattaattttatagtatcttcttttctccccaagcctttcagtattcaggcactcaaagcatgcaccagttcagtaatcttcttgaccatggaaataagttccacattactgatgagttatatatatatcttgaaccccattacaacctcaccacatccccctgcatttatgttcagtgtttgtaccccattatgaacctgtttagctgataatgaggatacctataattctgtaagtcatttcaaatatttgatacaattaaaaaatatgggcttagtaaattttaaaagttaacatgtgatactggcttgtgagattcttctgtcatctagtgaagcttataaaactttcagttaagacattttaaaagagttatatccattaggcactttaataaacatataacctgccattactgaatactttgttagaacacagaagagcatcttccagcaaacaaaaatatatttattacatgtacagcacatacttgcatgagaaagaaaacattagccaaaacatttttctatatgctttactggtttcttgtttatgcgcattaaagtatttaattgcaaagagtgcaccaaggtgtacaaatttagactagacagctgttcagctttttctgtagtagcattagcagtttggtcatttaactactttaagatacttacattttatggcaggtagctgtaacagcatttaaatatatttcctagtcatcaagattaccatcttctttcaactttttaaaagtcacttgtttttaaaggtttttcaaagccttgtttttagtcttccatgtcatgccgataaagagagtctcattcaatatctgtgcacaaaaccaatctatcaattaccatcagatgtccatacctgttttgctttgcattcttattcaaaagctgacaatcttggaaagggtataatgtatattttattgatggatatatttaaatgtttactttaatttggaatattctttccccttctttctgtaataagtttatcttcctcaaataaggggatatacatcttattttttttaaagacttaagagtttattgtgtaaatgatacttaaaatctagatatatactaaatgaaaagttttatttttgccaagcacaccaagcacctttgaaaaatacatactccatactttgtttttaattaatttcatttaaagatagcaaatgattataagcaagagaaacaagtcttttactgttttgaggctgttttaacttacagtataagccacatactagaattctgtaatttcagtcacagacatataataatgtggactcatgtgacaatgtggaaatgtagttctggaaaaaaacgaatgcaatttgtcaatcctgatgttaattctcaagggtataatgtcactctaatattataaccaacaacattatcttgtttaatatttaaagcaacacttagaaatgtttataaatgatgattctctcttatctttatacagttctattggagagaaggttgaaattgttcacaatttagatgatggtctttcctaataagagtcttaattttgtgactatataagtcattgcagttagtctttaatgaaatgaattttattaatgtaaaacaaattctgagacaattatttgtttcctttaaataatctgctatttaattattattgtcgttgtttgcaaaatgtatttttggaatgttaacctcttttcatacctgcatacttgaacttgtcttttgtgtgggggccttaaaattcataataggaagtggaggcagtgaaaggaagtaagaaaaggaaattatgctaaaagatggtttgcaaatttaaattctttaaatgaacatatcacaaaatgttgttaagacccaggatgtccgttaagaatgtgtcttggcaaccttaatttgcatgttagtatatattttcttagttacacagttttattttggtatttgcttaaaaaatgtaataccattgtagaaattaccctatgtactgatatatttactacctcttctctagagaagacaatctgtctttaaagggaaaaacactggtcaataagtagtgatcaaaattatcactattctggctaaccttgctgcaaagctaaatacatagattattaaaatatgccttccctttagattttaaactgtttccaaaatgctgtttggcaccctttcatttcttccacgttagtgaagttttctttgaattggttcacagtttatcatgaggcaaggttaatttaacaaataagtcatcatagggaacaaaacaaactgcaagggaattgcctttgtgtgcaacttgttataatatctagttctaagtctaaaggagtaaaagtccaaagactttatgtttaagagcagctggtttgcaaattcacattttgttggtccttgacttccacagagcatgacttagccatttactgggtaaggatatgcataatcttggactcccatgtaattggaataaacttcatatcaatgtttcaaataaatgctatgtaccccttattccttttacatttctgcctttgtcttttatgacaatgttgcatgttgtgtttttttaaattatataaaactcatccttgaatgactgtatgaatgaaaaatttataggaaattatgtaataaaatctgttttattagtttctcatacctttaaatactgtcaatactataactgttagtaagttacttactcaagctgtgtctatggggcagagaacagtcctcttctttaaaataatcatgatcaaaccagtcaagtcaatccaattagctgttagacagacaataaggataaccttctttttgacttaagcagtcaagttagtcaaaatagaaaaattggcttatatgggcacccagaactacagcattcaaaaattacttttaaaagtttcttcttttattaaaatggactttcttaaataaaatacatcctctgatagcagctatctctttttacttgtaatgattaattctaaatgcttcatgtaattgagggacattatgagaagactagaaagtatctcatcagataatcctaagggctgtaacttctacttgccataaacaaagtataattaagagtgagtagcaattggtttggggagtcgtagttatatatgaaactttcttttgtttctcatgatgtatgtaaaatgtttgcagaaggatggtagaaaatgttactaatgaatttagagtggtttgggagaatacactgatacttcctcatttgaaaattataaggagttacaaggggaactaagaaccagaagtggctggcctctagcttttcaatacctgataagtgttcttggttatgttttgaacacttaaatttctcaacaaatggctatgtctatatttatgtaggggccacccttgccctacttgcatgccactttgacttttaactgaaatcagtgtgaattctgtatgcataagggatgtaataaagaggcgggatcattaacgctatatcgttgcatactatttttcatatgccttacaatattttctgggatgttattaaaatgaaagcattttattgccaaaataaatctatgttgttacttataatctgcattagcagtagaaaaataatgtagcaaaaacatattgtacagtacaaaattataaaatatatattttgccaataatataaaaatagattgaggagaaagaagcacatttgttatagcacaaacttataacaaaatccaccgttaaatttggcagtcatattttttaaaagtatgtcgatttagttctaagttttgtcagatttacttcatctaccatctttttaacttgctgcttgatacttttccagcaatttatttcatagccttgcaatctgtggatgtaatttcttttgttttattcccttccataaaatttattaaattttattttgtgataacactcataccatattttctcctcttatttcttctctttcaataacaacagcagaaagtcacagcaagtgagctcatagggctcctctgaattttggacatgtgtgagatttttgtatttttcacagcctcgagtcagaatgatcaataaagatgtcccaaccacaaaaaattatattagttagggattctttaatttgttttgtactgaatactactttgaaacataagttaaagccattagctgtgtttttgtagggatggtgggaaggaataaaaaataaatgtattaacataaaacatactaaaacagaaatatggcaaaatgatgtaaaaagatttttcctactattctgagggctgttgaaatcccaggctattgctatatctccattgacaaagtgggataaaaaatgcctttgtcaaataattttttttctttctttaaattttagttatttattttaataatttgtccccttttatttttcttatctaggtatgtgtagcattctacaaggcatgctgggtaaaatatactatgcaaatgtgtacagtgctgcatgttttgttctccctctgctttagtggctttaaagaaaaaaacgtggtgttatttttgtgaataaaaacattaacaaagaaaatgcagagtgcatgcatagagtatcctcatttctatggatttgttttatggaatttaaatgtgtacaaaacaactgcattactttttttcttttatataataaatg

SEQ ID NO: 4152 - DNA, 2181 bp, Homo sapiens
  source 1..2181: mol_type = unassigned DNA
gtgctctgtattgggaaggcagataaaatgccaggtctggactgcctctggggataacctcaccctgtgggatgtgaatgaatagcatcttgcctggtaaatccacaggaattgataaggcaggcgcagttctcccaaacaggccttttctctttaagctgtagctgtggtttctgcagcaattttgtttttgccttgaaagaggtgctctggattatcacacctccatgtatgacaatttgtacctgcatggaattgaagactcggaggctggttcagcggattcctacacaagcaggccgtctgactccgatgtctctttggaagaggaccgggaagcaattcgacaggagagagaacagcaagcagctatccagcttgagagagcaaagtccaaacctgtagcatttgccgtgaagacaaatgtgagctactgcggcgccctggacgaggatgtgcctgttccaagcacagctatctcctttgatgctaaagactttctacatattaaagagaaatataacaatgattggtggataggaaggctggtgaaagagggctgtgaaattggcttcattccaagtccactcagattggagaacatacggatccagcaagaacaaaaaagaggacgttttcacggagggaaatcaagtggaaattcttcttcaagtcttggagaaatggtatctgggacattccgagcaactcccacatcaacagcaaaacagaagcaaaaagtgacggagcacattcctccttacgatgttgtaccgtcaatgcgtccggtggtgttagtggggccgtcactgaaaggttacgaggtaacagacatgatgcagaaagccctctttgatttcctgaagcacaggtttgatgggaggatttcaataacgagagtgacagctgacatttctcttgctaagaggtctgtcctaaataatcccagcaagagagcaataattgaacgttcgaacacccggtccagcttagcggaagtacaaagtgaaattgaaagaatctttgagttggcaagatctttgcaactggttgttcttgatgcagacaccatcaatcacccagcacaacttataaagacttccttagcaccaattattgttcatgtaaaagtctcatctccaaaggttttacagcggttgattaaatctagaggaaagtcacaaagtaaacacttgaatgttcaactggtggcagctgataaacttgcacaatgccccccagaaatgtttgatgttatattggatgaaaatcagcttgaggatgcatgtgaacatctaggggagtacctggaggcgtactggcgtgccacccacacaaccagtagcacacccatgaccccgctgctgggaaggaatttgggctccacggcactctcaccatatcccacagcaatttctgggttacagagtcagcgaatgaggcacagcaaccactccacagagaactctccaattgaaagacgaagtctaatgacctctgatgaaaattatcacaatgaaagggctcggaagagtaggaaccgcttgtcttccagttctcagcatagccgagatcattaccctcttgtggaagaagattaccctgactcataccaggacacttacaaaccccataggaaccgaggatcacctgggggatatagccatgactcccgacataggctttgagtctaatgaaacaaaaaatattcatctgttgacaatttgccatagcagtgctaggataaaccaatcatcttaacttggctaacatagcacagtatttactgtgctaatgggctgctgtcattttatgctaagtaaggggcaaaaaaaaaaattacattatgcccttgagtctagatggatattagatgcccgatcatatagatatttttaagtgcaacatttacatgataacagtacattttgttttcttcatagatttagacacatcaatttgtaatttagggtacttacaaggcacatataaaataatttcccatgctggaaattccaaatgaccagttccagttggaaccaatttataaaccaattcctgttggaatttgggtgaattgactagaaagtctacttgagcatgttgtaatcaactgaaaaatctggggggaaaaaaaaaaaactaataagaaaatcgaaataccaatagaagccaaatcca

SEQ ID NO: 4153 - DNA, 7974 bp, Homo sapiens
  source 1..7974: mol_type = unassigned DNA
agcccagcctcgggggccagccccctccgcccaccgcacacgggctggccatgcggcggctctgaacgatgtcctcctcctcctacgccaagaacgggaccgcggacgggccgcactcccccacctcgcaggtggcccgaggcaccacaacccggaggagcaggttgaaaagatccgatggcagcaccacttcgaccagcttcatcctcagacagggttcagcggattcctacacaagcaggccgtctgactccgatgtctctttggaagaggaccgggaagcaattcgacaggagagagaacagcaagcagctatccagcttgagagagcaaagtccaaacctgtagcatttgccgtgaagacaaatgtgagctactgcggcgccctggacgaggatgtgcctgttccaagcacagctatctcctttgatgctaaagactttctacatattaaagagaaatataacaatgattggtggataggaaggctggtgaaagagggctgtgaaattggcttcattccaagtccactcagattggagaacatacggatccagcaagaacaaaaaagaggacgttttcacggagggaaatcaagtggaaattcttcttcaagtcttggagaaatggtatctgggacattccgagcaactcccacatcaacagcaaaacagaagcaaaaagtgacggagcacattcctccttacgatgttgtaccgtcaatgcgtccggtggtgttagtggggccgtcactgaaaggttacgaggtaacagacatgatgcagaaagccctctttgatttcctgaagcacaggtttgatgggaggatttcaataacgagagtgacagctgacatttctcttgctaagaggtctgtcctaaataatcccagcaagagagcaataattgaacgttcgaacacccggtccagcttagcggaagtacaaagtgaaattgaaagaatctttgagttggcaagatctttgcaactggttgttcttgatgcagacaccatcaatcacccagcacaacttataaagacttccttagcaccaattattgttcatgtaaaagtctcatctccaaaggttttacagcggttgattaaatctagaggaaagtcacaaagtaaacacttgaatgttcaactggtggcagctgataaacttgcacaatgccccccagaaatgtttgatgttatattggatgaaaatcagcttgaggatgcatgtgaacatctaggggagtacctggaggcgtactggcgtgccacccacacaaccagtagcacacccatgaccccgctgctgggaaggaatttgggctccacggcactctcaccatatcccacagcaatttctgggttacagagtcagcgaatgaggcacagcaaccactccacagagaactctccaattgaaagacgaagtctaatgacctctgatgaaaattatcacaatgaaagggctcggaagagtaggaaccgcttgtcttccagttctcagcatagccgagatcattaccctcttgtggaagaagattaccctgactcataccaggacacttacaaaccccataggaaccgaggatcacctgggggatatagccatgactcccgacataggctttgagtctaatgaaacaaaaaatattcatctgttgacaatttgccatagcagtgctaggataaaccaatcatcttaacttggctaacatagcacagtatttactgtgctaatgggctgctgtcattttatgctaagtaaggggcaaaaaaaaaaattacattatgcccttgagtctagatggatattagatgcccgatcatatagatatttttaagtgcaacatttacatgataacagtacattttgttttcttcatagatttagacacatcaatttgtaatttagggtacttacaaggcacatataaaataatttcccatgctggaaattccaaatgaccagttccagttggaaccaatttataaaccaattcctgttggaatttgggtgaattgactagaaagtctacttgagcatgttgtaatcaactgaaaaatctggggggaaaaaaaaaaaactaataagaaaatcgaaataccaatagaagccaaatccagctttggtatttatttgctggaagctaaatttacacttaaagttggagtgtataaacattttaatatatgttaatgttgccagaatgacttttcagacttaccaaatgtattgatagtgccaaaaaaaaaatctcagaaatcttaatgcagaaattatatagtctcctcagattttaatatttttatttctttcctggcacagctgttgtattcaaagtgttttgctttttgtttggtcagtactgttagctcatttgaagttggcaaaaacaaatacaaacaagcaaaaaacctcaaatttttttcagcagtgagagagaatagtaaagagaggcccaagcatagctggttatgtgaaatataaaatggggtgttgttctccctttaatcaatctgagcacaactacatacatccaggaatctgaagtcagatagtaaggatgtggtaccaatcctcccgagtgcaatgctaaacacttccaggtgggaattcatctatttcacttaacacaaacgcagggtctgtatttcctgccaacaagattgagtatctttccattgcttctctcagtctctgtctttgaatatctgaatgttctggcccttcaacaaattctttaaatcatgctaaggaatttcgttttatgtggacacactcaactttgatattcaggagatgtttttacaaaatgactaattgaaaaaagttgaaacaaatgattttaaaagcttgcagtaaaaaataaactcatagattcagcaaatatttgttgactaaaattatagcatttttaatgcagaaaattataaagaatttggagattgagctgccttatttctaatgaacactcctcttcatcttattaagtcttcacagtttttccagtggctataattatggaattggtgacctatgttttatattatcaaggaagccttagattcactctgatctaagaaattattgaaattgaccctttttacacaaatgtctttaaaaaaaaaaacttatttctaaatgtccatagtgcatgcattttctaaaaccccaataagtccagccataaaagttcttttctgctagtacatgtcatgaagcctatttttgaaaataatgataattaattttatagtatcttcttttctccccaagcctttcagtattcaggcactcaaagcatgcaccagttcagtaatcttcttgaccatggaaataagttccacattactgatgagttatatatatatcttgaaccccattacaacctcaccacatccccctgcatttatgttcagtgtttgtaccccattatgaacctgtttagctgataatgaggatacctataattctgtaagtcatttcaaatatttgatacaattaaaaaatatgggcttagtaaattttaaaagttaacatgtgatactggcttgtgagattcttctgtcatctagtgaagcttataaaactttcagttaagacattttaaaagagttatatccattaggcactttaataaacatataacctgccattactgaatactttgttagaacacagaagagcatcttccagcaaacaaaaatatatttattacatgtacagcacatacttgcatgagaaagaaaacattagccaaaacatttttctatatgctttactggtttcttgtttatgcgcattaaagtatttaattgcaaagagtgcaccaaggtgtacaaatttagactagacagctgttcagctttttctgtagtagcattagcagtttggtcatttaactactttaagatacttacattttatggcaggtagctgtaacagcatttaaatatatttcctagtcatcaagattaccatcttctttcaactttttaaaagtcacttgtttttaaaggtttttcaaagccttgtttttagtcttccatgtcatgccgataaagagagtctcattcaatatctgtgcacaaaaccaatctatcaattaccatcagatgtccatacctgttttgctttgcattcttattcaaaagctgacaatcttggaaagggtataatgtatattttattgatggatatatttaaatgtttactttaatttggaatattctttccccttctttctgtaataagtttatcttcctcaaataaggggatatacatcttattttttttaaagacttaagagtttattgtgtaaatgatacttaaaatctagatatatactaaatgaaaagttttatttttgccaagcacaccaagcacctttgaaaaatacatactccatactttgtttttaattaatttcatttaaagatagcaaatgattataagcaagagaaacaagtcttttactgttttgaggctgttttaacttacagtataagccacatactagaattctgtaatttcagtcacagacatataataatgtggactcatgtgacaatgtggaaatgtagttctggaaaaaaacgaatgcaatttgtcaatcctgatgttaattctcaagggtataatgtcactctaatattataaccaacaacattatcttgtttaatatttaaagcaacacttagaaatgtttataaatgatgattctctcttatctttatacagttctattggagagaaggttgaaattgttcacaatttagatgatggtctttcctaataagagtcttaattttgtgactatataagtcattgcagttagtctttaatgaaatgaattttattaatgtaaaacaaattctgagacaattatttgtttcctttaaataatctgctatttaattattattgtcgttgtttgcaaaatgtatttttggaatgttaacctcttttcatacctgcatacttgaacttgtcttttgtgtgggggccttaaaattcataataggaagtggaggcagtgaaaggaagtaagaaaaggaaattatgctaaaagatggtttgcaaatttaaattctttaaatgaacatatcacaaaatgttgttaagacccaggatgtccgttaagaatgtgtcttggcaaccttaatttgcatgttagtatatattttcttagttacacagttttattttggtatttgcttaaaaaatgtaataccattgtagaaattaccctatgtactgatatatttactacctcttctctagagaagacaatctgtctttaaagggaaaaacactggtcaataagtagtgatcaaaattatcactattctggctaaccttgctgcaaagctaaatacatagattattaaaatatgccttccctttagattttaaactgtttccaaaatgctgtttggcaccctttcatttcttccacgttagtgaagttttctttgaattggttcacagtttatcatgaggcaaggttaatttaacaaataagtcatcatagggaacaaaacaaactgcaagggaattgcctttgtgtgcaacttgttataatatctagttctaagtctaaaggagtaaaagtccaaagactttatgtttaagagcagctggtttgcaaattcacattttgttggtccttgacttccacagagcatgacttagccatttactgggtaaggatatgcataatcttggactcccatgtaattggaataaacttcatatcaatgtttcaaataaatgctatgtaccccttattccttttacatttctgcctttgtcttttatgacaatgttgcatgttgtgtttttttaaattatataaaactcatccttgaatgactgtatgaatgaaaaatttataggaaattatgtaataaaatctgttttattagtttctcatacctttaaatactgtcaatactataactgttagtaagttacttactcaagctgtgtctatggggcagagaacagtcctcttctttaaaataatcatgatcaaaccagtcaagtcaatccaattagctgttagacagacaataaggataaccttctttttgacttaagcagtcaagttagtcaaaatagaaaaattggcttatatgggcacccagaactacagcattcaaaaattacttttaaaagtttcttcttttattaaaatggactttcttaaataaaatacatcctctgatagcagctatctctttttacttgtaatgattaattctaaatgcttcatgtaattgagggacattatgagaagactagaaagtatctcatcagataatcctaagggctgtaacttctacttgccataaacaaagtataattaagagtgagtagcaattggtttggggagtcgtagttatatatgaaactttcttttgtttctcatgatgtatgtaaaatgtttgcagaaggatggtagaaaatgttactaatgaatttagagtggtttgggagaatacactgatacttcctcatttgaaaattataaggagttacaaggggaactaagaaccagaagtggctggcctctagcttttcaatacctgataagtgttcttggttatgttttgaacacttaaatttctcaacaaatggctatgtctatatttatgtaggggccacccttgccctacttgcatgccactttgacttttaactgaaatcagtgtgaattctgtatgcataagggatgtaataaagaggcgggatcattaacgctatatcgttgcatactatttttcatatgccttacaatattttctgggatgttattaaaatgaaagcattttattgccaaaataaatctatgttgttacttataatctgcattagcagtagaaaaataatgtagcaaaaacatattgtacagtacaaaattataaaatatatattttgccaataatataaaaatagattgaggagaaagaagcacatttgttatagcacaaacttataacaaaatccaccgttaaatttggcagtcatattttttaaaagtatgtcgatttagttctaagttttgtcagatttacttcatctaccatctttttaacttgctgcttgatacttttccagcaatttatttcatagccttgcaatctgtggatgtaatttcttttgttttattcccttccataaaatttattaaattttattttgtgataacactcataccatattttctcctcttatttcttctctttcaataacaacagcagaaagtcacagcaagtgagctcatagggctcctctgaattttggacatgtgtgagatttttgtatttttcacagcctcgagtcagaatgatcaataaagatgtcccaaccacaaaaaattatattagttagggattctttaatttgttttgtactgaatactactttgaaacataagttaaagccattagctgtgtttttgtagggatggtgggaaggaataaaaaataaatgtattaacataaaacatactaaaacagaaatatggcaaaatgatgtaaaaagatttttcctactattctgagggctgttgaaatcccaggctattgctatatctccattgacaaagtgggataaaaaatgcctttgtcaaataattttttttctttctttaaattttagttatttattttaataatttgtccccttttatttttcttatctaggtatgtgtagcattctacaaggcatgctgggtaaaatatactatgcaaatgtgtacagtgctgcatgttttgttctccctctgctttagtggctttaaagaaaaaaacgtggtgttatttttgtgaataaaaacattaacaaagaaaatgcagagtgcatgcatagagtatcctcatttctatggatttgttttatggaatttaaatgtgtacaaaacaactgcattactttttttcttttatataataaatgaaaaaaacac

SEQ ID NO: 4154 - DNA, 7581 bp, Homo sapiens
  source 1..7581: mol_type = unassigned DNA
ttctattttctttgccagggttcagcggattcctacacaagcaggccgtctgactccgatgtctctttggaagaggaccgggaagcaattcgacaggagagagaacagcaagcagctatccagcttgagagagcaaagtccaaacctgtagcatttgccgtgaagacaaatgtgagctactgcggcgccctggacgaggatgtgcctgttccaagcacagctatctcctttgatgctaaagactttctacatattaaagagaaatataacaatgattggtggataggaaggctggtgaaagagggctgtgaaattggcttcattccaagtccactcagattggagaacatacggatccagcaagaacaaaaaagaggacgttttcacggagggaaatcaagtggaaattcttcttcaagtcttggagaaatggtatctgggacattccgagcaactcccacatcaacagcaaaacagaagcaaaaagtgacggagcacattcctccttacgatgttgtaccgtcaatgcgtccggtggtgttagtggggccgtcactgaaaggttacgaggtaacagacatgatgcagaaagccctctttgatttcctgaagcacaggtttgatgggaggatttcaataacgagagtgacagctgacatttctcttgctaagaggtctgtcctaaataatcccagcaagagagcaataattgaacgttcgaacacccggtccagcttagcggaagtacaaagtgaaattgaaagaatctttgagttggcaagatctttgcaactggttgttcttgatgcagacaccatcaatcacccagcacaacttataaagacttccttagcaccaattattgttcatgtaaaagtctcatctccaaaggttttacagcggttgattaaatctagaggaaagtcacaaagtaaacacttgaatgttcaactggtggcagctgataaacttgcacaatgccccccaagtcagcgaatgaggcacagcaaccactccacagagaactctccaattgaaagacgaagtctaatgacctctgatgaaaattatcacaatgaaagggctcggaagagtaggaaccgcttgtcttccagttctcagcatagccgagatcattaccctcttgtggaagaagattaccctgactcataccaggacacttacaaaccccataggaaccgaggatcacctgggggatatagccatgactcccgacataggctttgagtctaatgaaacaaaaaatattcatctgttgacaatttgccatagcagtgctaggataaaccaatcatcttaacttggctaacatagcacagtatttactgtgctaatgggctgctgtcattttatgctaagtaaggggcaaaaaaaaaaattacattatgcccttgagtctagatggatattagatgcccgatcatatagatatttttaagtgcaacatttacatgataacagtacattttgttttcttcatagatttagacacatcaatttgtaatttagggtacttacaaggcacatataaaataatttcccatgctggaaattccaaatgaccagttccagttggaaccaatttataaaccaattcctgttggaatttgggtgaattgactagaaagtctacttgagcatgttgtaatcaactgaaaaatctggggggaaaaaaaaaaaactaataagaaaatcgaaataccaatagaagccaaatccagctttggtatttatttgctggaagctaaatttacacttaaagttggagtgtataaacattttaatatatgttaatgttgccagaatgacttttcagacttaccaaatgtattgatagtgccaaaaaaaaaatctcagaaatcttaatgcagaaattatatagtctcctcagattttaatatttttatttctttcctggcacagctgttgtattcaaagtgttttgctttttgtttggtcagtactgttagctcatttgaagttggcaaaaacaaatacaaacaagcaaaaaacctcaaatttttttcagcagtgagagagaatagtaaagagaggcccaagcatagctggttatgtgaaatataaaatggggtgttgttctccctttaatcaatctgagcacaactacatacatccaggaatctgaagtcagatagtaaggatgtggtaccaatcctcccgagtgcaatgctaaacacttccaggtgggaattcatctatttcacttaacacaaacgcagggtctgtatttcctgccaacaagattgagtatctttccattgcttctctcagtctctgtctttgaatatctgaatgttctggcccttcaacaaattctttaaatcatgctaaggaatttcgttttatgtggacacactcaactttgatattcaggagatgtttttacaaaatgactaattgaaaaaagttgaaacaaatgattttaaaagcttgcagtaaaaaataaactcatagattcagcaaatatttgttgactaaaattatagcatttttaatgcagaaaattataaagaatttggagattgagctgccttatttctaatgaacactcctcttcatcttattaagtcttcacagtttttccagtggctataattatggaattggtgacctatgttttatattatcaaggaagccttagattcactctgatctaagaaattattgaaattgaccctttttacacaaatgtctttaaaaaaaaaaacttatttctaaatgtccatagtgcatgcattttctaaaaccccaataagtccagccataaaagttcttttctgctagtacatgtcatgaagcctatttttgaaaataatgataattaattttatagtatcttcttttctccccaagcctttcagtattcaggcactcaaagcatgcaccagttcagtaatcttcttgaccatggaaataagttccacattactgatgagttatatatatatcttgaaccccattacaacctcaccacatccccctgcatttatgttcagtgtttgtaccccattatgaacctgtttagctgataatgaggatacctataattctgtaagtcatttcaaatatttgatacaattaaaaaatatgggcttagtaaattttaaaagttaacatgtgatactggcttgtgagattcttctgtcatctagtgaagcttataaaactttcagttaagacattttaaaagagttatatccattaggcactttaataaacatataacctgccattactgaatactttgttagaacacagaagagcatcttccagcaaacaaaaatatatttattacatgtacagcacatacttgcatgagaaagaaaacattagccaaaacatttttctatatgctttactggtttcttgtttatgcgcattaaagtatttaattgcaaagagtgcaccaaggtgtacaaatttagactagacagctgttcagctttttctgtagtagcattagcagtttggtcatttaactactttaagatacttacattttatggcaggtagctgtaacagcatttaaatatatttcctagtcatcaagattaccatcttctttcaactttttaaaagtcacttgtttttaaaggtttttcaaagccttgtttttagtcttccatgtcatgccgataaagagagtctcattcaatatctgtgcacaaaaccaatctatcaattaccatcagatgtccatacctgttttgctttgcattcttattcaaaagctgacaatcttggaaagggtataatgtatattttattgatggatatatttaaatgtttactttaatttggaatattctttccccttctttctgtaataagtttatcttcctcaaataaggggatatacatcttattttttttaaagacttaagagtttattgtgtaaatgatacttaaaatctagatatatactaaatgaaaagttttatttttgccaagcacaccaagcacctttgaaaaatacatactccatactttgtttttaattaatttcatttaaagatagcaaatgattataagcaagagaaacaagtcttttactgttttgaggctgttttaacttacagtataagccacatactagaattctgtaatttcagtcacagacatataataatgtggactcatgtgacaatgtggaaatgtagttctggaaaaaaacgaatgcaatttgtcaatcctgatgttaattctcaagggtataatgtcactctaatattataaccaacaacattatcttgtttaatatttaaagcaacacttagaaatgtttataaatgatgattctctcttatctttatacagttctattggagagaaggttgaaattgttcacaatttagatgatggtctttcctaataagagtcttaattttgtgactatataagtcattgcagttagtctttaatgaaatgaattttattaatgtaaaacaaattctgagacaattatttgtttcctttaaataatctgctatttaattattattgtcgttgtttgcaaaatgtatttttggaatgttaacctcttttcatacctgcatacttgaacttgtcttttgtgtgggggccttaaaattcataataggaagtggaggcagtgaaaggaagtaagaaaaggaaattatgctaaaagatggtttgcaaatttaaattctttaaatgaacatatcacaaaatgttgttaagacccaggatgtccgttaagaatgtgtcttggcaaccttaatttgcatgttagtatatattttcttagttacacagttttattttggtatttgcttaaaaaatgtaataccattgtagaaattaccctatgtactgatatatttactacctcttctctagagaagacaatctgtctttaaagggaaaaacactggtcaataagtagtgatcaaaattatcactattctggctaaccttgctgcaaagctaaatacatagattattaaaatatgccttccctttagattttaaactgtttccaaaatgctgtttggcaccctttcatttcttccacgttagtgaagttttctttgaattggttcacagtttatcatgaggcaaggttaatttaacaaataagtcatcatagggaacaaaacaaactgcaagggaattgcctttgtgtgcaacttgttataatatctagttctaagtctaaaggagtaaaagtccaaagactttatgtttaagagcagctggtttgcaaattcacattttgttggtccttgacttccacagagcatgacttagccatttactgggtaaggatatgcataatcttggactcccatgtaattggaataaacttcatatcaatgtttcaaataaatgctatgtaccccttattccttttacatttctgcctttgtcttttatgacaatgttgcatgttgtgtttttttaaattatataaaactcatccttgaatgactgtatgaatgaaaaatttataggaaattatgtaataaaatctgttttattagtttctcatacctttaaatactgtcaatactataactgttagtaagttacttactcaagctgtgtctatggggcagagaacagtcctcttctttaaaataatcatgatcaaaccagtcaagtcaatccaattagctgttagacagacaataaggataaccttctttttgacttaagcagtcaagttagtcaaaatagaaaaattggcttatatgggcacccagaactacagcattcaaaaattacttttaaaagtttcttcttttattaaaatggactttcttaaataaaatacatcctctgatagcagctatctctttttacttgtaatgattaattctaaatgcttcatgtaattgagggacattatgagaagactagaaagtatctcatcagataatcctaagggctgtaacttctacttgccataaacaaagtataattaagagtgagtagcaattggtttggggagtcgtagttatatatgaaactttcttttgtttctcatgatgtatgtaaaatgtttgcagaaggatggtagaaaatgttactaatgaatttagagtggtttgggagaatacactgatacttcctcatttgaaaattataaggagttacaaggggaactaagaaccagaagtggctggcctctagcttttcaatacctgataagtgttcttggttatgttttgaacacttaaatttctcaacaaatggctatgtctatatttatgtaggggccacccttgccctacttgcatgccactttgacttttaactgaaatcagtgtgaattctgtatgcataagggatgtaataaagaggcgggatcattaacgctatatcgttgcatactatttttcatatgccttacaatattttctgggatgttattaaaatgaaagcattttattgccaaaataaatctatgttgttacttataatctgcattagcagtagaaaaataatgtagcaaaaacatattgtacagtacaaaattataaaatatatattttgccaataatataaaaatagattgaggagaaagaagcacatttgttatagcacaaacttataacaaaatccaccgttaaatttggcagtcatattttttaaaagtatgtcgatttagttctaagttttgtcagatttacttcatctaccatctttttaacttgctgcttgatacttttccagcaatttatttcatagccttgcaatctgtggatgtaatttcttttgttttattcccttccataaaatttattaaattttattttgtgataacactcataccatattttctcctcttatttcttctctttcaataacaacagcagaaagtcacagcaagtgagctcatagggctcctctgaattttggacatgtgtgagatttttgtatttttcacagcctcgagtcagaatgatcaataaagatgtcccaaccacaaaaaattatattagttagggattctttaatttgttttgtactgaatactactttgaaacataagttaaagccattagctgtgtttttgtagggatggtgggaaggaataaaaaataaatgtattaacataaaacatactaaaacagaaatatggcaaaatgatgtaaaaagatttttcctactattctgagggctgttgaaatcccaggctattgctatatctccattgacaaagtgggataaaaaatgcctttgtcaaataattttttttctttctttaaattttagttatttattttaataatttgtccccttttatttttcttatctaggtatgtgtagcattctacaaggcatgctgggtaaaatatactatgcaaatgtgtacagtgctgcatgttttgttctccctctgctttagtggctttaaagaaaaaaacgtggtgttatttttgtgaataaaaacattaacaaagaaaatgcagagtgcatgcatagagtatcctcatttctatggatttgttttatggaatttaaatgtgtacaaaacaactgcattactttttttcttttatataataaatg

SEQ ID NO: 4155 - DNA, 1266 bp, Homo sapiens
  source 1..1266: mol_type = unassigned DNA
cggcttgtcacctgccctaggagacgcagccgccggaccctgcccagggcacccacgcctcggcgaccaccatgtcccagaccaaaatgctgaaggtccgcgtgaccctcttctgcatcctggcaggcatcgtgctggccatgacagccgtggtaaccgaccactgggctgtgctgagcccccacatggagcaccacaacactacctgcgaggcggcccacttcggcctctggcggatttgtaccaagcgcatccccatggacgacagcaagacctgcgggcccatcaccctgcccggggagaagaactgttcctacttcaggcattttaaccccggcgagagctcggagatcttcgaattcaccactcagaaggagtacagcatctcggcagccgccatcgccatcttcagccttggcttcatcatcctgggcagcctctgtgtcctcctgtccctcgggaagaagagggactatctgctgcgacccgcgtccatgttctatgcctttgcaggtctctgcatcctcgtctcggtggaggtcatgcggcagtcggtgaagcgcatgattgacagtgaggacaccgtctggatcgagtactattactcctggtcctttgcctgcgcctgtgccgccttcatcctcctctttctcggcggtctcgccctcctgctgttctccctgcctcgaatgccccggaacccatgggagtcctgcatggatgctgagcccgagcactaaccctcctgcggccctagcgaccctcaggcttcttccccaggaagcggggtcttggcctggaaccttccagagaggaggcgggagcaattttagccccaccctgctcccatctgcccccctgcaacagtcgcaggctgcttcctctctctgagttcctctgggctgccgcaggctcccctgggaatagagcaagacgtgagtcctaacctggccacagttgggggaggcagagccagcaggtggacaggtgtttgcaggggcccaacttcccctggagctcagaggtgtccccactgtaccagcctctgataagctgcctccagttgtcctttatgaacattgcagggacaacctgtgtttgccagctgggtgttccgtgtaaatagccagcctgtctctttctcggtgataaaacacaccctctctggtgagcccagcgtcccctccttggcttccaggagccctgggaagcatttttaactgggtagaatctgactgtggcttgaaataaaaagctctcagaaaa

SEQ ID NO: 4156 - DNA, 2384 bp, Homo sapiens
  source 1..2384: mol_type = unassigned DNA
gcggcgcagggagctgtccggttcagcaccacccgtaatgcagtaggtgggagcgcctccgcgggcgcccagccggtagcgagtggggggcaggcgcgcggcccaccctgcagcaagacgccggctccctcgtttccaggagctttgcagatagggggagggaaatccgcctcgattctccaggagaaaccccctctctcccccacttcgccaacactacccccgccaccaacaacaataaccgccgccgctgctcgtcctgctgccgccgccgccgccgcgcctgcccgccctgccgccgccgccgccgccgccgccgctgcccgggcaaaaccatggaaagcgagacccccgcacctgtgcagctgagctcaagggcttacagaatactgggaagtctggtctgaaacgaaagcgccgagaccccccaaggaagagaactggcgaagcaaaggattttcatggcgcaggccgcagagccgagaacgaagaccgaaggttgcatctcggctctcacagtctctaactgtctaggtcccgaccatgagaaatggtgttgagaattcggctgttccctggttcactgtggaagccatctccaaattaactatcacatatggaaactggagaccagaattttagaaaaagagattaaggcatctcacttgggggggtggggggtgtctttttattttttttttccttttctttttaaaaaaaaaacactgcaactggaacagtttctgatctcaaaaggcaagcctcttcccgtgtgatctttataatttacactcttttccgtgagctttcttacctccctttttttataactctccatattctctattcatacatatatccattatattagtagtggaataatttttatttttatttattttttttggctttagtacttgcaccctcacacacactctcccgagaaccagaagtcggttgggtgtttatataatgaagaattatggggctgtttgatcgaggtgttcaaatgcttttaaccaccgttggtgctttcgctgccttcagcctgatgaccatagctgtgggaaccgactattggctctactccagaggggtttgcaagaccaaaagtgtcagtgagaatgaaaccagcaaaaagaacgaggaagttatgacccattccggattatggagaacctgctgcctagaagggaatttcaaaggtctgtgcaagcaaattgatcacttcccagaggatgcagattacgaagctgacacagcagaatatttcctccgggccgtgagggcctccagcattttcccaatcctgagtgtgattctgcttttcatgggtggcctctgcatcgcagccagcgagttctacaaaactcgacacaacatcatcctgagtgccggcatcttcttcgtgtctgcaggtctgagtaacatcattggcatcatagtgtacatatctgccaatgccggagacccctccaagagcgactccaaaaagaatagttactcatacggctggtccttctacttcggggccctgtccttcatcatcgccgagatggtcggggtgctggcggtgcacatgtttatcgaccggcacaaacagctgcgggccacggcccgcgccacggactacctccaggcctctgccatcacccgcatccccagctaccgctaccgctaccagcgccgcagccgctccagctcgcgctccacggagccctcacactccagggacgcctcccccgtgggcatcaagggcttcaacaccctgccgtccacggagatctccatgtacacgctcagcagggaccccctgaaggccgccaccacgcccaccgccacctacaactccgacagggataacagcttcctccaggttcacaactgtatccagaaggagaacaaggactctctccactccaacacagccaaccgccggaccacccccgtataaagaccgcgggcctcgccagaagaccgcgggaggagggcgcggtccccgggggcggggcggggcggggagacccagaccctccgctgggagaccttccaaaagcaaaaacaaaaaacaaaaaaaacaaaaaaacaaaaaacaaaaaaacacacacacacaaaaaaagagaaaaaacataacaagtaaattttaaaaaaaagaacaaaatataagaggaacaaagaagcaaaacaacaggaaatgtgggaaaatataaacgagggaagaaaacaaactttaaaaaaaagcgagagggataaaaaattaaaaatagaaaataaatctaaaagaaaatgcatgatttcccatgtaccattattttaacatttaataaaaatcaatttaaatgaaaaaataaaagggaaccaagataacattaaagcaaaaaaaa

SEQ ID NO: 4157 - DNA, 3088 bp, Homo sapiens
  source 1..3088: mol_type = unassigned DNA
actttttgcccgcctaagcgagccatagagccgtctccagagctgccggtgcctttaagaagactcggtctttcgggtcttctttttccccaatgggctccagtggtgcccgcagcaaaaggcaaacttgcctggctcatggggtgaaagggaggattgaagaatgccgcgttgggtgggtgctgagggagcgccagagtgcgctacgggcttcgctccccttcccctttccttaacccttcctagagcggaggaaccgggtcgtgctgcagcgcccaggagccagggcgctgactgtcctcggctccagaaactttgcgcggagagtgggcttgactgggcagagccgagccggctggctgacccgggaaggaacgggggaagggcggggtgagggaagaaagaccctttagcaccccgggtttctagcccgggcggcggtgtgcagctgcatgagggagctgtcccttcggcaccacggaccttaaagcctaggcgttaagacgacggaggcggggcaacaggcggggagctgtcccttcagcaccacggaccttggcgcccccagggaaaccagccggcccccgccccaggactctgtcttttctccagtttgagcgggggtgtcgggagcaggcggagagctttcctgcgaggctgtggaagcagtgaacactcttctcagcggctcgcctcccagcagtgctattttttgccatccgccctcacccccagcacacgcgctcgcacacacacgcacgcacgcacacacacacacacacacactcacacagagacctctctgggtttctttgccttgagtctcccggggctgtgagaagccaggcgcatctcaaaccgagctggcagctccaggctccggagccatgccctgcacggaccctcgtctttaccacgctcctgaggaatgaaaggaacccagggaccctcagaaggcagcagtgatgcggaccaaccccccggagcctgcacccttccgagggccataggcgacccagggaactggagagagctccagaaaggaaatcccagctttcccaaagtccctgtggatgctgacaaaaggagacctgaatttttggaagagcctgtactaggttacccggctgcagagtgattttcccctccggcactgactctccccctccaacccccagccgtccagagtaccatgaagaattatgaggatgtgtgacagaggtatccagatgttgatcaccactgtaggagcctttgccgcttttagtttaatgaccattgcagtgggcacggactactggttatattccagaggtgtgtgcaggactaaatctacaagtgataatgaaaccagcaggaagaatgaagaagtaatgacccattcggggctgtggaggacctgctgcctagaaggggctttccgaggcgtgtgcaagaaaatcgatcacttccctgaagatgctgactacgaacaggacacagccgaatatctcctgcgagctgtgagggcctccagtgtcttccccatcctcagtgtcacgctgctgttcttcggcgggctctgcgtggcagccagtgagttccaccgcagcagacacaacgtcattctcagcgcgggcatcttttttgtctctgcagggttaagcaacatcattggcatcatagtttatatatcagccaacgccggagaccccgggcagcgtgactccaaaaaaagttactcctatggttggtccttttatttcggagccttctctttcatcatcgcagaaattgtaggagtggttgccgtgcacatctatattgaaaaacatcagcagttacgagccaaatcccactcggagttcctgaagaaatctacttttgcccgcctcccaccctacaggtatcgattccggaggcggtcaagttctcgctccaccgagcccagatcccgagacctgtcccccatcagcaaaggcttccacaccatcccttccactgacatctcgatgttcaccctctcccgggacccctcaaagatcaccatggggaccctcctcaactccgaccgggaccacgcttttctacagttccacaattccacacccaaagagttcaaagagtcactgcataataatccggccaacaggcgcaccacgcccgtctgaactgacctctgacctctgccccacgcccagcacagccttgggggaagtgtacagagatgtctctgaggttgcatggcatggtccttgtgatggtattactttttacaaagaatgaaaccaaatggactcagccctctcccacattttcccctcaccctccaagtcctaacccctccatcctctctaacttttcaagccaatcccttaatgtcattcctctctctgtgtatctgtgccagatgttttcctttcttccttctttactggaaggacctccacattcttccctccttggaagaggactttactaaaagtcacaggtggtggccaggggggatttccgaatctccatcaggcgcgctcatagttgtccccattgtctacccacacaaatcctcaggaaaccaaccaccgcccaggtggccctgagggaggcattcacctttatgtgttagaaaaacatgaccagaaatcaaagatgtcagagccccgaagcagctaatgtaataagcactcatgttattaaaggttttgccttgtcgtaaccaaccgagccgggggtgttttgtttcttgtgggtgtttcctacacaaactcactcccctgcctccaaactggctcatgtccatcttggaagctgaactttgctcatccacacttgagccactaggaaggatctccctgcacctttggaagctagtaaggcattcccacaaatgtccaaatcaatgcatccttctacttgaattcctggaggctacctgggggtgggtgagtgaatgctggttttcaagatctaactttggcatgcaatagctctagaaccttgggcaagtcacctaagcctcaagcctcagtctcctcatctgtaaaatggaacatgataatagcactctcctccacagagttatgaggtttaaataaaactgtgtgtaaaa

SEQ ID NO: 4158 - DNA, 891 bp, Homo sapiens
  source 1..891: mol_type = unassigned DNA
atgagtgcctgcgggaggaaggccctgaccctgctgagcagtgtctttgctgtctgtggcttgggcctcctgggtatcgcggtcagcaccgactactggctgtacctggaggagggtgtgattgtgccccagaaccagagcaccgagatcaagatgtccctgcactcaggcctctggcgggtctgcttccttgcaggtgaggagcgggggcgttgcttcaccatagaatatgtgatgcccatgaacacccagctgacatccgagtccacggtcaatgttctaaagatgatccgctcagccacaccattccctctggtcagcctcttcttcatgttcattgggtttatcctgaacaacatcggacacatccgtccccaccggacgatactggcctttgtctctggcatcttctttatcctctcaggcctctctctcgtggtgggcctggtgctctacatctccagcatcaacgatgagatgctcaacaggaccaaggatgcagagacctacttcaactacaagtatgggtggtcgtttgccttcgccgccatctccttccttttaacggaggtaaagcccgtcaccctaagtatggataggctgggcctgggcactgccccactgagccggggagagtggggatgggggagaagggacattccacaaccattttggaccccggaccacccactctacttcccttcctcatcccagaatgtgtcactgtcttacctttctgggtctcctccggccaggatgtccccaggaccctgctcctgtccccacgtccacttcccaccccactcgagctgtgtcctgtgcagaccccagccaagggagatgaggcaggccccagcagcgagcccatcctctgctgtcttctccctgtag

SEQ ID NO: 4159 - DNA, 828 bp, Homo sapiens
  source 1..828: mol_type = unassigned DNA
atgagtgcctgcgggaggaaggccctgaccctgctgagcagtgtctttgctgtctgtggcttgggcctcctgggtatcgcggtcagcaccgactactggctgtacctggaggagggtgtgattgtgccccagaaccagagcaccgagatcaagatgtccctgcactcaggcctctggcgggtctgcttccttgcaggtgaggagcgggggcgttgcttcaccatagaatatgtgatgcccatgaacacccagctgacatccgagtccacggtcaatgttctaaagatgatccgctcagccacaccattccctctggtcagcctcttcttcatgttcattgggtttatcctgaacaacatcggacacatccgtccccaccggacgatactggcctttgtctctggcatcttctttatcctctcaggcctctctctcgtggtgggcctggtgctctacatctccagcatcaacgatgagatgctcaacaggaccaaggatgcagagacctacttcaactacaagtatgggtggtcgtttgccttcgccgccatctccttccttttaacggagagtgccggggtgatgtctgtgtacctgtttatgaagcggtacaccgcggaggacatgtacaggccccaccctggcttctaccgccctcggctgagcaactgctccgattactcaggccagttcctacacccagacgcctgggtcaggggccgcagcccctccgacatctccagcgaggcctccctgcagatgaacagcaactaccccgccttgctcaagtgccccgactatgatcagatgtcctcttcaccctgctga

SEQ ID NO: 4160 - DNA, 1311 bp, Homo sapiens
  source 1..1311: mol_type = unassigned DNA
attggcgccgagcggttccggctgactggacggggcgggcgtcccgggcagcctagcgcggtacctcccgccccgcgcgcccagccggcgagggacattggaccagggtcgggggtcgcggccgctccagcgagagccgtgggtactgccacctgctcacccactctccctagccccagagcgcagtccgtgctggtgggagcgtggcgactagttgcacagcaacggtccaggaagatgagtgcctgcgggaggaaggccctgaccctgctgagcagtgtctttgctgtctgtggcttgggcctcctgggtatcgcggtcagcaccgactactggctgtacctggaggagggtgtgattgtgccccagaaccagagcaccgagatcaagatgtccctgcactcaggcctctggcgggtctgcttccttgcaggtgaggagcgggggcgttgcttcaccatagaatatgtgatgcccatgaacacccagctgacatccgagtccacggtcaatgttctaaagatgatccgctcagccacaccattccctctggtcagcctcttcttcatgttcattgggtttatcctgaacaacatcggacacatccgtccccaccggacgatactggcctttgtctctggcatcttctttatcctctcaggcctctctctcgtggtgggcctggtgctctacatctccagcatcaacgatgagatgctcaacaggaccaaggatgcagagacctacttcaactacaagtatgggtggtcgtttgccttcgccgccatctccttccttttaacggagagtgccggggtgatgtctgtgtacctgtttatgaagcggtacaccgcggaggacatgtacaggccccaccctggcttctaccgccctcggctgagcaactgctccgattactcaggccagttcctacacccagacgcctgggtcaggggccgcagcccctccgacatctccagcgaggcctccctgcagatgaacagcaactaccccgccttgctcaagtgccccgactatgatcagatgtcctcttcaccctgctgagcctcggccgcccccatccctggactgtgggtggccagacaacccttcctgttctctccaggtgacccctgagccccaggcctgtggttgacaggcccaggccacccatgcttagctgttgtcacttgaccccagtcctctccctgcttctccagaagggctctaactgccccagcatgggtgtgggagtctggagtctgtgggcaagctgattgtctgggaacatgggagaagccccgcccatgt

SEQ ID NO: 4161 - DNA, 1853 bp, Homo sapiens
  source 1..1853: mol_type = unassigned DNA
ccaagtcctctgttctcaaactctgagcccaagggaaccccggccacatctcctccaaacacacacaggacctcaggtcccttcctgggtaccccaaactcttagccctagtggggtgctcagatctctcaggaaaaccagtttcccttttgttaaccccccagcggggaccccaaagcagccccttggagctgcagggagcttcagcgggcaccagttctcattcctctggagctcttggggggactccctcctgggaagccgaattctatctctaaacctcagggtgggggccttgtttttcctctgggccccgtcttctttgccaagttcttgagggcaacctagaccctcctctgaaccccagaggcttccccagccctggggatcatttttctcttctgaaccccagaagcaatctcgactttcgcatttgagattccagacaggactcggctctccctctttcatacccaggggaaactgagtccctcacccccttcaagaccccaggccgctcctcgctcccgcccctcgaggcccttcgccggctctgcctcctcccccttcccgaccccaccggccataagatgatgtggtccaacttcttcctgcaagaggagaaccggcggcggggggccgcgggccggcggcgggcgcacgggcagggcaggtcggggctgacgcccgagcgcgaggggaaggtgaagctggcgctgctgctggccgccgtgggcgccacgctggcggtgctgtccgtgggcaccgagttctgggtggagctcaacacctacaaggccaacggcagcgccgtgtgcgaagcggcccacctggggctgtggaaggcgtgcaccaagcggctgtggcaggcggacgtgcccgtggacagggacacctgcggccccgcggagctgcccggagaagcaaactgcacctattttaaattcttcaccacgggggagaatgcacgcatctttcagagaaccacaaagaaagaggtgaatctggcagctgcggtgatagcagtgctgggcctggcagtcatggccttggggtgcctctgtatcatcatggtgctcagtaaaggtgcagagttcctgctccgagttggagccgtctgctttggcctctcaggcctgctgctcttggtgagcctggaggtgttccggcattccgtgagggccctgctgcagagagtcagcccggagcctcccccggccccacgcctcacctacgagtactcctggtccctgggctgcggcgtgggggccggcctgatcctgctgttgggggccggctgctttctgctgctcacactgccttcctggccctgggggtccctctgtcccaagcgggggcaccgggccacctagagccacgcgtgagacttctctaagcaaccaccgagccctttgaccttctccattgtacccccaagatctttttgccccatctcctagagaaactgtgttctccctgctcgggggcccatgtttttttacacgcctgcctcctgtccccttatcctttctccctctgtaaatacgtttttctctgtggctgtatgtgggttgcttgggggtgggatgggaagaggctctttgcaaacgagggtccccagagaagactggcggggacctgatggggtagctggggtgtggggttgggggatgaggtcagggggtcttgggtgggagttgggggccccttcatttcccaggtctggatcgattcacttgccgggagagactttttacaactcatctgcagctccgggtgcggttgggggagatagcgaagggtctggcctcgctgtgatctgatttgggattaaaggtttggaaatttaacaa

SEQ ID NO: 4162 - DNA, 645 bp, Homo sapiens
  source 1..645: mol_type = unassigned DNA
atgatgtggtccaacttcttcctgcaagaggagaaccggcggcggggggccgcgggccggcggcgggcgcacgggcagggcaggtcggggctgacgcccgagcgcgaggggaaggtgaagctggcgctgctgctggccgccgtgggcgccacgctggcggtgctgtccgtgggcaccgagttctgggtggagctcaacacctacaaggccaacggcagcgccgtgtgcgaagcggcccacctggggctgtggaaggcgtgcaccaagcggctgtggcaggcggacgtgcccgtggacagggacacctgcggccccgcggagctgcccggagaagcaaactgcacctattttaaattcttcaccacgggggagaatgcacgcatctttcagagaaccacaaagaaaggcctgctgctcttggtgagcctggaggtgttccggcattccgtgagggccctgctgcagagagtcagcccggagcctcccccggccccacgcctcacctacgagtactcctggtccctgggctgcggcgtgggggccggcctgatcctgctgttgggggccggctgctttctgctgctcacactgccttcctggccctgggggtccctctgtcccaagcgggggcaccgggccacctag

SEQ ID NO: 4163 - DNA, 1635 bp, Homo sapiens
  source 1..1635: mol_type = unassigned DNA
ccaagtcctctgttctcaaactctgagcccaagggaaccccggccacatctcctccaaacacacacaggacctcaggtcccttcctgggtaccccaaactcttagccctagtggggtgctcagatctctcaggaaaaccagtttcccttttgttaaccccccagcggggaccccaaagcagccccttggagctgcagggagcttcagcgggcaccagttctcattcctctggagctcttggggggactccctcctgggaagccgaattctatctctaaacctcagggtgggggccttgtttttcctctgggccccgtcttctttgccaagttcttgagggcaacctagaccctcctctgaaccccagaggcttccccagccctggggatcatttttctcttctgaaccccagaagcaatctcgactttcgcatttgagattccagacaggactcggctctccctctttcatacccaggggaaactgagtccctcacccccttcaagaccccaggccgctcctcgctcccgcccctcgaggcccttcgccggctctgcctcctcccccttcccgaccccaccggccataagatgatgtggtccaacttcttcctgcaagaggagaaccggcggcggggggccgcgggccggcggcgggcgcacgggcagggcaggtcggggctgacgcccgagcgcgaggggaaggtgaagctggcgctgctgctggccgccgtgggcgccacgctggcggtgctgtccgtgggcaccgagttctgggtggagctcaacacctacaaggccaacggcagcgccgtgtgcgaagcggcccacctggggctgtggaaggcgtgcaccaagcggctgtggcaggcggacgtgcccgtggacagggacacctgcggccccgcggagctgcccggaggcctgctgctcttggtgagcctggaggtgttccggcattccgtgagggccctgctgcagagagtcagcccggagcctcccccggccccacgcctcacctacgagtactcctggtccctgggctgcggcgtgggggccggcctgatcctgctgttgggggccggctgctttctgctgctcacactgccttcctggccctgggggtccctctgtcccaagcgggggcaccgggccacctagagccacgcgtgagacttctctaagcaaccaccgagccctttgaccttctccattgtacccccaagatctttttgccccatctcctagagaaactgtgttctccctgctcgggggcccatgtttttttacacgcctgcctcctgtccccttatcctttctccctctgtaaatacgtttttctctgtggctgtatgtgggttgcttgggggtgggatgggaagaggctctttgcaaacgagggtccccagagaagactggcggggacctgatggggtagctggggtgtggggttgggggatgaggtcagggggtcttgggtgggagttgggggccccttcatttcccaggtctggatcgattcacttgccgggagagactttttacaactcatctgcagctccgggtgcggttgggggagatagcgaagggtctggcctcgctgtgatctgatttgggattaaaggtttggaaattt

SEQ ID NO: 4164 - DNA, 1016 bp, Homo sapiens
  source 1..1016: mol_type = unassigned DNA
tgctgcatggggtcaagcactctggtcggtcccatggagctctgcactgtagcttcccttccacaggccccgcagggcgccccctgcctctgaggatgagtcactgcagcagccgcgccctgaccctgctgagcagcgtgtttggtgcgtgtggcctgctcctggtaggcatcgcggtcagcactgactactggctgtacatggaagaaggcacagtgctaccgcagaaccagaccaccgaggtcaagatggccctgcacgccggcctctggcgagtctgcttctttgcaggtcgggagaaaggtcgctgtgtggcctcagaatattttcttgaaccggagatcaatttggtgacggaaaacacggagaatattctgaagacagtgcgcacggccacccccttccccatggtcagcctcttcctcgtgttcacggccttcgtcatcagcaacatcggccacatccgcccgcagaggaccattctggcttttgtctctggcatcttcttcatactatcgggcctctccttggtggtgggcttggttctttacatctccagcatcaacgacgaggtcatgaacaggcccagcagctctgagcagtattttcattatcgctacgggtggtcttttgccttcgccgcttcctccttcctactcaaagagggggccggcgtgatgtccgtgtacctgttcaccaagcgctacgcggaggaggagatgtaccgtccacacccggccttctaccgcccgcgtctcagcgactgctccgactactcgggccagttcctgcagcccgaggcgtggcgccgcggccggagcccctccgacatctccagcgacgtgtccatccaaatgacgcagaactaccctcccgccatcaagtacccggaccacctgcacatctccacctcgccctgctgaggcccgcccctcggagctccccctgcctcctcctcctcctcgtcttaggggggtctccctgcaatgcagcgcccccttccgtcctcgggactc

SEQ ID NO: 4165 - DNA, 2688 bp, Homo sapiens
  source 1..2688: mol_type = unassigned DNA
gcggccgcggggggtggggggtgggaggccgggagggggccgggacgccgggctccggggcgggggcggggggcgcgggcaccggcgaccccggtggcggcggcggcggccgggggaagcctcggggccggtcatgcggctgcggggcccgcggcccggagcgtccgcccagccctgagcgaggccccgcagggcgccccctgcctctgaggatgagtcactgcagcagccgcgccctgaccctgctgagcagcgtgtttggtgcgtgtggcctgctcctggtaggcatcgcggtcagcactgactactggctgtacatggaagaaggcacagtgctaccgcagaaccagaccaccgaggtcaagatggccctgcacgccggcctctggcgagtctgcttctttgcaggtcgggagaaaggtcgctgtgtggcctcagaatattttcttgaaccggagatcaatttggtgacggaaaacacggagaatattctgaagacagtgcgcacggccacccccttccccatggtcagcctcttcctcgtgttcacggccttcgtcatcagcaacatcggccacatccgcccgcagaggaccattctggcttttgtctctggcatcttcttcatactatcgggcctctccttggtggtgggcttggttctttacatctccagcatcaacgacgaggtcatgaacaggcccagcagctctgagcagtattttcattatcgctacgggtggtcttttgccttcgccgcttcctccttcctactcaaagagggggccggcgtgatgtccgtgtacctgttcaccaagcgctacgcggaggaggagatgtaccgtccacacccggccttctaccgcccgcgtctcagcgactgctccgactactcgggccagttcctgcagcccgaggcgtggcgccgcggccggagcccctccgacatctccagcgacgtgtccatccaaatgacgcagaactaccctcccgccatcaagtacccggaccacctgcacatctccacctcgccctgctgaggcccgcccctcggagctccccctgcctcctcctcctcctcgtcttaggggggtctccctgcaatgcagcgcccccttccgtcctcgggactcctcgctcccacccggaggaggctgcgccagctttaggccccgccctcctcccaatggctccgcccacagactcccttatttcaatggccgcgccctcttttcccgacctctccttttcattggtccctctcactcccaaatgactcctccccttcgttggcccgcccctttcctctggcccctcctctccaagaaaattagctcctccctcgttctccacctgctctgagctgggagcagccagaggcggtgcaagcgcccagctccccagagctccccaacctcggacctcaccgcaggggcgctgggctggagagcaggttcgggcagccgtcgggaataccgaccatcctcttctcccttctaacctgggcttcctttttccctgcctaatctcacctcctgacctgctgggtcctccggtgcagtgggagggccggcttgctccacccgcagccccggggtggcgtagggaagggggctggaagccacgggtacggttaacctggcccttccctccccatctcccctacttccctggaaggtcccattctttctcaccggctgggctcttttctgcttcctgaaggttacctgccttttagggggctcttgtctaaaggatcttcttgctttctcagctatccttggcttctttttcgtcttcctcctcctttaactctttctctcctttcctcccttcacccgttcgtcccaagcccttgggtgcatcccgccctaggcgcacaccagacggccagaatggggaccctagggtggagggaattcccccacgccatctccgcacctgtgcccgcctctcccccctcgaggccccgtcgagggagggaggggcagtagcgggggtcgacaccccccccaaacctctaagtcttccattttctggctctcctcctcattgacgtccctcttcccccctcagaaccccaactctggcctctttcaagggcccgtccgccccgttggacagattttggggggagaggaggtcaccaggaactcgcccacccccccttattagggaaagaggggcgaggtagcacagtgctgtacacggaaccagaatggcccccggggtggggggaggggggcaggggagggacgggggcttttagtttgcatcttaggtgggaggggggaggggggacccgccgcagttaacctgactttacgcagcgatttttaacgaggctggggggaggggggcactggggtggggacagggtggggtggggggcctggctctgttatttaccgtgtatcatatgtaaatatcgacagaaacttcaataaactttatttcaaacacgtctccgcctgcccggagggaagggattggatagagggggcttagtctgggtctctgcttctagggttgcaggcctaaagtactgcagaatgacgttagatgggtcgttgttaaatgacttaatcatcatcattatcaacggcagcgctttatacttcagtccgtgtaaagcatgcaggaccgtaaatgatactggtcaggatcaataaacgctttctcctggta

SEQ ID NO: 4166 - DNA, 8747 bp, Homo sapiens
  source 1..8747: mol_type = unassigned DNA
ccccgcttctgcctgcgctgtgaacccccccccagccgccggcacggccccgcccccgctgccccggtggtggcccacggccccccggctgcccgtggtcaaactggagtcgctgaagcgctggaacgaagagcggggcctctggtgcgagaagggggtgcaggtgctgctgacgacggtgggcgccttcgccgccttcggcctcatgaccatcgccatcagcactgactactggctctacacgcgcgccctcatctgcaacaccaccaacctcacggccggcggcgacgacgggaccccccaccgcgggggcggcggcgcctcggagaagaaggaccccggcggcctcacgcactcgggcctctggaggatctgctgcctggaagggttgaaaagaggcgtctgcgtgaagatcaatcatttcccggaggacacggactacgaccacgacagcgcggagtatctactccgagttgtccgggcctccagcatcttccccatccttagcgccatcctgctgctgctcgggggtgtgtgcgtggcggcctcccgcgtctacaagtccaagaggaacatcattctgggcgcagggatcctgttcgtggcagcaggcctgagcaacatcatcggcgtgatcgtgtacatctccgccaacgcgggcgagccgggcccgaagcgggacgaggagaagaaaaaccactactcgtacggctggtccttctacttcggcgggctgtcgttcatcctggccgaggtgataggcgtgctggccgtcaacatctacatcgagcgcagccgcgaggcgcactgccagtctcgctcggacctgctcaaggccggcgggggcgcgggcggcagtggcgggagcggcccctcggccatcctccgtctgcccagttaccgcttccgctaccgccgccgctcccgctctagctcccgctccagcgagccgtcgccgtcgcgggacgcgtctcccggcggccccgggggcccgggctttgcctccacggacatctccatgtacacgctcagccgcgacccctccaagggcagcgtggccgcggggctggcgggggccggcggcggcggcggcggcgccgtgggggcgttcggcggcgcggccgggggcgccgggggcggcggcggaggcggcggcggggcgggtgccgagcgggaccgcgggggggcgtccggcttcctcacgctgcacaacgccttccccaaggaggcgggcggcggcgtcacggtcacggtcaccgggccgcccgccccgcccgcgcccgcgccacccgcgccctctgcgcccgcccccgggaccctggccaaggaggccgccgcctccaacaccaacacgctcaacaggaaaaccacgcctgtgtaggggcgcggcgggggagccgaggggcgtgtccggggcgcgtgcgcgggcgcgcgtgcatcgaggctgccggggtcgggggcgcccccgctttcccccgtgagcgcgctggagactgctgggcccgccccacgcccaccctccccgcccccctccccctccgaagcagggaccccgagggagggggcaggggagggagggggccgctgtgagggagcgtcgtgttttatttttttgggggatctatggggaggggggagggccatggtgttttttgcagtttcgagatgttttctttttcatgttttgctgtgtgcatggggggcggggcggggggaggggagggagggactcccagcccagcccaactcctggagaggggcccataatacacgaatacatagttacacccacaaactatatatatgccctatataaagagacacagcgaagggatgcagaaaggcagaaagaagggttggacgcgggcattcattcatttttttcattcattattccacaagggcttattaagcacctactgtgtaccaggcactggtacataagaaggcattggagcaggggacacgaacgaggcacagaaagggccttctcattcattcattcattaccggcaatttatttgtgcgccttaaaaagctaggcattgtgctccgtgctcagcgtgcaggaggcaggaaaacagccaggggccccgacgtctcatagagtaaacatcttgtgcatgagacaggcattaatcgatcatgtacatacacaataaattacagttaggctataggagaaacgagatgctatgaaatgctccatcaggggagcctaacccagttgtgaggaagagatttcagtggacagtgaaaggatgagaagaagccagcagggcggagctggggcaggagtgtggcaggcagagcagcacgtgcaaaggccccggggcaggaaggagcttgcagcgagggctgaagggtagtgaggcaggtgagcggggatcaaggtgaggccggagacacagacagggccagattgtgcaggggctcgtaggtcaggagttcagattttattctaggagtggtgagggccgtggaacgggtttaagcaggacgctaacgtgaatggtgtacaaagggaagacaggaactcggaggcaagagtaggaggcagagatgtgctgaaatacagcatcaaacatgggcacgggcccttggagctcacactcttgtgggaggaagcacgtaattacacagatgctgaagcatagtcatggtgtctggtgtgcaggagaaagccgtggggcttagagactcatgtgtctgtcactcgttcattcagccactcacccattgccatttttggccatctgctaaggtaccaggaagtgtgttaggatccagatccccaggggtgaaacagactctagccctgctctcaagcagtttattgtcatcaaacaccgccatccaggcagggcaatcggtgctggaacccggaccaccgtgggtaccgtggcacacggtggacagagtgaccaactgccaggagtgagcagcacttggggtaggcttcctggagaatatgatgcccattctgggtcttgaagaaatgagtgggcatcttctggttgatgaaaggcatgagaaaggcttgtggggccaaagaacaacttgggtgaaaacgggaggaagtgaacgagcatgatgtattggggtcagtgctaacagttctgggatgctgatgtacaaggtggggctgggagatgaggccgggaaagtagccacaagctagagtgtaaaggtaccagggtggccgggcgcggtggctcatgcctgtaatcccagcgctttgggaggctgaggctggagtatcacttgagcccaggagtttgagaccagcctggataacatggcgaaaccctgtctctacaaaacattaaaaaaaattagccgggcgtggtggagcacacctgtggacacagctactcaggaggctgagggaggaggaccatttgactccaagagttcgaggctgcagtgagctaggatcgcggcactacactccagcctgagcaacagactgagatcctgtctcagaaaaaaagagaaaaaggtgcctgagttccaggcagagggactgaggctcttctaaggatggtgagagaggatgacagctgcgcgggggcaagggctgtgcggtgattggaggggatgggtttgaagttcactgagaaggcagaggggacagcgcccagtaggcttcccttccatatttgctcagcaagtgtttcctgaggcctcccccgaagccttgtgctgggcggtgctgggagtggagaggtgattttgatcttgccctgctctcaaggggctcccagtctggcgggaaaacaggcacagacgcagcttgaggaggacgtggcagcggtggtgccatgctgccaggggctctgcgtgcccttctcttgacggaagggtacagatcagagctgggtgttcagaatttctctccgaggcctgtgtggaaggaccaggaagagagagactgaaggtccctaggaagaattctgccaaggcggtttcaggaagagatgctgggaaatgtaggaaaaggaatacaaatcagtgagacggagaagcgctgagtgagagagacggatacgtggagagaagagggatgccggagcgggtgttaaaagagacaaatctggccgggtgctgtggctcctaatcccagcactttgggagactgaggcaggcagattgagctcaggagttccagaccagccaacatattgaaatcttgtctctaccaaaaatacaaaaattagccgggtgtggtggtgcacgcctgtagtcccggctactcaggaggctgaggtgaaaggatctcgcttgggcctgggagggtgaggctgcagtgacccgtgatggcaccactgcgctccagcctgggcgaaagagcgagactctgtctcaaaaaaaaaaaaaaaattgagagacagcaaatatttgctggaagagggagagggaactggttaggggagaatggattctagagtctgaaggccaaacagaacgagagagagagagagagagagagaaagaatgaggttgagggtaggcaggaggaagagcaagatggggagggagggggagagcaggagagaccaaactagtagagtcacagacagagaaaaagtcaaagacaggaaggtgatacagaggagagagaagaggaagaggagagactgacaggtgcacaaatcagagaagtcccagagatagcagaaacacacacagagacagagatagagagggagaggtaagccggagacagactcagagattcgcacaaaaagcaacgtggagactcagaagcaagcgcagcgtcaaggaatgctccatttctggtgtgttgttttcccagtattcaagaaatatttattgagtgccaacctgttctagacccaatctcggccaggggatgtggtggcaaatagacggacaagggcctgctctcctgaaacacactggagagataaacaataaataatatcatttcagtaaccaaaaagtgctttaaaaattaagctgaaggccgggcgcagtggctcatgcctgtaatcccagcactttgggaggccgaggctggtggatcacttgaggtcaggagttcgagaccagcctggtcaacatggtgaaacttcatctctaccaataaataaataaagtagctgggtgtgctggtgtgcctgtagtcccagctacttgggaggctgagaaagaaggatcacttgaacccaggaggcagaggttgcagtgagctgagatcgcgccactgcactccagcctgggcgacagtgagtggtaacagaatgacagagcaaggatgactttagatgaggtccttggagtagaccttgtggcagaggtcacagagatgtggattgtgagtaggaaagagaggtgagaaagtctgggggccaggcattccacccaccagaggcagccccaaagcccagaaaagtagcaggtcttcgaggaggcctgtgcggtgagcagatccaccataggacagaggcacagggtaggggctgatcagttagggccttggatccttgggaagaaatctgaattttattctagatctgatgggaagtgcttggagggttttgagcacaggcatgccatgatcatatttttattttcttatttatatttattttgaaaaagagtcttgctctgtctcaggctggagtccagtgggctgatctcggctcactgccaacctccgcctcccaagttcaagtgattctcctgcctcagcctcctgagtagctgggattacaggcatgtgccaccacgcctggctaatttttttgtatttttagtaaagacgggatttcaccgtgttggccaggccaatctgaaattcctggcttcaaatgatccacctgcctcggcctcccaaaatgctgggattacaggagtgagccactgcgcccggcctcatatttttatttaaacaagaacagcagaattacattgctgtgctgagcatacgtagacttcaggagtcaaaggggaaggaaggaggtagcgggctgttgccttcctctggttgctggaggcctggaccaaggtggagttagtgggatggaggaagtggaagaaggcatgggattttggaggctagagcctgcattggtggtgaactggatgtcatagaggagggaaggaaaaggaaccaggaagagaagaactctctgaattgggcacgcacatctctgatgggcaccgatgaggattgttaccaggaacgaggagactgggatcaggaaagtggctttgggagggaggaaccaaggcttctcttttggatgtgtcaagatagatctgccttcgagaaatccgagttgtggtatcaaatagccagttggatatgtgagactggagtttgggggaaagagaggccgtggctcaaaaacgtaagttttggaaacgtcaacataaagccacaggattgggtgacgtggcctagcaggggggtggggacagagaagcgaccctggccagagccttggggacatctacatctgggggagaaggggatgtagcaaaacgagcttaggagtgatctcgaggtaggctgaaaccaggagggttacagagggcaaatgcacctttgtgtttcaagaaggagaggagacagccagctgtgccaagggctgctgagacttggacaaggatgcagagagcagagtgaccattaggtctgatgacatggacagggttggtgatcttgataagataagatgtcagttcagtgcagtggtggggacagaagccctgctggagtggaggggagagagaatttggggggaagacagaaggaaagggaattcaggcaagtgtgtgtgtgtgtgtgtgtgtgtgtgtgtgtgtaactgacacaaaggccaggtgcgatggctcacgtgtgtaatcccagcactttgggaggccgaagtgggtggatcacttgaggtcaggagttcgagaccagcctggccaatatggtgaaaccccgtctctactaaaaatacagaaattagacaggtgcggtggtgcacacctgtaatcccagctacttgagaggctgaagcaggagaatctcttgggcccaggaggcagaggttgcagtgagccaagatcacaccactgcactctagcctgggtgacagagcaagactctgtctcaaaaaagaaaaaaggtaaaaaaaaaaaaaaatgaccctgaaaggaagtagggagacatgcagatagggagatgggaggcagaaaattgcatcctgcaattagctgtcacagcaggcaggagcaagagagatggggaagcccagggccaggaggggaagatgaattcagggggcagggaagagaggatgctgtcagctaggctctggcagatcccctagccagggatgctctgcccagctcctgtctcttgctgctgtcagcgccgggcacactctgggattccccctgtagaccctgtcaagacctattgaggtgaaggggaagaacacgttttcatcattcattttcagaaataaacattcactcagttcttggaaatactttctggccaggcttgggggctcatgcctgtaatcccagcactctgggaggccaagacaggaggattgcttgaggcttggcgtttgagaccagcctgggcaatatagtaagaccccgtctctacaaaaatgaaaaatgagctgtggcgtggtggctcacgcctgtagtcctagatactcgggaggctgaggcgggaggattgcttgagtccaggagtttaaggttgcagtgagctatgattgcaccattgcacttcaggctgggccacagagcaagaccctgtctcagaaaacagaaagaaagaaagtcaaagaaataaagtcaaagacaagaaggtgatacagagaagacagaaaaggaggaggagagagactgacaggtacacaaatcagagaagtcccagagataacaaaaacacaaccacagagatagggagacgtaagccggagaaagacccagagattcgcatagaaagcaacgtggagactcagaagcaagcacagcatcaaggaatgatcaataaaaagaaaaaaaaatatttcctgaggacttccaagtacaaggccctgcaatctcaggccacttctgtcccatctctgccttcagagggggggacaggtagtccagacaattagaatacagagggggctgtgttctgacggggccacgcgggcattgaggaaacgcagcaggcccctcccctagctggggcggggatgtctgtgtgccatcatctcactccatctggtcattcctttgcccattcatccatccattcattcaagtcaccccatgcacattttccaagactgcctgtgacctggccctgtgccgggtagagctgaggatgccaaggtgaattcctcctgtgcctggccccggccccagtctgctggaagaaccagacacagacaatcacactgcggggaaacacgtgctccatcggaaaagtccagagcagggggtgggcagagaggcccagcgtgcaccagagcctcgctcaggtcagcgccaggcctgcctggagcagccaactgtgggagaagaaggagttggtgaaaggtgggtcccacctgggccgtccacagaagggctgaggggtagggggtgaggggttgaagatcaggccctgccgccatgccacacggctgtcctctgtccctgctcctgggggagctgaaactgcatggaaggtcccccaggggtgccccgtctaataaactcgatgaagagga

SEQ ID NO: 4167 - DNA, 6634 bp, Homo sapiens
  source 1..6634: mol_type = unassigned DNA
atggtcaatgagaatacgaggatgtacattccagaggaaaaccaccaaggttccaactatgggagcccacgccccgcccatgccaacatgaatgccaatgcggcagcggggctggcccctgagcacatccccaccccgggggctgccctgtcgtggcaggcggccatcgacgcagcccggcaggctaagctgatgggcagcgctggcaatgcgaccatctccacagtcagctccacgcagcggaagcggcagcaatatgggaaacccaagaagcagggcagcaccacggccacacgcccgccccgagccctgctctgcctgaccctgaagaaccccatccggagggcctgcatcagcattgtcgaatggaaaccatttgaaataattattttactgactatttttgccaattgtgtggccttagcgatctatattccctttccagaagatgattccaacgccaccaattccaacctggaacgagtggaatatctctttctcataatttttacggtggaagcgtttttaaaagtaatcgcctatggactcctctttcaccccaatgcctacctccgcaacggctggaacctactagattttataattgtggttgtggggctttttagtgcaattttagaacaagcaaccaaagcagatggggcaaacgctctcggagggaaaggggccggatttgatgtgaaggcgctgagggccttccgcgtgctgcgccccctgcggctggtgtccggagtcccaagtctccaggtggtcctgaattccatcatcaaggccatggtccccctgctgcacatcgccctgcttgtgctgtttgtcatcatcatctacgccatcatcggcttggagctcttcatggggaagatgcacaagacctgctacaaccaggagggcatagcagatgttccagcagaagatgacccttccccttgtgcgctggaaacgggccacgggcggcagtgccagaacggcacggtgtgcaagcccggctgggatggtcccaagcacggcatcaccaactttgacaactttgccttcgccatgctcacggtgttccagtgcatcaccatggagggctggacggacgtgctgtactgggtcaatgatgccgtaggaagggactggccctggatctattttgttacactaatcatcatagggtcattttttgtacttaacttggttctcggtgtgcttagcggagagttttccaaagagagggagaaggccaaggcccggggagatttccagaagctgcgggagaagcagcagctagaagaggatctcaaaggctacctggattggatcactcaggccgaagacatcgatcctgagaatgaggacgaaggcatggatgaggagaagccccgaaacatgagcatgcccaccagtgagaccgagtccgtcaacaccgaaaacgtggctggaggtgacatcgagggagaaaactgcggggccaggctggcccaccggatctccaagtcaaagttcagccgctactggcgccggtggaatcggttctgcagaaggaagtgccgcgccgcagtcaagtctaatgtcttctactggctggtgattttcctggtgttcctcaacacgctcaccattgcctctgagcactacaaccagcccaactggctcacagaagtccaagacacggcaaacaaggccctgctggccctgttcacggcagagatgctcctgaagatgtacagcctgggcctgcaggcctacttcgtgtccctcttcaaccgctttgactgcttcgtcgtgtgtggcggcatcctggagaccatcctggtggagaccaagatcatgtccccactgggcatctccgtgctcagatgcgtccggctgctgaggattttcaagatcacgaggtactggaactccttgagcaacctggtggcatccttgctgaactctgtgcgctccatcgcctccctgctccttctcctcttcctcttcatcatcatcttctccctcctggggatgcagctctttggaggaaagttcaactttgatgagatgcagacccggaggagcacattcgataacttcccccagtccctcctcactgtgtttcagatcctgaccggggaggactggaattcggtgatgtatgatgggatcatggcttatggcggcccctcttttccagggatgttagtctgtatttacttcatcatcctcttcatctgtggaaactatatcctactgaatgtgttcttggccattgctgtggacaacctggctgatgctgagagcctcacatctgcccaaaaggaggaggaagaggagaaggagagaaagaagctggccaggactgccagcccagagaagaaacaagagttggtggagaagccggcagtgggggaatccaaggaggagaagattgagctgaaatccatcacggctgacggagagtctccacccgccaccaagatcaacatggatgacctccagcccaatgaaaatgaggataagagcccctaccccaacccagaaactacaggagaagaggatgaggaggagccagagatgcctgtcggccctcgcccacgaccactctctgagcttcaccttaaggaaaaggcagtgcccatgccagaagccagcgcgtttttcatcttcagctctaacaacaggtttcgcctccagtgccaccgcattgtcaatgacacgatcttcaccaacctgatcctcttcttcattctgctcagcagcatttccctggctgctgaggacccggtccagcacacctccttcaggaaccatattctgttttattttgatattgtttttaccaccattttcaccattgaaattgctctgaagatgactgcttatggggctttcttgcacaagggttctttctgccggaactacttcaacatcctggacctgctggtggtcagcgtgtccctcatctcctttggcatccagtccagtgcaatcaatgtcgtgaagatcttgcgagtcctgcgagtactcaggcccctgagggccatcaacagggccaaggggctaaagcatgtggttcagtgtgtgtttgtcgccatccggaccatcgggaacatcgtgattgtcaccaccctgctgcagttcatgtttgcctgcatcggggtccagctcttcaagggaaagctgtacacctgttcagacagttccaagcagacagaggcggaatgcaagggcaactacatcacgtacaaagacggggaggttgaccaccccatcatccaaccccgcagctgggagaacagcaagtttgactttgacaatgttctggcagccatgatggccctcttcaccgtctccaccttcgaagggtggccagagctgctgtaccgctccatcgactcccacacggaagacaagggccccatctacaactaccgtgtggagatctccatcttcttcatcatctacatcatcatcatcgccttcttcatgatgaacatcttcgtgggcttcgtcatcgtcacctttcaggagcagggggagcaggagtacaagaactgtgagctggacaagaaccagcgacagtgcgtggaatacgccctcaaggcccggcccctgcggaggtacatccccaagaaccagcaccagtacaaagtgtggtacgtggtcaactccacctacttcgagtacctgatgttcgtcctcatcctgctcaacaccatctgcctggccatgcagcactacggccagagctgcctgttcaaaatcgccatgaacatcctcaacatgctcttcactggcctcttcaccgtggagatgatcctgaagctcattgccttcaaacccaagcactatttctgtgatgcatggaatacatttgacgccttgattgttgtgggtagcattgttgatatagcaatcaccgaggtaaacccagctgaacatacccaatgctctccctctatggggccctcctgttctcacccccctcttgctgtgctaactgcacctcctgttgccgacgggttccagaacgcagaggaaaactcccgcatctccatcaccttcttccgcctgttccgggtcatgcgtctggtgaagctgctgagccgtggggagggcatccggacgctgctgtggaccttcatcaagtccttccaggccctgccctatgtggccctcctgatcgtgatgctgttcttcatctacgcggtgatcgggatgcaggtgtttgggaaaattgccctgaatgataccacagagatcaaccggaacaacaactttcagaccttcccccaggccgtgctgctcctcttcaggtgtgccaccggggaggcctggcaggacatcatgctggcctgcatgccaggcaagaagtgtgccccagagtccgagcccagcaacagcacggagggtgaaacaccctgtggtagcagctttgctgtcttctacttcatcagcttctacatgctctgtgccttcctgatcatcaacctctttgtagctgtcatcatggacaactttgactacctgacaagggactggtccatccttggtccccaccacctggatgagtttaaaagaatctgggcagagtatgaccctgaagccaagggtcgtatcaaacacctggatgtggtgaccctcctccggcggattcagccgccactaggttttgggaagctgtgccctcaccgcgtggcttgcaaacgcctggtctccatgaacatgcctctgaacagcgacgggacagtcatgttcaatgccaccctgtttgccctggtcaggacggccctgaggatcaaaacagaagagggacccagcccatcagaggcccaccaaggggctgaggatcctttccgccctgcagggaacctagaacaagccaatgaggagctgcgggcgatcatcaagaagatctggaagcggaccagcatgaagctgctggaccaggtggtgccccctgcaggtgatgatgaggtcaccgttggcaagttctacgccacgttcctgatccaggagtacttccggaagttcaagaagcgcaaagagcagggccttgtgggcaagccctcccagaggaacgcgctgtctctgcaggctggcttgcgcacactgcatgacatcgggcctgagatccgacgggccatctctggagatctcaccgctgaggaggagctggacaaggccatgaaggaggctgtgtccgctgcttctgaagatgacatcttcaggagggccggtggcctgttcggcaaccacgtcagctactaccaaagcgacggccggagcgccttcccccagaccttcaccactcagcgcccgctgcacatcaacaaggcgggcagcagccagggcgacactgagtcgccatcccacgagaagctggtggactccaccttcaccccgagcagctactcgtccaccggctccaacgccaacatcaacaacgccaacaacaccgccctgggtcgcctccctcgccccgccggctaccccagcacggtcagcactgtggagggccacgggccccccttgtcccctgccatccgggtgcaggaggtggcgtggaagctcagctccaacaggtgccactcccgggagagccaggcagccatggcgggtcaggaggagacgtctcaggatgagacctatgaagtgaagatgaaccatgacacggaggcctgcagtgagcccagcctgctctccacagagatgctctcctaccaggatgacgaaaatcggcaactgacgctcccagaggaggacaagagggacatccggcaatctccgaagaggggtttcctccgctctgcctcactaggtcgaagggcctccttccacctggaatgtctgaagcgacagaaggaccgagggggagacatctctcagaagacagtcctgcccttgcatctggttcatcatcaggcattggcagtggcaggcctgagccccctcctccagagaagccattcccctgcctcattccctaggccttttgccaccccaccagccacacctggcagccgaggctggcccccacagcccgtccccaccctgcggcttgagggggtcgagtccagtgagaaactcaacagcagcttcccatccatccactgcggctcctgggctgagaccacccccggtggcgggggcagcagcgccgcccggagagtccggcccgtctccctcatggtgcccagccaggctggggccccagggaggcagttccacggcagtgccagcagcctggtggaagcggtcttgatttcagaaggactggggcagtttgctcaagatcccaagttcatcgaggtcaccacccaggagctggccgacgcctgcgacatgaccatagaggagatggagagcgcggccgacaacatcctcagcgggggcgccccacagagccccaatggcgccctcttaccctttgtgaactgcagggacgcggggcaggaccgagccgggggcgaagaggacgcgggctgtgtgcgcgcgcggggtcgaccgagtgaggaggagctccaggacagcagggtctacgtcagcagcctgtagtgggcgctgccagatgcgggcttttttttatttgtttcaatgttcctaatgggttcgtttcagaagtgcctcactgttctcgtgacctggagtt

SEQ ID NO: 4168 - DNA, 6655 bp, Homo sapiens
  source 1..6655: mol_type = unassigned DNA
atggtcaatgagaatacgaggatgtacattccagaggaaaaccaccaaggttccaactatgggagcccacgccccgcccatgccaacatgaatgccaatgcggcagcggggctggcccctgagcacatccccaccccgggggctgccctgtcgtggcaggcggccatcgacgcagcccggcaggctaagctgatgggcagcgctggcaatgcgaccatctccacagtcagctccacgcagcggaagcggcagcaatatgggaaacccaagaagcagggcagcaccacggccacacgcccgccccgagccctgctctgcctgaccctgaagaaccccatccggagggcctgcatcagcattgtcgaatggaaaccatttgaaataattattttactgactatttttgccaattgtgtggccttagcgatctatattccctttccagaagatgattccaacgccaccaattccaacctggaacgagtggaatatctctttctcataatttttacggtggaagcgtttttaaaagtaatcgcctatggactcctctttcaccccaatgcctacctccgcaacggctggaacctactagattttataattgtggttgtggggctttttagtgcaattttagaacaagcaaccaaagcagatggggcaaacgctctcggagggaaaggggccggatttgatgtgaaggcgctgagggccttccgcgtgctgcgccccctgcggctggtgtccggagtcccaagtctccaggtggtcctgaattccatcatcaaggccatggtccccctgctgcacatcgccctgcttgtgctgtttgtcatcatcatctacgccatcatcggcttggagctcttcatggggaagatgcacaagacctgctacaaccaggagggcatagcagatgttccagcagaagatgacccttccccttgtgcgctggaaacgggccacgggcggcagtgccagaacggcacggtgtgcaagcccggctgggatggtcccaagcacggcatcaccaactttgacaactttgccttcgccatgctcacggtgttccagtgcatcaccatggagggctggacggacgtgctgtactgggtcaatgatgccgtaggaagggactggccctggatctattttgttacactaatcatcatagggtcattttttgtacttaacttggttctcggtgtgcttagcggagagttttccaaagagagggagaaggccaaggcccggggagatttccagaagctgcgggagaagcagcagctagaagaggatctcaaaggctacctggattggatcactcaggccgaagacatcgatcctgagaatgaggacgaaggcatggatgaggagaagccccgaaacatgagcatgcccaccagtgagaccgagtccgtcaacaccgaaaacgtggctggaggtgacatcgagggagaaaactgcggggccaggctggcccaccggatctccaagtcaaagttcagccgctactggcgccggtggaatcggttctgcagaaggaagtgccgcgccgcagtcaagtctaatgtcttctactggctggtgattttcctggtgttcctcaacacgctcaccattgcctctgagcactacaaccagcccaactggctcacagaagtccaagacacggcaaacaaggccctgctggccctgttcacggcagagatgctcctgaagatgtacagcctgggcctgcaggcctacttcgtgtccctcttcaaccgctttgactgcttcgtcgtgtgtggcggcatcctggagaccatcctggtggagaccaagatcatgtccccactgggcatctccgtgctcagatgcgtccggctgctgaggattttcaagatcacgaggtactggaactccttgagcaacctggtggcatccttgctgaactctgtgcgctccatcgcctccctgctccttctcctcttcctcttcatcatcatcttctccctcctggggatgcagctctttggaggaaagttcaactttgatgagatgcagacccggaggagcacattcgataacttcccccagtccctcctcactgtgtttcagatcctgaccggggaggactggaattcggtgatgtatgatgggatcatggcttatggcggcccctcttttccagggatgttagtctgtatttacttcatcatcctcttcatctgtggaaactatatcctactgaatgtgttcttggccattgctgtggacaacctggctgatgctgagagcctcacatctgcccaaaaggaggaggaagaggagaaggagagaaagaagctggccaggactgccagcccagagaagaaacaagagttggtggagaagccggcagtgggggaatccaaggaggagaagattgagctgaaatccatcacggctgacggagagtctccacccgccaccaagatcaacatggatgacctccagcccaatgaaaatgaggataagagcccctaccccaacccagaaactacaggagaagaggatgaggaggagccagagatgcctgtcggccctcgcccacgaccactctctgagcttcaccttaaggaaaaggcagtgcccatgccagaagccagcgcgtttttcatcttcagctctaacaacaggtttcgcctccagtgccaccgcattgtcaatgacacgatcttcaccaacctgatcctcttcttcattctgctcagcagcatttccctggctgctgaggacccggtccagcacacctccttcaggaaccatattctgttttattttgatattgtttttaccaccattttcaccattgaaattgctctgaagatcctaggcaatgcagactatgtcttcactagtatctttacattagaaattatccttaagatgactgcttatggggctttcttgcacaagggttctttctgccggaactacttcaacatcctggacctgctggtggtcagcgtgtccctcatctcctttggcatccagtccagtgcaatcaatgtcgtgaagatcttgcgagtcctgcgagtactcaggcccctgagggccatcaacagggccaaggggctaaagcatgtggttcagtgtgtgtttgtcgccatccggaccatcgggaacatcgtgattgtcaccaccctgctgcagttcatgtttgcctgcatcggggtccagctcttcaagggaaagctgtacacctgttcagacagttccaagcagacagaggcggaatgcaagggcaactacatcacgtacaaagacggggaggttgaccaccccatcatccaaccccgcagctgggagaacagcaagtttgactttgacaatgttctggcagccatgatggccctcttcaccgtctccaccttcgaagggtggccagagctgctgtaccgctccatcgactcccacacggaagacaagggccccatctacaactaccgtgtggagatctccatcttcttcatcatctacatcatcatcatcgccttcttcatgatgaacatcttcgtgggcttcgtcatcgtcacctttcaggagcagggggagcaggagtacaagaactgtgagctggacaagaaccagcgacagtgcgtggaatacgccctcaaggcccggcccctgcggaggtacatccccaagaaccagcaccagtacaaagtgtggtacgtggtcaactccacctacttcgagtacctgatgttcgtcctcatcctgctcaacaccatctgcctggccatgcagcactacggccagagctgcctgttcaaaatcgccatgaacatcctcaacatgctcttcactggcctcttcaccgtggagatgatcctgaagctcattgccttcaaacccaagggttactttagtgatccctggaatgtttttgacttcctcatcgtaattggcagcataattgacgtcattctcagtgagactaatcactatttctgtgatgcatggaatacatttgacgccttgattgttgtgggtagcattgttgatatagcaatcaccgaggtaaacccagctgaacatacccaatgctctccctctatgaacgcagaggaaaactcccgcatctccatcaccttcttccgcctgttccgggtcatgcgtctggtgaagctgctgagccgtggggagggcatccggacgctgctgtggaccttcatcaagtccttccaggccctgccctatgtggccctcctgatcgtgatgctgttcttcatctacgcggtgatcgggatgcaggtgtttgggaaaattgccctgaatgataccacagagatcaaccggaacaacaactttcagaccttcccccaggccgtgctgctcctcttcaggtgtgccaccggggaggcctggcaggacatcatgctggcctgcatgccaggcaagaagtgtgccccagagtccgagcccagcaacagcacggagggtgaaacaccctgtggtagcagctttgctgtcttctacttcatcagcttctacatgctctgtgccttcctgatcatcaacctctttgtagctgtcatcatggacaactttgactacctgacaagggactggtccatccttggtccccaccacctggatgagtttaaaagaatctgggcagagtatgaccctgaagccaagggtcgtatcaaacacctggatgtggtgaccctcctccggcggattcagccgccactaggttttgggaagctgtgccctcaccgcgtggcttgcaaacgcctggtctccatgaacatgcctctgaacagcgacgggacagtcatgttcaatgccaccctgtttgccctggtcaggacggccctgaggatcaaaacagaagggaacctagaacaagccaatgaggagctgcgggcgatcatcaagaagatctggaagcggaccagcatgaagctgctggaccaggtggtgccccctgcaggtgatgatgaggtcaccgttggcaagttctacgccacgttcctgatccaggagtacttccggaagttcaagaagcgcaaagagcagggccttgtgggcaagccctcccagaggaacgcgctgtctctgcaggctggcttgcgcacactgcatgacatcgggcctgagatccgacgggccatctctggagatctcaccgctgaggaggagctggacaaggccatgaaggaggctgtgtccgctgcttctgaagatgacatcttcaggagggccggtggcctgttcggcaaccacgtcagctactaccaaagcgacggccggagcgccttcccccagaccttcaccactcagcgcccgctgcacatcaacaaggcgggcagcagccagggcgacactgagtcgccatcccacgagaagctggtggactccaccttcaccccgagcagctactcgtccaccggctccaacgccaacatcaacaacgccaacaacaccgccctgggtcgcctccctcgccccgccggctaccccagcacggtcagcactgtggagggccacgggccccccttgtcccctgccatccgggtgcaggaggtggcgtggaagctcagctccaacaggtgccactcccgggagagccaggcagccatggcgggtcaggaggagacgtctcaggatgagacctatgaagtgaagatgaaccatgacacggaggcctgcagtgagcccagcctgctctccacagagatgctctcctaccaggatgacgaaaatcggcaactgacgctcccagaggaggacaagagggacatccggcaatctccgaagaggggtttcctccgctctgcctcactaggtcgaagggcctccttccacctggaatgtctgaagcgacagaaggaccgagggggagacatctctcagaagacagtcctgcccttgcatctggttcatcatcaggcattggcagtggcaggcctgagccccctcctccagagaagccattcccctgcctcattccctaggccttttgccaccccaccagccacacctggcagccgaggctggcccccacagcccgtccccaccctgcggcttgagggggtcgagtccagtgagaaactcaacagcagcttcccatccatccactgcggctcctgggctgagaccacccccggtggcgggggcagcagcgccgcccggagagtccggcccgtctccctcatggtgcccagccaggctggggccccagggaggcagttccacggcagtgccagcagcctggtggaagcggtcttgatttcagaaggactggggcagtttgctcaagatcccaagttcatcgaggtcaccacccaggagctggccgacgcctgcgacatgaccatagaggagatggagagcgcggccgacaacatcctcagcgggggcgccccacagagccccaatggcgccctcttaccctttgtgaactgcagggacgcggggcaggaccgagccgggggcgaagaggacgcgggctgtgtgcgcgcgcggggtcgaccgagtgaggaggagctccaggacagcagggtctacgtcagcagcctgtagtgggcgctgccagatgcgggcttttttttatttgtttcaatgttcctaatgggttcgtttcagaagtgcctcactgttctcgtgacctggagtt

SEQ ID NO: 4169 - DNA, 6535 bp, Homo sapiens
  source 1..6535: mol_type = unassigned DNA
atggtcaatgagaatacgaggatgtacattccagaggaaaaccaccaaggttccaactatgggagcccacgccccgcccatgccaacatgaatgccaatgcggcagcggggctggcccctgagcacatccccaccccgggggctgccctgtcgtggcaggcggccatcgacgcagcccggcaggctaagctgatgggcagcgctggcaatgcgaccatctccacagtcagctccacgcagcggaagcggcagcaatatgggaaacccaagaagcagggcagcaccacggccacacgcccgccccgagccctgctctgcctgaccctgaagaaccccatccggagggcctgcatcagcattgtcgaatggaaaccatttgaaataattattttactgactatttttgccaattgtgtggccttagcgatctatattccctttccagaagatgattccaacgccaccaattccaacctggaacgagtggaatatctctttctcataatttttacggtggaagcgtttttaaaagtaatcgcctatggactcctctttcaccccaatgcctacctccgcaacggctggaacctactagattttataattgtggttgtggggctttttagtgcaattttagaacaagcaaccaaagcagatggggcaaacgctctcggagggaaaggggccggatttgatgtgaaggcgctgagggccttccgcgtgctgcgccccctgcggctggtgtccggagtcccaagtctccaggtggtcctgaattccatcatcaaggccatggtccccctgctgcacatcgccctgcttgtgctgtttgtcatcatcatctacgccatcatcggcttggagctcttcatggggaagatgcacaagacctgctacaaccaggagggcatagcagatgttccagcagaagatgacccttccccttgtgcgctggaaacgggccacgggcggcagtgccagaacggcacggtgtgcaagcccggctgggatggtcccaagcacggcatcaccaactttgacaactttgccttcgccatgctcacggtgttccagtgcatcaccatggagggctggacggacgtgctgtactgggtcaatgatgccgtaggaagggactggccctggatctattttgttacactaatcatcatagggtcattttttgtacttaacttggttctcggtgtgcttagcggagagttttccaaagagagggagaaggccaaggcccggggagatttccagaagctgcgggagaagcagcagctagaagaggatctcaaaggctacctggattggatcactcaggccgaagacatcgatcctgagaatgaggacgaaggcatggatgaggagaagccccgaaacatgagcatgcccaccagtgagaccgagtccgtcaacaccgaaaacgtggctggaggtgacatcgagggagaaaactgcggggccaggctggcccaccggatctccaagtcaaagttcagccgctactggcgccggtggaatcggttctgcagaaggaagtgccgcgccgcagtcaagtctaatgtcttctactggctggtgattttcctggtgttcctcaacacgctcaccattgcctctgagcactacaaccagcccaactggctcacagaagtccaagacacggcaaacaaggccctgctggccctgttcacggcagagatgctcctgaagatgtacagcctgggcctgcaggcctacttcgtgtccctcttcaaccgctttgactgcttcgtcgtgtgtggcggcatcctggagaccatcctggtggagaccaagatcatgtccccactgggcatctccgtgctcagatgcgtccggctgctgaggattttcaagatcacgaggtactggaactccttgagcaacctggtggcatccttgctgaactctgtgcgctccatcgcctccctgctccttctcctcttcctcttcatcatcatcttctccctcctggggatgcagctctttggaggaaagttcaactttgatgagatgcagacccggaggagcacattcgataacttcccccagtccctcctcactgtgtttcagatcctgaccggggaggactggaattcggtgatgtatgatgggatcatggcttatggcggcccctcttttccagggatgttagtctgtatttacttcatcatcctcttcatctgtggaaactatatcctactgaatgtgttcttggccattgctgtggacaacctggctgatgctgagagcctcacatctgcccaaaaggaggaggaagaggagaaggagagaaagaagctggccaggactgccagcccagagaagaaacaagagttggtggagaagccggcagtgggggaatccaaggaggagaagattgagctgaaatccatcacggctgacggagagtctccacccgccaccaagatcaacatggatgacctccagcccaatgaaaatgaggataagagcccctaccccaacccagaaactacaggagaagaggatgaggaggagccagagatgcctgtcggccctcgcccacgaccactctctgagcttcaccttaaggaaaaggcagtgcccatgccagaagccagcgcgtttttcatcttcagctctaacaacaggtttcgcctccagtgccaccgcattgtcaatgacacgatcttcaccaacctgatcctcttcttcattctgctcagcagcatttccctggctgctgaggacccggtccagcacacctccttcaggaaccatatcctaggcaatgcagactatgtcttcactagtatctttacattagaaattatccttaagatgactgcttatggggctttcttgcacaagggttctttctgccggaactacttcaacatcctggacctgctggtggtcagcgtgtccctcatctcctttggcatccagtccagtgcaatcaatgtcgtgaagatcttgcgagtcctgcgagtactcaggcccctgagggccatcaacagggccaaggggctaaagcatgtggttcagtgtgtgtttgtcgccatccggaccatcgggaacatcgtgattgtcaccaccctgctgcagttcatgtttgcctgcatcggggtccagctcttcaagggaaagctgtacacctgttcagacagttccaagcagacagaggcggaatgcaagggcaactacatcacgtacaaagacggggaggttgaccaccccatcatccaaccccgcagctgggagaacagcaagtttgactttgacaatgttctggcagccatgatggccctcttcaccgtctccaccttcgaagggtggccagagctgctgtaccgctccatcgactcccacacggaagacaagggccccatctacaactaccgtgtggagatctccatcttcttcatcatctacatcatcatcatcgccttcttcatgatgaacatcttcgtgggcttcgtcatcgtcacctttcaggagcagggggagcaggagtacaagaactgtgagctggacaagaaccagcgacagtgcgtggaatacgccctcaaggcccggcccctgcggaggtacatccccaagaaccagcaccagtacaaagtgtggtacgtggtcaactccacctacttcgagtacctgatgttcgtcctcatcctgctcaacaccatctgcctggccatgcagcactacggccagagctgcctgttcaaaatcgccatgaacatcctcaacatgctcttcactggcctcttcaccgtggagatgatcctgaagctcattgccttcaaacccaagcactatttctgtgatgcatggaatacatttgacgccttgattgttgtgggtagcattgttgatatagcaatcaccgaggtaaacaacgcagaggaaaactcccgcatctccatcaccttcttccgcctgttccgggtcatgcgtctggtgaagctgctgagccgtggggagggcatccggacgctgctgtggaccttcatcaagtccttccaggccctgccctatgtggccctcctgatcgtgatgctgttcttcatctacgcggtgatcgggatgcaggtgtttgggaaaattgccctgaatgataccacagagatcaaccggaacaacaactttcagaccttcccccaggccgtgctgctcctcttcaggtgtgccaccggggaggcctggcaggacatcatgctggcctgcatgccaggcaagaagtgtgccccagagtccgagcccagcaacagcacggagggtgaaacaccctgtggtagcagctttgctgtcttctacttcatcagcttctacatgctctgtgccttcctgatcatcaacctctttgtagctgtcatcatggacaactttgactacctgacaagggactggtccatccttggtccccaccacctggatgagtttaaaagaatctgggcagagtatgaccctgaagccaagggtcgtatcaaacacctggatgtggtgaccctcctccggcggattcagccgccactaggttttgggaagctgtgccctcaccgcgtggcttgcaaacgcctggtctccatgaacatgcctctgaacagcgacgggacagtcatgttcaatgccaccctgtttgccctggtcaggacggccctgaggatcaaaacagaagagggacccagcccatcagaggcccaccaaggggctgaggatcctttccgccctgcagggaacctagaacaagccaatgaggagctgcgggcgatcatcaagaagatctggaagcggaccagcatgaagctgctggaccaggtggtgccccctgcaggtgatgatgaggtcaccgttggcaagttctacgccacgttcctgatccaggagtacttccggaagttcaagaagcgcaaagagcagggccttgtgggcaagccctcccagaggaacgcgctgtctctgcaggctggcttgcgcacactgcatgacatcgggcctgagatccgacgggccatctctggagatctcaccgctgaggaggagctggacaaggccatgaaggaggctgtgtccgctgcttctgaagatgacatcttcaggagggccggtggcctgttcggcaaccacgtcagctactaccaaagcgacggccggagcgccttcccccagaccttcaccactcagcgcccgctgcacatcaacaaggcgggcagcagccagggcgacactgagtcgccatcccacgagaagctggtggactccaccttcaccccgagcagctactcgtccaccggctccaacgccaacatcaacaacgccaacaacaccgccctgggtcgcctccctcgccccgccggctaccccagcacggtcagcactgtggagggccacgggccccccttgtcccctgccatccgggtgcaggaggtggcgtggaagctcagctccaacaggtgccactcccgggagagccaggcagccatggcgggtcaggaggagacgtctcaggatgagacctatgaagtgaagatgaaccatgacacggaggcctgcagtgagcccagcctgctctccacagagatgctctcctaccaggatgacgaaaatcggcaactgacgctcccagaggaggacaagagggacatccggcaatctccgaagaggggtttcctccgctctgcctcactaggtcgaagggcctccttccacctggaatgtctgaagcgacagaaggaccgagggggagacatctctcagaagacagtcctgcccttgcatctggttcatcatcaggcattggcagtggcaggcctgagccccctcctccagagaagccattcccctgcctcattccctaggccttttgccaccccaccagccacacctggcagccgaggctggcccccacagcccgtccccaccctgcggcttgagggggtcgagtccagtgagaaactcaacagcagcttcccatccatccactgcggctcctgggctgagaccacccccggtggcgggggcagcagcgccgcccggagagtccggcccgtctccctcatggtgcccagccaggctggggccccagggaggcagttccacggcagtgccagcagcctggtggaagcggtcttgatttcagaaggactggggcagtttgctcaagatcccaagttcatcgaggtcaccacccaggagctggccgacgcctgcgacatgaccatagaggagatggagagcgcggccgacaacatcctcagcgggggcgccccacagagccccaatggcgccctcttaccctttgtgaactgcagggacgcggggcaggaccgagccgggggcgaagaggacgcgggctgtgtgcgcgcgcggggtcgaccgagtgaggaggagctccaggacagcagggtctacgtcagcagcctgtagtgggcgctgccagatgcgggcttttttttatttgtttcaatgttcctaatgggttcgtttcagaagtgcctcactgttctcgtgacctggagtt

SEQ ID NO: 4170 - DNA, 6535 bp, Homo sapiens
  source 1..6535: mol_type = unassigned DNA
atggtcaatgagaatacgaggatgtacattccagaggaaaaccaccaaggttccaactatgggagcccacgccccgcccatgccaacatgaatgccaatgcggcagcggggctggcccctgagcacatccccaccccgggggctgccctgtcgtggcaggcggccatcgacgcagcccggcaggctaagctgatgggcagcgctggcaatgcgaccatctccacagtcagctccacgcagcggaagcggcagcaatatgggaaacccaagaagcagggcagcaccacggccacacgcccgccccgagccctgctctgcctgaccctgaagaaccccatccggagggcctgcatcagcattgtcgaatggaaaccatttgaaataattattttactgactatttttgccaattgtgtggccttagcgatctatattccctttccagaagatgattccaacgccaccaattccaacctggaacgagtggaatatctctttctcataatttttacggtggaagcgtttttaaaagtaatcgcctatggactcctctttcaccccaatgcctacctccgcaacggctggaacctactagattttataattgtggttgtggggctttttagtgcaattttagaacaagcaaccaaagcagatggggcaaacgctctcggagggaaaggggccggatttgatgtgaaggcgctgagggccttccgcgtgctgcgccccctgcggctggtgtccggagtcccaagtctccaggtggtcctgaattccatcatcaaggccatggtccccctgctgcacatcgccctgcttgtgctgtttgtcatcatcatctacgccatcatcggcttggagctcttcatggggaagatgcacaagacctgctacaaccaggagggcatagcagatgttccagcagaagatgacccttccccttgtgcgctggaaacgggccacgggcggcagtgccagaacggcacggtgtgcaagcccggctgggatggtcccaagcacggcatcaccaactttgacaactttgccttcgccatgctcacggtgttccagtgcatcaccatggagggctggacggacgtgctgtactgggtcaatgatgccgtaggaagggactggccctggatctattttgttacactaatcatcatagggtcattttttgtacttaacttggttctcggtgtgcttagcggagagttttccaaagagagggagaaggccaaggcccggggagatttccagaagctgcgggagaagcagcagctagaagaggatctcaaaggctacctggattggatcactcaggccgaagacatcgatcctgagaatgaggacgaaggcatggatgaggagaagccccgaaacatgagcatgcccaccagtgagaccgagtccgtcaacaccgaaaacgtggctggaggtgacatcgagggagaaaactgcggggccaggctggcccaccggatctccaagtcaaagttcagccgctactggcgccggtggaatcggttctgcagaaggaagtgccgcgccgcagtcaagtctaatgtcttctactggctggtgattttcctggtgttcctcaacacgctcaccattgcctctgagcactacaaccagcccaactggctcacagaagtccaagacacggcaaacaaggccctgctggccctgttcacggcagagatgctcctgaagatgtacagcctgggcctgcaggcctacttcgtgtccctcttcaaccgctttgactgcttcgtcgtgtgtggcggcatcctggagaccatcctggtggagaccaagatcatgtccccactgggcatctccgtgctcagatgcgtccggctgctgaggattttcaagatcacgaggtactggaactccttgagcaacctggtggcatccttgctgaactctgtgcgctccatcgcctccctgctccttctcctcttcctcttcatcatcatcttctccctcctggggatgcagctctttggaggaaagttcaactttgatgagatgcagacccggaggagcacattcgataacttcccccagtccctcctcactgtgtttcagatcctgaccggggaggactggaattcggtgatgtatgatgggatcatggcttatggcggcccctcttttccagggatgttagtctgtatttacttcatcatcctcttcatctgtggaaactatatcctactgaatgtgttcttggccattgctgtggacaacctggctgatgctgagagcctcacatctgcccaaaaggaggaggaagaggagaaggagagaaagaagctggccaggactgccagcccagagaagaaacaagagttggtggagaagccggcagtgggggaatccaaggaggagaagattgagctgaaatccatcacggctgacggagagtctccacccgccaccaagatcaacatggatgacctccagcccaatgaaaatgaggataagagcccctaccccaacccagaaactacaggagaagaggatgaggaggagccagagatgcctgtcggccctcgcccacgaccactctctgagcttcaccttaaggaaaaggcagtgcccatgccagaagccagcgcgtttttcatcttcagctctaacaacaggtttcgcctccagtgccaccgcattgtcaatgacacgatcttcaccaacctgatcctcttcttcattctgctcagcagcatttccctggctgctgaggacccggtccagcacacctccttcaggaaccatattctgttttattttgatattgtttttaccaccattttcaccattgaaattgctctgaagatgactgcttatggggctttcttgcacaagggttctttctgccggaactacttcaacatcctggacctgctggtggtcagcgtgtccctcatctcctttggcatccagtccagtgcaatcaatgtcgtgaagatcttgcgagtcctgcgagtactcaggcccctgagggccatcaacagggccaaggggctaaagcatgtggttcagtgtgtgtttgtcgccatccggaccatcgggaacatcgtgattgtcaccaccctgctgcagttcatgtttgcctgcatcggggtccagctcttcaagggaaagctgtacacctgttcagacagttccaagcagacagaggcggaatgcaagggcaactacatcacgtacaaagacggggaggttgaccaccccatcatccaaccccgcagctgggagaacagcaagtttgactttgacaatgttctggcagccatgatggccctcttcaccgtctccaccttcgaagggtggccagagctgctgtaccgctccatcgactcccacacggaagacaagggccccatctacaactaccgtgtggagatctccatcttcttcatcatctacatcatcatcatcgccttcttcatgatgaacatcttcgtgggcttcgtcatcgtcacctttcaggagcagggggagcaggagtacaagaactgtgagctggacaagaaccagcgacagtgcgtggaatacgccctcaaggcccggcccctgcggaggtacatccccaagaaccagcaccagtacaaagtgtggtacgtggtcaactccacctacttcgagtacctgatgttcgtcctcatcctgctcaacaccatctgcctggccatgcagcactacggccagagctgcctgttcaaaatcgccatgaacatcctcaacatgctcttcactggcctcttcaccgtggagatgatcctgaagctcattgccttcaaacccaagcactatttctgtgatgcatggaatacatttgacgccttgattgttgtgggtagcattgttgatatagcaatcaccgaggtaaacaacgcagaggaaaactcccgcatctccatcaccttcttccgcctgttccgggtcatgcgtctggtgaagctgctgagccgtggggagggcatccggacgctgctgtggaccttcatcaagtccttccaggccctgccctatgtggccctcctgatcgtgatgctgttcttcatctacgcggtgatcgggatgcaggtgtttgggaaaattgccctgaatgataccacagagatcaaccggaacaacaactttcagaccttcccccaggccgtgctgctcctcttcaggtgtgccaccggggaggcctggcaggacatcatgctggcctgcatgccaggcaagaagtgtgccccagagtccgagcccagcaacagcacggagggtgaaacaccctgtggtagcagctttgctgtcttctacttcatcagcttctacatgctctgtgccttcctgatcatcaacctctttgtagctgtcatcatggacaactttgactacctgacaagggactggtccatccttggtccccaccacctggatgagtttaaaagaatctgggcagagtatgaccctgaagccaagggtcgtatcaaacacctggatgtggtgaccctcctccggcggattcagccgccactaggttttgggaagctgtgccctcaccgcgtggcttgcaaacgcctggtctccatgaacatgcctctgaacagcgacgggacagtcatgttcaatgccaccctgtttgccctggtcaggacggccctgaggatcaaaacagaagagggacccagcccatcagaggcccaccaaggggctgaggatcctttccgccctgcagggaacctagaacaagccaatgaggagctgcgggcgatcatcaagaagatctggaagcggaccagcatgaagctgctggaccaggtggtgccccctgcaggtgatgatgaggtcaccgttggcaagttctacgccacgttcctgatccaggagtacttccggaagttcaagaagcgcaaagagcagggccttgtgggcaagccctcccagaggaacgcgctgtctctgcaggctggcttgcgcacactgcatgacatcgggcctgagatccgacgggccatctctggagatctcaccgctgaggaggagctggacaaggccatgaaggaggctgtgtccgctgcttctgaagatgacatcttcaggagggccggtggcctgttcggcaaccacgtcagctactaccaaagcgacggccggagcgccttcccccagaccttcaccactcagcgcccgctgcacatcaacaaggcgggcagcagccagggcgacactgagtcgccatcccacgagaagctggtggactccaccttcaccccgagcagctactcgtccaccggctccaacgccaacatcaacaacgccaacaacaccgccctgggtcgcctccctcgccccgccggctaccccagcacggtcagcactgtggagggccacgggccccccttgtcccctgccatccgggtgcaggaggtggcgtggaagctcagctccaacaggtgccactcccgggagagccaggcagccatggcgggtcaggaggagacgtctcaggatgagacctatgaagtgaagatgaaccatgacacggaggcctgcagtgagcccagcctgctctccacagagatgctctcctaccaggatgacgaaaatcggcaactgacgctcccagaggaggacaagagggacatccggcaatctccgaagaggggtttcctccgctctgcctcactaggtcgaagggcctccttccacctggaatgtctgaagcgacagaaggaccgagggggagacatctctcagaagacagtcctgcccttgcatctggttcatcatcaggcattggcagtggcaggcctgagccccctcctccagagaagccattcccctgcctcattccctaggccttttgccaccccaccagccacacctggcagccgaggctggcccccacagcccgtccccaccctgcggcttgagggggtcgagtccagtgagaaactcaacagcagcttcccatccatccactgcggctcctgggctgagaccacccccggtggcgggggcagcagcgccgcccggagagtccggcccgtctccctcatggtgcccagccaggctggggccccagggaggcagttccacggcagtgccagcagcctggtggaagcggtcttgatttcagaaggactggggcagtttgctcaagatcccaagttcatcgaggtcaccacccaggagctggccgacgcctgcgacatgaccatagaggagatggagagcgcggccgacaacatcctcagcgggggcgccccacagagccccaatggcgccctcttaccctttgtgaactgcagggacgcggggcaggaccgagccgggggcgaagaggacgcgggctgtgtgcgcgcgcggggtcgaccgagtgaggaggagctccaggacagcagggtctacgtcagcagcctgtagtgggcgctgccagatgcgggcttttttttatttgtttcaatgttcctaatgggttcgtttcagaagtgcctcactgttctcgtgacctggagtt

SEQ ID NO: 4171 - DNA, 6511 bp, Homo sapiens
  source 1..6511: mol_type = unassigned DNA
atggtcaatgagaatacgaggatgtacattccagaggaaaaccaccaaggttccaactatgggagcccacgccccgcccatgccaacatgaatgccaatgcggcagcggggctggcccctgagcacatccccaccccgggggctgccctgtcgtggcaggcggccatcgacgcagcccggcaggctaagctgatgggcagcgctggcaatgcgaccatctccacagtcagctccacgcagcggaagcggcagcaatatgggaaacccaagaagcagggcagcaccacggccacacgcccgccccgagccctgctctgcctgaccctgaagaaccccatccggagggcctgcatcagcattgtcgaatggaaaccatttgaaataattattttactgactatttttgccaattgtgtggccttagcgatctatattccctttccagaagatgattccaacgccaccaattccaacctggaacgagtggaatatctctttctcataatttttacggtggaagcgtttttaaaagtaatcgcctatggactcctctttcaccccaatgcctacctccgcaacggctggaacctactagattttataattgtggttgtggggctttttagtgcaattttagaacaagcaaccaaagcagatggggcaaacgctctcggagggaaaggggccggatttgatgtgaaggcgctgagggccttccgcgtgctgcgccccctgcggctggtgtccggagtcccaagtctccaggtggtcctgaattccatcatcaaggccatggtccccctgctgcacatcgccctgcttgtgctgtttgtcatcatcatctacgccatcatcggcttggagctcttcatggggaagatgcacaagacctgctacaaccaggagggcatagcagatgttccagcagaagatgacccttccccttgtgcgctggaaacgggccacgggcggcagtgccagaacggcacggtgtgcaagcccggctgggatggtcccaagcacggcatcaccaactttgacaactttgccttcgccatgctcacggtgttccagtgcatcaccatggagggctggacggacgtgctgtactgggtcaatgatgccgtaggaagggactggccctggatctattttgttacactaatcatcatagggtcattttttgtacttaacttggttctcggtgtgcttagcggagagttttccaaagagagggagaaggccaaggcccggggagatttccagaagctgcgggagaagcagcagctagaagaggatctcaaaggctacctggattggatcactcaggccgaagacatcgatcctgagaatgaggacgaaggcatggatgaggagaagccccgaaacatgagcatgcccaccagtgagaccgagtccgtcaacaccgaaaacgtggctggaggtgacatcgagggagaaaactgcggggccaggctggcccaccggatctccaagtcaaagttcagccgctactggcgccggtggaatcggttctgcagaaggaagtgccgcgccgcagtcaagtctaatgtcttctactggctggtgattttcctggtgttcctcaacacgctcaccattgcctctgagcactacaaccagcccaactggctcacagaagtccaagacacggcaaacaaggccctgctggccctgttcacggcagagatgctcctgaagatgtacagcctgggcctgcaggcctacttcgtgtccctcttcaaccgctttgactgcttcgtcgtgtgtggcggcatcctggagaccatcctggtggagaccaagatcatgtccccactgggcatctccgtgctcagatgcgtccggctgctgaggattttcaagatcacgaggtactggaactccttgagcaacctggtggcatccttgctgaactctgtgcgctccatcgcctccctgctccttctcctcttcctcttcatcatcatcttctccctcctggggatgcagctctttggaggaaagttcaactttgatgagatgcagacccggaggagcacattcgataacttcccccagtccctcctcactgtgtttcagatcctgaccggggaggactggaattcggtgatgtatgatgggatcatggcttatggcggcccctcttttccagggatgttagtctgtatttacttcatcatcctcttcatctgtggaaactatatcctactgaatgtgttcttggccattgctgtggacaacctggctgatgctgagagcctcacatctgcccaaaaggaggaggaagaggagaaggagagaaagaagctggccaggactgccagcccagagaagaaacaagagttggtggagaagccggcagtgggggaatccaaggaggagaagattgagctgaaatccatcacggctgacggagagtctccacccgccaccaagatcaacatggatgacctccagcccaatgaaaatgaggataagagcccctaccccaacccagaaactacaggagaagaggatgaggaggagccagagatgcctgtcggccctcgcccacgaccactctctgagcttcaccttaaggaaaaggcagtgcccatgccagaagccagcgcgtttttcatcttcagctctaacaacaggtttcgcctccagtgccaccgcattgtcaatgacacgatcttcaccaacctgatcctcttcttcattctgctcagcagcatttccctggctgctgaggacccggtccagcacacctccttcaggaaccatattctgttttattttgatattgtttttaccaccattttcaccattgaaattgctctgaagatgactgcttatggggctttcttgcacaagggttctttctgccggaactacttcaacatcctggacctgctggtggtcagcgtgtccctcatctcctttggcatccagtccagtgcaatcaatgtcgtgaagatcttgcgagtcctgcgagtactcaggcccctgagggccatcaacagggccaaggggctaaagcatgtggttcagtgtgtgtttgtcgccatccggaccatcgggaacatcgtgattgtcaccaccctgctgcagttcatgtttgcctgcatcggggtccagctcttcaagggaaagctgtacacctgttcagacagttccaagcagacagaggcggaatgcaagggcaactacatcacgtacaaagacggggaggttgaccaccccatcatccaaccccgcagctgggagaacagcaagtttgactttgacaatgttctggcagccatgatggccctcttcaccgtctccaccttcgaagggtggccagagctgctgtaccgctccatcgactcccacacggaagacaagggccccatctacaactaccgtgtggagatctccatcttcttcatcatctacatcatcatcatcgccttcttcatgatgaacatcttcgtgggcttcgtcatcgtcacctttcaggagcagggggagcaggagtacaagaactgtgagctggacaagaaccagcgacagtgcgtggaatacgccctcaaggcccggcccctgcggaggtacatccccaagaaccagcaccagtacaaagtgtggtacgtggtcaactccacctacttcgagtacctgatgttcgtcctcatcctgctcaacaccatctgcctggccatgcagcactacggccagagctgcctgttcaaaatcgccatgaacatcctcaacatgctcttcactggcctcttcaccgtggagatgatcctgaagctcattgccttcaaacccaagggttactttagtgatccctggaatgtttttgacttcctcatcgtaattggcagcataattgacgtcattctcagtgagactaatccagctgaacatacccaatgctctccctctatgaacgcagaggaaaactcccgcatctccatcaccttcttccgcctgttccgggtcatgcgtctggtgaagctgctgagccgtggggagggcatccggacgctgctgtggaccttcatcaagtccttccaggccctgccctatgtggccctcctgatcgtgatgctgttcttcatctacgcggtgatcgggatgcaggtgtttgggaaaattgccctgaatgataccacagagatcaaccggaacaacaactttcagaccttcccccaggccgtgctgctcctcttcaggtgtgccaccggggaggcctggcaggacatcatgctggcctgcatgccaggcaagaagtgtgccccagagtccgagcccagcaacagcacggagggtgaaacaccctgtggtagcagctttgctgtcttctacttcatcagcttctacatgctctgtgccttcctgatcatcaacctctttgtagctgtcatcatggacaactttgactacctgacaagggactggtccatccttggtccccaccacctggatgagtttaaaagaatctgggcagagtatgaccctgaagccaagggtcgtatcaaacacctggatgtggtgaccctcctccggcggattcagccgccactaggttttgggaagctgtgccctcaccgcgtggcttgcaaacgcctggtctccatgaacatgcctctgaacagcgacgggacagtcatgttcaatgccaccctgtttgccctggtcaggacggccctgaggatcaaaacagaagggaacctagaacaagccaatgaggagctgcgggcgatcatcaagaagatctggaagcggaccagcatgaagctgctggaccaggtggtgccccctgcaggtgatgatgaggtcaccgttggcaagttctacgccacgttcctgatccaggagtacttccggaagttcaagaagcgcaaagagcagggccttgtgggcaagccctcccagaggaacgcgctgtctctgcaggctggcttgcgcacactgcatgacatcgggcctgagatccgacgggccatctctggagatctcaccgctgaggaggagctggacaaggccatgaaggaggctgtgtccgctgcttctgaagatgacatcttcaggagggccggtggcctgttcggcaaccacgtcagctactaccaaagcgacggccggagcgccttcccccagaccttcaccactcagcgcccgctgcacatcaacaaggcgggcagcagccagggcgacactgagtcgccatcccacgagaagctggtggactccaccttcaccccgagcagctactcgtccaccggctccaacgccaacatcaacaacgccaacaacaccgccctgggtcgcctccctcgccccgccggctaccccagcacggtcagcactgtggagggccacgggccccccttgtcccctgccatccgggtgcaggaggtggcgtggaagctcagctccaacaggtgccactcccgggagagccaggcagccatggcgggtcaggaggagacgtctcaggatgagacctatgaagtgaagatgaaccatgacacggaggcctgcagtgagcccagcctgctctccacagagatgctctcctaccaggatgacgaaaatcggcaactgacgctcccagaggaggacaagagggacatccggcaatctccgaagaggggtttcctccgctctgcctcactaggtcgaagggcctccttccacctggaatgtctgaagcgacagaaggaccgagggggagacatctctcagaagacagtcctgcccttgcatctggttcatcatcaggcattggcagtggcaggcctgagccccctcctccagagaagccattcccctgcctcattccctaggccttttgccaccccaccagccacacctggcagccgaggctggcccccacagcccgtccccaccctgcggcttgagggggtcgagtccagtgagaaactcaacagcagcttcccatccatccactgcggctcctgggctgagaccacccccggtggcgggggcagcagcgccgcccggagagtccggcccgtctccctcatggtgcccagccaggctggggccccagggaggcagttccacggcagtgccagcagcctggtggaagcggtcttgatttcagaaggactggggcagtttgctcaagatcccaagttcatcgaggtcaccacccaggagctggccgacgcctgcgacatgaccatagaggagatggagagcgcggccgacaacatcctcagcgggggcgccccacagagccccaatggcgccctcttaccctttgtgaactgcagggacgcggggcaggaccgagccgggggcgaagaggacgcgggctgtgtgcgcgcgcggggtcgaccgagtgaggaggagctccaggacagcagggtctacgtcagcagcctgtagtgggcgctgccagatgcgggcttttttttatttgtttcaatgttcctaatgggttcgtttcagaagtgcctcactgttctcgtgacctggagtt

SEQ ID NO: 4172 - DNA, 6511 bp, Homo sapiens
  source 1..6511: mol_type = unassigned DNA
atggtcaatgagaatacgaggatgtacattccagaggaaaaccaccaaggttccaactatgggagcccacgccccgcccatgccaacatgaatgccaatgcggcagcggggctggcccctgagcacatccccaccccgggggctgccctgtcgtggcaggcggccatcgacgcagcccggcaggctaagctgatgggcagcgctggcaatgcgaccatctccacagtcagctccacgcagcggaagcggcagcaatatgggaaacccaagaagcagggcagcaccacggccacacgcccgccccgagccctgctctgcctgaccctgaagaaccccatccggagggcctgcatcagcattgtcgaatggaaaccatttgaaataattattttactgactatttttgccaattgtgtggccttagcgatctatattccctttccagaagatgattccaacgccaccaattccaacctggaacgagtggaatatctctttctcataatttttacggtggaagcgtttttaaaagtaatcgcctatggactcctctttcaccccaatgcctacctccgcaacggctggaacctactagattttataattgtggttgtggggctttttagtgcaattttagaacaagcaaccaaagcagatggggcaaacgctctcggagggaaaggggccggatttgatgtgaaggcgctgagggccttccgcgtgctgcgccccctgcggctggtgtccggagtcccaagtctccaggtggtcctgaattccatcatcaaggccatggtccccctgctgcacatcgccctgcttgtgctgtttgtcatcatcatctacgccatcatcggcttggagctcttcatggggaagatgcacaagacctgctacaaccaggagggcatagcagatgttccagcagaagatgacccttccccttgtgcgctggaaacgggccacgggcggcagtgccagaacggcacggtgtgcaagcccggctgggatggtcccaagcacggcatcaccaactttgacaactttgccttcgccatgctcacggtgttccagtgcatcaccatggagggctggacggacgtgctgtactgggtcaatgatgccgtaggaagggactggccctggatctattttgttacactaatcatcatagggtcattttttgtacttaacttggttctcggtgtgcttagcggagagttttccaaagagagggagaaggccaaggcccggggagatttccagaagctgcgggagaagcagcagctagaagaggatctcaaaggctacctggattggatcactcaggccgaagacatcgatcctgagaatgaggacgaaggcatggatgaggagaagccccgaaacatgagcatgcccaccagtgagaccgagtccgtcaacaccgaaaacgtggctggaggtgacatcgagggagaaaactgcggggccaggctggcccaccggatctccaagtcaaagttcagccgctactggcgccggtggaatcggttctgcagaaggaagtgccgcgccgcagtcaagtctaatgtcttctactggctggtgattttcctggtgttcctcaacacgctcaccattgcctctgagcactacaaccagcccaactggctcacagaagtccaagacacggcaaacaaggccctgctggccctgttcacggcagagatgctcctgaagatgtacagcctgggcctgcaggcctacttcgtgtccctcttcaaccgctttgactgcttcgtcgtgtgtggcggcatcctggagaccatcctggtggagaccaagatcatgtccccactgggcatctccgtgctcagatgcgtccggctgctgaggattttcaagatcacgaggtactggaactccttgagcaacctggtggcatccttgctgaactctgtgcgctccatcgcctccctgctccttctcctcttcctcttcatcatcatcttctccctcctggggatgcagctctttggaggaaagttcaactttgatgagatgcagacccggaggagcacattcgataacttcccccagtccctcctcactgtgtttcagatcctgaccggggaggactggaattcggtgatgtatgatgggatcatggcttatggcggcccctcttttccagggatgttagtctgtatttacttcatcatcctcttcatctgtggaaactatatcctactgaatgtgttcttggccattgctgtggacaacctggctgatgctgagagcctcacatctgcccaaaaggaggaggaagaggagaaggagagaaagaagctggccaggactgccagcccagagaagaaacaagagttggtggagaagccggcagtgggggaatccaaggaggagaagattgagctgaaatccatcacggctgacggagagtctccacccgccaccaagatcaacatggatgacctccagcccaatgaaaatgaggataagagcccctaccccaacccagaaactacaggagaagaggatgaggaggagccagagatgcctgtcggccctcgcccacgaccactctctgagcttcaccttaaggaaaaggcagtgcccatgccagaagccagcgcgtttttcatcttcagctctaacaacaggtttcgcctccagtgccaccgcattgtcaatgacacgatcttcaccaacctgatcctcttcttcattctgctcagcagcatttccctggctgctgaggacccggtccagcacacctccttcaggaaccatatcctaggcaatgcagactatgtcttcactagtatctttacattagaaattatccttaagatgactgcttatggggctttcttgcacaagggttctttctgccggaactacttcaacatcctggacctgctggtggtcagcgtgtccctcatctcctttggcatccagtccagtgcaatcaatgtcgtgaagatcttgcgagtcctgcgagtactcaggcccctgagggccatcaacagggccaaggggctaaagcatgtggttcagtgtgtgtttgtcgccatccggaccatcgggaacatcgtgattgtcaccaccctgctgcagttcatgtttgcctgcatcggggtccagctcttcaagggaaagctgtacacctgttcagacagttccaagcagacagaggcggaatgcaagggcaactacatcacgtacaaagacggggaggttgaccaccccatcatccaaccccgcagctgggagaacagcaagtttgactttgacaatgttctggcagccatgatggccctcttcaccgtctccaccttcgaagggtggccagagctgctgtaccgctccatcgactcccacacggaagacaagggccccatctacaactaccgtgtggagatctccatcttcttcatcatctacatcatcatcatcgccttcttcatgatgaacatcttcgtgggcttcgtcatcgtcacctttcaggagcagggggagcaggagtacaagaactgtgagctggacaagaaccagcgacagtgcgtggaatacgccctcaaggcccggcccctgcggaggtacatccccaagaaccagcaccagtacaaagtgtggtacgtggtcaactccacctacttcgagtacctgatgttcgtcctcatcctgctcaacaccatctgcctggccatgcagcactacggccagagctgcctgttcaaaatcgccatgaacatcctcaacatgctcttcactggcctcttcaccgtggagatgatcctgaagctcattgccttcaaacccaagcactatttctgtgatgcatggaatacatttgacgccttgattgttgtgggtagcattgttgatatagcaatcaccgaggtaaacccagctgaacatacccaatgctctccctctatgaacgcagaggaaaactcccgcatctccatcaccttcttccgcctgttccgggtcatgcgtctggtgaagctgctgagccgtggggagggcatccggacgctgctgtggaccttcatcaagtccttccaggccctgccctatgtggccctcctgatcgtgatgctgttcttcatctacgcggtgatcgggatgcaggtgtttgggaaaattgccctgaatgataccacagagatcaaccggaacaacaactttcagaccttcccccaggccgtgctgctcctcttcaggtgtgccaccggggaggcctggcaggacatcatgctggcctgcatgccaggcaagaagtgtgccccagagtccgagcccagcaacagcacggagggtgaaacaccctgtggtagcagctttgctgtcttctacttcatcagcttctacatgctctgtgccttcctgatcatcaacctctttgtagctgtcatcatggacaactttgactacctgacaagggactggtccatccttggtccccaccacctggatgagtttaaaagaatctgggcagagtatgaccctgaagccaagggtcgtatcaaacacctggatgtggtgaccctcctccggcggattcagccgccactaggttttgggaagctgtgccctcaccgcgtggcttgcaaacgcctggtctccatgaacatgcctctgaacagcgacgggacagtcatgttcaatgccaccctgtttgccctggtcaggacggccctgaggatcaaaacagaagggaacctagaacaagccaatgaggagctgcgggcgatcatcaagaagatctggaagcggaccagcatgaagctgctggaccaggtggtgccccctgcaggtgatgatgaggtcaccgttggcaagttctacgccacgttcctgatccaggagtacttccggaagttcaagaagcgcaaagagcagggccttgtgggcaagccctcccagaggaacgcgctgtctctgcaggctggcttgcgcacactgcatgacatcgggcctgagatccgacgggccatctctggagatctcaccgctgaggaggagctggacaaggccatgaaggaggctgtgtccgctgcttctgaagatgacatcttcaggagggccggtggcctgttcggcaaccacgtcagctactaccaaagcgacggccggagcgccttcccccagaccttcaccactcagcgcccgctgcacatcaacaaggcgggcagcagccagggcgacactgagtcgccatcccacgagaagctggtggactccaccttcaccccgagcagctactcgtccaccggctccaacgccaacatcaacaacgccaacaacaccgccctgggtcgcctccctcgccccgccggctaccccagcacggtcagcactgtggagggccacgggccccccttgtcccctgccatccgggtgcaggaggtggcgtggaagctcagctccaacaggtgccactcccgggagagccaggcagccatggcgggtcaggaggagacgtctcaggatgagacctatgaagtgaagatgaaccatgacacggaggcctgcagtgagcccagcctgctctccacagagatgctctcctaccaggatgacgaaaatcggcaactgacgctcccagaggaggacaagagggacatccggcaatctccgaagaggggtttcctccgctctgcctcactaggtcgaagggcctccttccacctggaatgtctgaagcgacagaaggaccgagggggagacatctctcagaagacagtcctgcccttgcatctggttcatcatcaggcattggcagtggcaggcctgagccccctcctccagagaagccattcccctgcctcattccctaggccttttgccaccccaccagccacacctggcagccgaggctggcccccacagcccgtccccaccctgcggcttgagggggtcgagtccagtgagaaactcaacagcagcttcccatccatccactgcggctcctgggctgagaccacccccggtggcgggggcagcagcgccgcccggagagtccggcccgtctccctcatggtgcccagccaggctggggccccagggaggcagttccacggcagtgccagcagcctggtggaagcggtcttgatttcagaaggactggggcagtttgctcaagatcccaagttcatcgaggtcaccacccaggagctggccgacgcctgcgacatgaccatagaggagatggagagcgcggccgacaacatcctcagcgggggcgccccacagagccccaatggcgccctcttaccctttgtgaactgcagggacgcggggcaggaccgagccgggggcgaagaggacgcgggctgtgtgcgcgcgcggggtcgaccgagtgaggaggagctccaggacagcagggtctacgtcagcagcctgtagtgggcgctgccagatgcgggcttttttttatttgtttcaatgttcctaatgggttcgtttcagaagtgcctcactgttctcgtgacctggagtt

SEQ ID NO: 4173 - DNA, 7377 bp, Homo sapiens
  source 1..7377: mol_type = unassigned DNA
atggtcaatgagaatacgaggatgtacattccagaggaaaaccaccaaggttccaactatgggagcccacgccccgcccatgccaacatgaatgccaatgcggcagcggggctggcccctgagcacatccccaccccgggggctgccctgtcgtggcaggcggccatcgacgcagcccggcaggctaagctgatgggcagcgctggcaatgcgaccatctccacagtcagctccacgcagcggaagcggcagcaatatgggaaacccaagaagcagggcagcaccacggccacacgcccgccccgagccctgctctgcctgaccctgaagaaccccatccggagggcctgcatcagcattgtcgaatggaaaccatttgaaataattattttactgactatttttgccaattgtgtggccttagcgatctatattccctttccagaagatgattccaacgccaccaattccaacctggaacgagtggaatatctctttctcataatttttacggtggaagcgtttttaaaagtaatcgcctatggactcctctttcaccccaatgcctacctccgcaacggctggaacctactagattttataattgtggttgtggggctttttagtgcaattttagaacaagcaaccaaagcagatggggcaaacgctctcggagggaaaggggccggatttgatgtgaaggcgctgagggccttccgcgtgctgcgccccctgcggctggtgtccggagtcccaagtctccaggtggtcctgaattccatcatcaaggccatggtccccctgctgcacatcgccctgcttgtgctgtttgtcatcatcatctacgccatcatcggcttggagctcttcatggggaagatgcacaagacctgctacaaccaggagggcatagcagatgttccagcagaagatgacccttccccttgtgcgctggaaacgggccacgggcggcagtgccagaacggcacggtgtgcaagcccggctgggatggtcccaagcacggcatcaccaactttgacaactttgccttcgccatgctcacggtgttccagtgcatcaccatggagggctggacggacgtgctgtactggatgcaggacgctatgggctatgagttaccctgggtgtattttgtcagtctggtcatctttggatcctttttcgttctaaatctggttctcggtgtgttgagcggagagttttccaaagagagggagaaggccaaggcccggggagatttccagaagctgcgggagaagcagcagctagaagaggatctcaaaggctacctggattggatcactcaggccgaagacatcgatcctgagaatgaggacgaaggcatggatgaggagaagccccgaaacatgagcatgcccaccagtgagaccgagtccgtcaacaccgaaaacgtggctggaggtgacatcgagggagaaaactgcggggccaggctggcccaccggatctccaagtcaaagttcagccgctactggcgccggtggaatcggttctgcagaaggaagtgccgcgccgcagtcaagtctaatgtcttctactggctggtgattttcctggtgttcctcaacacgctcaccattgcctctgagcactacaaccagcccaactggctcacagaagtccaagacacggcaaacaaggccctgctggccctgttcacggcagagatgctcctgaagatgtacagcctgggcctgcaggcctacttcgtgtccctcttcaaccgctttgactgcttcgtcgtgtgtggcggcatcctggagaccatcctggtggagaccaagatcatgtccccactgggcatctccgtgctcagatgcgtccggctgctgaggattttcaagatcacgaggtactggaactccttgagcaacctggtggcatccttgctgaactctgtgcgctccatcgcctccctgctccttctcctcttcctcttcatcatcatcttctccctcctggggatgcagctctttggaggaaagttcaactttgatgagatgcagacccggaggagcacattcgataacttcccccagtccctcctcactgtgtttcagatcctgaccggggaggactggaattcggtgatgtatgatgggatcatggcttatggcggcccctcttttccagggatgttagtctgtatttacttcatcatcctcttcatctgtggaaactatatcctactgaatgtgttcttggccattgctgtggacaacctggctgatgctgagagcctcacatctgcccaaaaggaggaggaagaggagaaggagagaaagaagctggccaggactgccagcccagagaagaaacaagagttggtggagaagccggcagtgggggaatccaaggaggagaagattgagctgaaatccatcacggctgacggagagtctccacccgccaccaagatcaacatggatgacctccagcccaatgaaaatgaggataagagcccctaccccaacccagaaactacaggagaagaggatgaggaggagccagagatgcctgtcggccctcgcccacgaccactctctgagcttcaccttaaggaaaaggcagtgcccatgccagaagccagcgcgtttttcatcttcagctctaacaacaggtttcgcctccagtgccaccgcattgtcaatgacacgatcttcaccaacctgatcctcttcttcattctgctcagcagcatttccctggctgctgaggacccggtccagcacacctccttcaggaaccatattctgttttattttgatattgtttttaccaccattttcaccattgaaattgctctgaagatgactgcttatggggctttcttgcacaagggttctttctgccggaactacttcaacatcctggacctgctggtggtcagcgtgtccctcatctcctttggcatccagtccagtgcaatcaatgtcgtgaagatcttgcgagtcctgcgagtactcaggcccctgagggccatcaacagggccaaggggctaaagcatgtggttcagtgtgtgtttgtcgccatccggaccatcgggaacatcgtgattgtcaccaccctgctgcagttcatgtttgcctgcatcggggtccagctcttcaagggaaagctgtacacctgttcagacagttccaagcagacagaggcggaatgcaagggcaactacatcacgtacaaagacggggaggttgaccaccccatcatccaaccccgcagctgggagaacagcaagtttgactttgacaatgttctggcagccatgatggccctcttcaccgtctccaccttcgaagggtggccagagctgctgtaccgctccatcgactcccacacggaagacaagggccccatctacaactaccgtgtggagatctccatcttcttcatcatctacatcatcatcatcgccttcttcatgatgaacatcttcgtgggcttcgtcatcgtcacctttcaggagcagggggagcaggagtacaagaactgtgagctggacaagaaccagcgacagtgcgtggaatacgccctcaaggcccggcccctgcggaggtacatccccaagaaccagcaccagtacaaagtgtggtacgtggtcaactccacctacttcgagtacctgatgttcgtcctcatcctgctcaacaccatctgcctggccatgcagcactacggccagagctgcctgttcaaaatcgccatgaacatcctcaacatgctcttcactggcctcttcaccgtggagatgatcctgaagctcattgccttcaaacccaagggttactttagtgatccctggaatgtttttgacttcctcatcgtaattggcagcataattgacgtcattctcagtgagactaatccagctgaacatacccaatgctctccctctatgaacgcagaggaaaactcccgcatctccatcaccttcttccgcctgttccgggtcatgcgtctggtgaagctgctgagccgtggggagggcatccggacgctgctgtggaccttcatcaagtccttccaggccctgccctatgtggccctcctgatcgtgatgctgttcttcatctacgcggtgatcgggatgcaggtgtttgggaaaattgccctgaatgataccacagagatcaaccggaacaacaactttcagaccttcccccaggccgtgctgctcctcttcaggtgtgccaccggggaggcctggcaggacatcatgctggcctgcatgccaggcaagaagtgtgccccagagtccgagcccagcaacagcacggagggtgaaacaccctgtggtagcagctttgctgtcttctacttcatcagcttctacatgctctgtgccttcctgatcatcaacctctttgtagctgtcatcatggacaactttgactacctgacaagggactggtccatccttggtccccaccacctggatgagtttaaaagaatctgggcagagtatgaccctgaagccaagggtcgtatcaaacacctggatgtggtgaccctcctccggcggattcagccgccactaggttttgggaagctgtgccctcaccgcgtggcttgcaaacgcctggtctccatgaacatgcctctgaacagcgacgggacagtcatgttcaatgccaccctgtttgccctggtcaggacggccctgaggatcaaaacagaagggaacctagaacaagccaatgaggagctgcgggcgatcatcaagaagatctggaagcggaccagcatgaagctgctggaccaggtggtgccccctgcaggtgatgatgaggtcaccgttggcaagttctacgccacgttcctgatccaggagtacttccggaagttcaagaagcgcaaagagcagggccttgtgggcaagccctcccagaggaacgcgctgtctctgcaggctggcttgcgcacactgcatgacatcgggcctgagatccgacgggccatctctggagatctcaccgctgaggaggagctggacaaggccatgaaggaggctgtgtccgctgcttctgaagatgacatcttcaggagggccggtggcctgttcggcaaccacgtcagctactaccaaagcgacggccggagcgccttcccccagaccttcaccactcagcgcccgctgcacatcaacaaggcgggcagcagccagggcgacactgagtcgccatcccacgagaagctggtggactccaccttcaccccgagcagctactcgtccaccggctccaacgccaacatcaacaacgccaacaacaccgccctgggtcgcctccctcgccccgccggctaccccagcacggtcagcactgtggagggccacgggccccccttgtcccctgccatccgggtgcaggaggtggcgtggaagctcagctccaacaggtgccactcccgggagagccaggcagccatggcgggtcaggaggagacgtctcaggatgagacctatgaagtgaagatgaaccatgacacggaggcctgcagtgagcccagcctgctctccacagagatgctctcctaccaggatgacgaaaatcggcaactgacgctcccagaggaggacaagagggacatccggcaatctccgaagaggggtttcctccgctctgcctcactaggtcgaagggcctccttccacctggaatgtctgaagcgacagaaggaccgagggggagacatctctcagaagacagtcctgcccttgcatctggttcatcatcaggcattggcagtggcaggcctgagccccctcctccagagaagccattcccctgcctcattccctaggccttttgccaccccaccagccacacctggcagccgaggctggcccccacagcccgtccccaccctgcggcttgagggggtcgagtccagtgagaaactcaacagcagcttcccatccatccactgcggctcctgggctgagaccacccccggtggcgggggcagcagcgccgcccggagagtccggcccgtctccctcatggtgcccagccaggctggggccccagggaggcagttccacggcagtgccagcagcctggtggaagcggtcttgatttcagaaggactggggcagtttgctcaagatcccaagttcatcgaggtcaccacccaggagctggccgacgcctgcgacatgaccatagaggagatggagagcgcggccgacaacatcctcagcgggggcgccccacagagccccaatggcgccctcttaccctttgtgaactgcagggacgcggggcaggaccgagccgggggcgaagaggacgcgggctgtgtgcgcgcgcggggtcgaccgagtgaggaggagctccaggacagcagggtctacgtcagcagcctgtagtgggcgctgccagatgcgggcttttttttatttgtttcaatgttcctaatgggttcgtttcagaagtgcctcactgttctcgtgacctggagttaaccggaacagcgtcttcattcatttctgttgggaccagacgcggagcctgggtgcgcgagccgccctccgggaggaaggcgcccggctgcgtctgcagaggcggggagaggaggcggcgagggtcccggggcgcgaggaaggcgcctgccctctcccagctcgcaggccccgggcccggccgcgcctccgcggggagagcaccccggcttcccgcgcgccctcaccaaaaggaccctacagcaaacgggtgtctttcgactctgcttgtagaaaccatttgcacatattctgtacgagcctcgctgtctccctagagccagggccctgcggatttggagaagggagcggggcaggacttccaggaggaccccaacccggcccggagagggaggaggaggcctccaggggcgcggagctctggggatgggcgtcgggccggcagtggtgcggctcactccgtccctgcccacctgcgacgggatcccccgaccggcacgggccacgccgagctcccggccagccgccggcccgcaggcagcgcgagggaggagctgcgccgccggctccgcccaaccaggtggtgctgagcttccgctgagcgctcttttgttttgtggtttgacacttttcttgacagcatgttgcagtttcttttcggttttggttttttttaaatgttttattttgctttcccagcgggaggggaggaagaagagtgtttacaaagtcctgtagccccctcacctttctgttttcacttttgccaatgtacatcgggtttggttttcttgtattatttaaacggttgtggtttcctttttccacggaggttcaatagaagccgctgcaggagagttttaccaa

SEQ ID NO: 4174 - DNA, 6571 bp, Homo sapiens
  source 1..6571: mol_type = unassigned DNA
atggtcaatgagaatacgaggatgtacattccagaggaaaaccaccaaggttccaactatgggagcccacgccccgcccatgccaacatgaatgccaatgcggcagcggggctggcccctgagcacatccccaccccgggggctgccctgtcgtggcaggcggccatcgacgcagcccggcaggctaagctgatgggcagcgctggcaatgcgaccatctccacagtcagctccacgcagcggaagcggcagcaatatgggaaacccaagaagcagggcagcaccacggccacacgcccgccccgagccctgctctgcctgaccctgaagaaccccatccggagggcctgcatcagcattgtcgaatggaaaccatttgaaataattattttactgactatttttgccaattgtgtggccttagcgatctatattccctttccagaagatgattccaacgccaccaattccaacctggaacgagtggaatatctctttctcataatttttacggtggaagcgtttttaaaagtaatcgcctatggactcctctttcaccccaatgcctacctccgcaacggctggaacctactagattttataattgtggttgtggggctttttagtgcaattttagaacaagcaaccaaagcagatggggcaaacgctctcggagggaaaggggccggatttgatgtgaaggcgctgagggccttccgcgtgctgcgccccctgcggctggtgtccggagtcccaagtctccaggtggtcctgaattccatcatcaaggccatggtccccctgctgcacatcgccctgcttgtgctgtttgtcatcatcatctacgccatcatcggcttggagctcttcatggggaagatgcacaagacctgctacaaccaggagggcatagcagatgttccagcagaagatgacccttccccttgtgcgctggaaacgggccacgggcggcagtgccagaacggcacggtgtgcaagcccggctgggatggtcccaagcacggcatcaccaactttgacaactttgccttcgccatgctcacggtgttccagtgcatcaccatggagggctggacggacgtgctgtactgggtcaatgatgccgtaggaagggactggccctggatctattttgttacactaatcatcatagggtcattttttgtacttaacttggttctcggtgtgcttagcggagagttttccaaagagagggagaaggccaaggcccggggagatttccagaagctgcgggagaagcagcagctagaagaggatctcaaaggctacctggattggatcactcaggccgaagacatcgatcctgagaatgaggacgaaggcatggatgaggagaagccccgaaacatgagcatgcccaccagtgagaccgagtccgtcaacaccgaaaacgtggctggaggtgacatcgagggagaaaactgcggggccaggctggcccaccggatctccaagtcaaagttcagccgctactggcgccggtggaatcggttctgcagaaggaagtgccgcgccgcagtcaagtctaatgtcttctactggctggtgattttcctggtgttcctcaacacgctcaccattgcctctgagcactacaaccagcccaactggctcacagaagtccaagacacggcaaacaaggccctgctggccctgttcacggcagagatgctcctgaagatgtacagcctgggcctgcaggcctacttcgtgtccctcttcaaccgctttgactgcttcgtcgtgtgtggcggcatcctggagaccatcctggtggagaccaagatcatgtccccactgggcatctccgtgctcagatgcgtccggctgctgaggattttcaagatcacgaggtactggaactccttgagcaacctggtggcatccttgctgaactctgtgcgctccatcgcctccctgctccttctcctcttcctcttcatcatcatcttctccctcctggggatgcagctctttggaggaaagttcaactttgatgagatgcagacccggaggagcacattcgataacttcccccagtccctcctcactgtgtttcagatcctgaccggggaggactggaattcggtgatgtatgatgggatcatggcttatggcggcccctcttttccagggatgttagtctgtatttacttcatcatcctcttcatctgtggaaactatatcctactgaatgtgttcttggccattgctgtggacaacctggctgatgctgagagcctcacatctgcccaaaaggaggaggaagaggagaaggagagaaagaagctggccaggactgccagcccagagaagaaacaagagttggtggagaagccggcagtgggggaatccaaggaggagaagattgagctgaaatccatcacggctgacggagagtctccacccgccaccaagatcaacatggatgacctccagcccaatgaaaatgaggataagagcccctaccccaacccagaaactacaggagaagaggatgaggaggagccagagatgcctgtcggccctcgcccacgaccactctctgagcttcaccttaaggaaaaggcagtgcccatgccagaagccagcgcgtttttcatcttcagctctaacaacaggtttcgcctccagtgccaccgcattgtcaatgacacgatcttcaccaacctgatcctcttcttcattctgctcagcagcatttccctggctgctgaggacccggtccagcacacctccttcaggaaccatattctgttttattttgatattgtttttaccaccattttcaccattgaaattgctctgaagatcctaggcaatgcagactatgtcttcactagtatctttacattagaaattatccttaagatgactgcttatggggctttcttgcacaagggttctttctgccggaactacttcaacatcctggacctgctggtggtcagcgtgtccctcatctcctttggcatccagtccagtgcaatcaatgtcgtgaagatcttgcgagtcctgcgagtactcaggcccctgagggccatcaacagggccaaggggctaaagcatgtggttcagtgtgtgtttgtcgccatccggaccatcgggaacatcgtgattgtcaccaccctgctgcagttcatgtttgcctgcatcggggtccagctcttcaagggaaagctgtacacctgttcagacagttccaagcagacagaggcggaatgcaagggcaactacatcacgtacaaagacggggaggttgaccaccccatcatccaaccccgcagctgggagaacagcaagtttgactttgacaatgttctggcagccatgatggccctcttcaccgtctccaccttcgaagggtggccagagctgctgtaccgctccatcgactcccacacggaagacaagggccccatctacaactaccgtgtggagatctccatcttcttcatcatctacatcatcatcatcgccttcttcatgatgaacatcttcgtgggcttcgtcatcgtcacctttcaggagcagggggagcaggagtacaagaactgtgagctggacaagaaccagcgacagtgcgtggaatacgccctcaaggcccggcccctgcggaggtacatccccaagaaccagcaccagtacaaagtgtggtacgtggtcaactccacctacttcgagtacctgatgttcgtcctcatcctgctcaacaccatctgcctggccatgcagcactacggccagagctgcctgttcaaaatcgccatgaacatcctcaacatgctcttcactggcctcttcaccgtggagatgatcctgaagctcattgccttcaaacccaagcactatttctgtgatgcatggaatacatttgacgccttgattgttgtgggtagcattgttgatatagcaatcaccgaggtaaacccagctgaacatacccaatgctctccctctatgaacgcagaggaaaactcccgcatctccatcaccttcttccgcctgttccgggtcatgcgtctggtgaagctgctgagccgtggggagggcatccggacgctgctgtggaccttcatcaagtccttccaggccctgccctatgtggccctcctgatcgtgatgctgttcttcatctacgcggtgatcgggatgcaggtgtttgggaaaattgccctgaatgataccacagagatcaaccggaacaacaactttcagaccttcccccaggccgtgctgctcctcttcaggtgtgccaccggggaggcctggcaggacatcatgctggcctgcatgccaggcaagaagtgtgccccagagtccgagcccagcaacagcacggagggtgaaacaccctgtggtagcagctttgctgtcttctacttcatcagcttctacatgctctgtgccttcctgatcatcaacctctttgtagctgtcatcatggacaactttgactacctgacaagggactggtccatccttggtccccaccacctggatgagtttaaaagaatctgggcagagtatgaccctgaagccaagggtcgtatcaaacacctggatgtggtgaccctcctccggcggattcagccgccactaggttttgggaagctgtgccctcaccgcgtggcttgcaaacgcctggtctccatgaacatgcctctgaacagcgacgggacagtcatgttcaatgccaccctgtttgccctggtcaggacggccctgaggatcaaaacagaagggaacctagaacaagccaatgaggagctgcgggcgatcatcaagaagatctggaagcggaccagcatgaagctgctggaccaggtggtgccccctgcaggtgatgatgaggtcaccgttggcaagttctacgccacgttcctgatccaggagtacttccggaagttcaagaagcgcaaagagcagggccttgtgggcaagccctcccagaggaacgcgctgtctctgcaggctggcttgcgcacactgcatgacatcgggcctgagatccgacgggccatctctggagatctcaccgctgaggaggagctggacaaggccatgaaggaggctgtgtccgctgcttctgaagatgacatcttcaggagggccggtggcctgttcggcaaccacgtcagctactaccaaagcgacggccggagcgccttcccccagaccttcaccactcagcgcccgctgcacatcaacaaggcgggcagcagccagggcgacactgagtcgccatcccacgagaagctggtggactccaccttcaccccgagcagctactcgtccaccggctccaacgccaacatcaacaacgccaacaacaccgccctgggtcgcctccctcgccccgccggctaccccagcacggtcagcactgtggagggccacgggccccccttgtcccctgccatccgggtgcaggaggtggcgtggaagctcagctccaacaggtgccactcccgggagagccaggcagccatggcgggtcaggaggagacgtctcaggatgagacctatgaagtgaagatgaaccatgacacggaggcctgcagtgagcccagcctgctctccacagagatgctctcctaccaggatgacgaaaatcggcaactgacgctcccagaggaggacaagagggacatccggcaatctccgaagaggggtttcctccgctctgcctcactaggtcgaagggcctccttccacctggaatgtctgaagcgacagaaggaccgagggggagacatctctcagaagacagtcctgcccttgcatctggttcatcatcaggcattggcagtggcaggcctgagccccctcctccagagaagccattcccctgcctcattccctaggccttttgccaccccaccagccacacctggcagccgaggctggcccccacagcccgtccccaccctgcggcttgagggggtcgagtccagtgagaaactcaacagcagcttcccatccatccactgcggctcctgggctgagaccacccccggtggcgggggcagcagcgccgcccggagagtccggcccgtctccctcatggtgcccagccaggctggggccccagggaggcagttccacggcagtgccagcagcctggtggaagcggtcttgatttcagaaggactggggcagtttgctcaagatcccaagttcatcgaggtcaccacccaggagctggccgacgcctgcgacatgaccatagaggagatggagagcgcggccgacaacatcctcagcgggggcgccccacagagccccaatggcgccctcttaccctttgtgaactgcagggacgcggggcaggaccgagccgggggcgaagaggacgcgggctgtgtgcgcgcgcggggtcgaccgagtgaggaggagctccaggacagcagggtctacgtcagcagcctgtagtgggcgctgccagatgcgggcttttttttatttgtttcaatgttcctaatgggttcgtttcagaagtgcctcactgttctcgtgacctggagtt

SEQ ID NO: 4175 - DNA, 7482 bp, Homo sapiens
  source 1..7482: mol_type = unassigned DNA
atggtcaatgagaatacgaggatgtacattccagaggaaaaccaccaaggttccaactatgggagcccacgccccgcccatgccaacatgaatgccaatgcggcagcggggctggcccctgagcacatccccaccccgggggctgccctgtcgtggcaggcggccatcgacgcagcccggcaggctaagctgatgggcagcgctggcaatgcgaccatctccacagtcagctccacgcagcggaagcggcagcaatatgggaaacccaagaagcagggcagcaccacggccacacgcccgccccgagccctgctctgcctgaccctgaagaaccccatccggagggcctgcatcagcattgtcgaatggaaaccatttgaaataattattttactgactatttttgccaattgtgtggccttagcgatctatattccctttccagaagatgattccaacgccaccaattccaacctggaacgagtggaatatctctttctcataatttttacggtggaagcgtttttaaaagtaatcgcctatggactcctctttcaccccaatgcctacctccgcaacggctggaacctactagattttataattgtggttgtggggctttttagtgcaattttagaacaagcaaccaaagcagatggggcaaacgctctcggagggaaaggggccggatttgatgtgaaggcgctgagggccttccgcgtgctgcgccccctgcggctggtgtccggagtcccaagtctccaggtggtcctgaattccatcatcaaggccatggtccccctgctgcacatcgccctgcttgtgctgtttgtcatcatcatctacgccatcatcggcttggagctcttcatggggaagatgcacaagacctgctacaaccaggagggcatagcagatgttccagcagaagatgacccttccccttgtgcgctggaaacgggccacgggcggcagtgccagaacggcacggtgtgcaagcccggctgggatggtcccaagcacggcatcaccaactttgacaactttgccttcgccatgctcacggtgttccagtgcatcaccatggagggctggacggacgtgctgtactggatgcaggacgctatgggctatgagttaccctgggtgtattttgtcagtctggtcatctttggatcctttttcgttctaaatctggttctcggtgtgttgagcggagagttttccaaagagagggagaaggccaaggcccggggagatttccagaagctgcgggagaagcagcagctagaagaggatctcaaaggctacctggattggatcactcaggccgaagacatcgatcctgagaatgaggacgaaggcatggatgaggagaagccccgaaacatgagcatgcccaccagtgagaccgagtccgtcaacaccgaaaacgtggctggaggtgacatcgagggagaaaactgcggggccaggctggcccaccggatctccaagtcaaagttcagccgctactggcgccggtggaatcggttctgcagaaggaagtgccgcgccgcagtcaagtctaatgtcttctactggctggtgattttcctggtgttcctcaacacgctcaccattgcctctgagcactacaaccagcccaactggctcacagaagtccaagacacggcaaacaaggccctgctggccctgttcacggcagagatgctcctgaagatgtacagcctgggcctgcaggcctacttcgtgtccctcttcaaccgctttgactgcttcgtcgtgtgtggcggcatcctggagaccatcctggtggagaccaagatcatgtccccactgggcatctccgtgctcagatgcgtccggctgctgaggattttcaagatcacgaggtactggaactccttgagcaacctggtggcatccttgctgaactctgtgcgctccatcgcctccctgctccttctcctcttcctcttcatcatcatcttctccctcctggggatgcagctctttggaggaaagttcaactttgatgagatgcagacccggaggagcacattcgataacttcccccagtccctcctcactgtgtttcagatcctgaccggggaggactggaattcggtgatgtatgatgggatcatggcttatggcggcccctcttttccagggatgttagtctgtatttacttcatcatcctcttcatctgtggaaactatatcctactgaatgtgttcttggccattgctgtggacaacctggctgatgctgagagcctcacatctgcccaaaaggaggaggaagaggagaaggagagaaagaagctggccaggactgccagcccagagaagaaacaagagttggtggagaagccggcagtgggggaatccaaggaggagaagattgagctgaaatccatcacggctgacggagagtctccacccgccaccaagatcaacatggatgacctccagcccaatgaaaatgaggataagagcccctaccccaacccagaaactacaggagaagaggatgaggaggagccagagatgcctgtcggccctcgcccacgaccactctctgagcttcaccttaaggaaaaggcagtgcccatgccagaagccagcgcgtttttcatcttcagctctaacaacaggtttcgcctccagtgccaccgcattgtcaatgacacgatcttcaccaacctgatcctcttcttcattctgctcagcagcatttccctggctgctgaggacccggtccagcacacctccttcaggaaccatattctgttttattttgatattgtttttaccaccattttcaccattgaaattgctctgaagatgactgcttatggggctttcttgcacaagggttctttctgccggaactacttcaacatcctggacctgctggtggtcagcgtgtccctcatctcctttggcatccagtccagtgcaatcaatgtcgtgaagatcttgcgagtcctgcgagtactcaggcccctgagggccatcaacagggccaaggggctaaagcatgtggttcagtgtgtgtttgtcgccatccggaccatcgggaacatcgtgattgtcaccaccctgctgcagttcatgtttgcctgcatcggggtccagctcttcaagggaaagctgtacacctgttcagacagttccaagcagacagaggcggaatgcaagggcaactacatcacgtacaaagacggggaggttgaccaccccatcatccaaccccgcagctgggagaacagcaagtttgactttgacaatgttctggcagccatgatggccctcttcaccgtctccaccttcgaagggtggccagagctgctgtaccgctccatcgactcccacacggaagacaagggccccatctacaactaccgtgtggagatctccatcttcttcatcatctacatcatcatcatcgccttcttcatgatgaacatcttcgtgggcttcgtcatcgtcacctttcaggagcagggggagcaggagtacaagaactgtgagctggacaagaaccagcgacagtgcgtggaatacgccctcaaggcccggcccctgcggaggtacatccccaagaaccagcaccagtacaaagtgtggtacgtggtcaactccacctacttcgagtacctgatgttcgtcctcatcctgctcaacaccatctgcctggccatgcagcactacggccagagctgcctgttcaaaatcgccatgaacatcctcaacatgctcttcactggcctcttcaccgtggagatgatcctgaagctcattgccttcaaacccaagggttactttagtgatccctggaatgtttttgacttcctcatcgtaattggcagcataattgacgtcattctcagtgagactaatccagctgaacatacccaatgctctccctctatgaacgcagaggaaaactcccgcatctccatcaccttcttccgcctgttccgggtcatgcgtctggtgaagctgctgagccgtggggagggcatccggacgctgctgtggaccttcatcaagtccttccaggccctgccctatgtggccctcctgatcgtgatgctgttcttcatctacgcggtgatcgggatgcaggtgtttgggaaaattgccctgaatgataccacagagatcaaccggaacaacaactttcagaccttcccccaggccgtgctgctcctcttcaggtgtgccaccggggaggcctggcaggacatcatgctggcctgcatgccaggcaagaagtgtgccccagagtccgagcccagcaacagcacggagggtgaaacaccctgtggtagcagctttgctgtcttctacttcatcagcttctacatgctctgtgccttcctgatcatcaacctctttgtagctgtcatcatggacaactttgactacctgacaagggactggtccatccttggtccccaccacctggatgagtttaaaagaatctgggcagagtatgaccctgaagccaagggtcgtatcaaacacctggatgtggtgaccctcctccggcggattcagccgccactaggttttgggaagctgtgccctcaccgcgtggcttgcaaacgcctggtctccatgaacatgcctctgaacagcgacgggacagtcatgttcaatgccaccctgtttgccctggtcaggacggccctgaggatcaaaacagaagggaacctagaacaagccaatgaggagctgcgggcgatcatcaagaagatctggaagcggaccagcatgaagctgctggaccaggtggtgccccctgcaggtgatgatgaggtcaccgttggcaagttctacgccacgttcctgatccaggagtacttccggaagttcaagaagcgcaaagagcagggccttgtgggcaagccctcccagaggaacgcgctgtctctgcaggctggcttgcgcacactgcatgacatcgggcctgagatccgacgggccatctctggagatctcaccgctgaggaggagctggacaaggccatgaaggaggctgtgtccgctgcttctgaagatgacatcttcaggagggccggtggcctgttcggcaaccacgtcagctactaccaaagcgacggccggagcgccttcccccagaccttcaccactcagcgcccgctgcacatcaacaaggcgggcagcagccagggcgacactgagtcgccatcccacgagaagctggtggactccaccttcaccccgagcagctactcgtccaccggctccaacgccaacatcaacaacgccaacaacaccgccctgggtcgcctccctcgccccgccggctaccccagcacggtcagcactgtggagggccacgggccccccttgtcccctgccatccgggtgcaggaggtggcgtggaagctcagctccaacagggaaaggcacgttccgatgtgtgaggatctggagctcaggagggattcaggctcagcagggactcaggctcactgccttctgctcaggaaagcaaacccctctaggtgccactcccgggagagccaggcagccatggcgggtcaggaggagacgtctcaggatgagacctatgaagtgaagatgaaccatgacacggaggcctgcagtgagcccagcctgctctccacagagatgctctcctaccaggatgacgaaaatcggcaactgacgctcccagaggaggacaagagggacatccggcaatctccgaagaggggtttcctccgctctgcctcactaggtcgaagggcctccttccacctggaatgtctgaagcgacagaaggaccgagggggagacatctctcagaagacagtcctgcccttgcatctggttcatcatcaggcattggcagtggcaggcctgagccccctcctccagagaagccattcccctgcctcattccctaggccttttgccaccccaccagccacacctggcagccgaggctggcccccacagcccgtccccaccctgcggcttgagggggtcgagtccagtgagaaactcaacagcagcttcccatccatccactgcggctcctgggctgagaccacccccggtggcgggggcagcagcgccgcccggagagtccggcccgtctccctcatggtgcccagccaggctggggccccagggaggcagttccacggcagtgccagcagcctggtggaagcggtcttgatttcagaaggactggggcagtttgctcaagatcccaagttcatcgaggtcaccacccaggagctggccgacgcctgcgacatgaccatagaggagatggagagcgcggccgacaacatcctcagcgggggcgccccacagagccccaatggcgccctcttaccctttgtgaactgcagggacgcggggcaggaccgagccgggggcgaagaggacgcgggctgtgtgcgcgcgcggggtcgaccgagtgaggaggagctccaggacagcagggtctacgtcagcagcctgtagtgggcgctgccagatgcgggcttttttttatttgtttcaatgttcctaatgggttcgtttcagaagtgcctcactgttctcgtgacctggagttaaccggaacagcgtcttcattcatttctgttgggaccagacgcggagcctgggtgcgcgagccgccctccgggaggaaggcgcccggctgcgtctgcagaggcggggagaggaggcggcgagggtcccggggcgcgaggaaggcgcctgccctctcccagctcgcaggccccgggcccggccgcgcctccgcggggagagcaccccggcttcccgcgcgccctcaccaaaaggaccctacagcaaacgggtgtctttcgactctgcttgtagaaaccatttgcacatattctgtacgagcctcgctgtctccctagagccagggccctgcggatttggagaagggagcggggcaggacttccaggaggaccccaacccggcccggagagggaggaggaggcctccaggggcgcggagctctggggatgggcgtcgggccggcagtggtgcggctcactccgtccctgcccacctgcgacgggatcccccgaccggcacgggccacgccgagctcccggccagccgccggcccgcaggcagcgcgagggaggagctgcgccgccggctccgcccaaccaggtggtgctgagcttccgctgagcgctcttttgttttgtggtttgacacttttcttgacagcatgttgcagtttcttttcggttttggttttttttaaatgttttattttgctttcccagcgggaggggaggaagaagagtgtttacaaagtcctgtagccccctcacctttctgttttcacttttgccaatgtacatcgggtttggttttcttgtattatttaaacggttgtggtttcctttttccacggaggttcaatagaagccgctgcaggagagttttaccaa

SEQ ID NO: 4176 - DNA, 6568 bp, Homo sapiens
  source 1..6568: mol_type = unassigned DNA
atggtcaatgagaatacgaggatgtacattccagaggaaaaccaccaaggttccaactatgggagcccacgccccgcccatgccaacatgaatgccaatgcggcagcggggctggcccctgagcacatccccaccccgggggctgccctgtcgtggcaggcggccatcgacgcagcccggcaggctaagctgatgggcagcgctggcaatgcgaccatctccacagtcagctccacgcagcggaagcggcagcaatatgggaaacccaagaagcagggcagcaccacggccacacgcccgccccgagccctgctctgcctgaccctgaagaaccccatccggagggcctgcatcagcattgtcgaatggaaaccatttgaaataattattttactgactatttttgccaattgtgtggccttagcgatctatattccctttccagaagatgattccaacgccaccaattccaacctggaacgagtggaatatctctttctcataatttttacggtggaagcgtttttaaaagtaatcgcctatggactcctctttcaccccaatgcctacctccgcaacggctggaacctactagattttataattgtggttgtggggctttttagtgcaattttagaacaagcaaccaaagcagatggggcaaacgctctcggagggaaaggggccggatttgatgtgaaggcgctgagggccttccgcgtgctgcgccccctgcggctggtgtccggagtcccaagtctccaggtggtcctgaattccatcatcaaggccatggtccccctgctgcacatcgccctgcttgtgctgtttgtcatcatcatctacgccatcatcggcttggagctcttcatggggaagatgcacaagacctgctacaaccaggagggcatagcagatgttccagcagaagatgacccttccccttgtgcgctggaaacgggccacgggcggcagtgccagaacggcacggtgtgcaagcccggctgggatggtcccaagcacggcatcaccaactttgacaactttgccttcgccatgctcacggtgttccagtgcatcaccatggagggctggacggacgtgctgtactgggtcaatgatgccgtaggaagggactggccctggatctattttgttacactaatcatcatagggtcattttttgtacttaacttggttctcggtgtgcttagcggagagttttccaaagagagggagaaggccaaggcccggggagatttccagaagctgcgggagaagcagcagctagaagaggatctcaaaggctacctggattggatcactcaggccgaagacatcgatcctgagaatgaggacgaaggcatggatgaggagaagccccgaaacatgagcatgcccaccagtgagaccgagtccgtcaacaccgaaaacgtggctggaggtgacatcgagggagaaaactgcggggccaggctggcccaccggatctccaagtcaaagttcagccgctactggcgccggtggaatcggttctgcagaaggaagtgccgcgccgcagtcaagtctaatgtcttctactggctggtgattttcctggtgttcctcaacacgctcaccattgcctctgagcactacaaccagcccaactggctcacagaagtccaagacacggcaaacaaggccctgctggccctgttcacggcagagatgctcctgaagatgtacagcctgggcctgcaggcctacttcgtgtccctcttcaaccgctttgactgcttcgtcgtgtgtggcggcatcctggagaccatcctggtggagaccaagatcatgtccccactgggcatctccgtgctcagatgcgtccggctgctgaggattttcaagatcacgaggtactggaactccttgagcaacctggtggcatccttgctgaactctgtgcgctccatcgcctccctgctccttctcctcttcctcttcatcatcatcttctccctcctggggatgcagctctttggaggaaagttcaactttgatgagatgcagacccggaggagcacattcgataacttcccccagtccctcctcactgtgtttcagatcctgaccggggaggactggaattcggtgatgtatgatgggatcatggcttatggcggcccctcttttccagggatgttagtctgtatttacttcatcatcctcttcatctgtggaaactatatcctactgaatgtgttcttggccattgctgtggacaacctggctgatgctgagagcctcacatctgcccaaaaggaggaggaagaggagaaggagagaaagaagctggccaggactgccagcccagagaagaaacaagagttggtggagaagccggcagtgggggaatccaaggaggagaagattgagctgaaatccatcacggctgacggagagtctccacccgccaccaagatcaacatggatgacctccagcccaatgaaaatgaggataagagcccctaccccaacccagaaactacaggagaagaggatgaggaggagccagagatgcctgtcggccctcgcccacgaccactctctgagcttcaccttaaggaaaaggcagtgcccatgccagaagccagcgcgtttttcatcttcagctctaacaacaggtttcgcctccagtgccaccgcattgtcaatgacacgatcttcaccaacctgatcctcttcttcattctgctcagcagcatttccctggctgctgaggacccggtccagcacacctccttcaggaaccatattctgttttattttgatattgtttttaccaccattttcaccattgaaattgctctgaagatgactgcttatggggctttcttgcacaagggttctttctgccggaactacttcaacatcctggacctgctggtggtcagcgtgtccctcatctcctttggcatccagtccagtgcaatcaatgtcgtgaagatcttgcgagtcctgcgagtactcaggcccctgagggccatcaacagggccaaggggctaaagcatgtggttcagtgtgtgtttgtcgccatccggaccatcgggaacatcgtgattgtcaccaccctgctgcagttcatgtttgcctgcatcggggtccagctcttcaagggaaagctgtacacctgttcagacagttccaagcagacagaggcggaatgcaagggcaactacatcacgtacaaagacggggaggttgaccaccccatcatccaaccccgcagctgggagaacagcaagtttgactttgacaatgttctggcagccatgatggccctcttcaccgtctccaccttcgaagggtggccagagctgctgtaccgctccatcgactcccacacggaagacaagggccccatctacaactaccgtgtggagatctccatcttcttcatcatctacatcatcatcatcgccttcttcatgatgaacatcttcgtgggcttcgtcatcgtcacctttcaggagcagggggagcaggagtacaagaactgtgagctggacaagaaccagcgacagtgcgtggaatacgccctcaaggcccggcccctgcggaggtacatccccaagaaccagcaccagtacaaagtgtggtacgtggtcaactccacctacttcgagtacctgatgttcgtcctcatcctgctcaacaccatctgcctggccatgcagcactacggccagagctgcctgttcaaaatcgccatgaacatcctcaacatgctcttcactggcctcttcaccgtggagatgatcctgaagctcattgccttcaaacccaagcactatttctgtgatgcatggaatacatttgacgccttgattgttgtgggtagcattgttgatatagcaatcaccgaggtaaacccagctgaacatacccaatgctctccctctatgaacgcagaggaaaactcccgcatctccatcaccttcttccgcctgttccgggtcatgcgtctggtgaagctgctgagccgtggggagggcatccggacgctgctgtggaccttcatcaagtccttccaggccctgccctatgtggccctcctgatcgtgatgctgttcttcatctacgcggtgatcgggatgcaggtgtttgggaaaattgccctgaatgataccacagagatcaaccggaacaacaactttcagaccttcccccaggccgtgctgctcctcttcaggtgtgccaccggggaggcctggcaggacatcatgctggcctgcatgccaggcaagaagtgtgccccagagtccgagcccagcaacagcacggagggtgaaacaccctgtggtagcagctttgctgtcttctacttcatcagcttctacatgctctgtgccttcctgatcatcaacctctttgtagctgtcatcatggacaactttgactacctgacaagggactggtccatccttggtccccaccacctggatgagtttaaaagaatctgggcagagtatgaccctgaagccaagggtcgtatcaaacacctggatgtggtgaccctcctccggcggattcagccgccactaggttttgggaagctgtgccctcaccgcgtggcttgcaaacgcctggtctccatgaacatgcctctgaacagcgacgggacagtcatgttcaatgccaccctgtttgccctggtcaggacggccctgaggatcaaaacagaagagggacccagcccatcagaggcccaccaaggggctgaggatcctttccgccctgcagggaacctagaacaagccaatgaggagctgcgggcgatcatcaagaagatctggaagcggaccagcatgaagctgctggaccaggtggtgccccctgcaggtgatgatgaggtcaccgttggcaagttctacgccacgttcctgatccaggagtacttccggaagttcaagaagcgcaaagagcagggccttgtgggcaagccctcccagaggaacgcgctgtctctgcaggctggcttgcgcacactgcatgacatcgggcctgagatccgacgggccatctctggagatctcaccgctgaggaggagctggacaaggccatgaaggaggctgtgtccgctgcttctgaagatgacatcttcaggagggccggtggcctgttcggcaaccacgtcagctactaccaaagcgacggccggagcgccttcccccagaccttcaccactcagcgcccgctgcacatcaacaaggcgggcagcagccagggcgacactgagtcgccatcccacgagaagctggtggactccaccttcaccccgagcagctactcgtccaccggctccaacgccaacatcaacaacgccaacaacaccgccctgggtcgcctccctcgccccgccggctaccccagcacggtcagcactgtggagggccacgggccccccttgtcccctgccatccgggtgcaggaggtggcgtggaagctcagctccaacaggtgccactcccgggagagccaggcagccatggcgggtcaggaggagacgtctcaggatgagacctatgaagtgaagatgaaccatgacacggaggcctgcagtgagcccagcctgctctccacagagatgctctcctaccaggatgacgaaaatcggcaactgacgctcccagaggaggacaagagggacatccggcaatctccgaagaggggtttcctccgctctgcctcactaggtcgaagggcctccttccacctggaatgtctgaagcgacagaaggaccgagggggagacatctctcagaagacagtcctgcccttgcatctggttcatcatcaggcattggcagtggcaggcctgagccccctcctccagagaagccattcccctgcctcattccctaggccttttgccaccccaccagccacacctggcagccgaggctggcccccacagcccgtccccaccctgcggcttgagggggtcgagtccagtgagaaactcaacagcagcttcccatccatccactgcggctcctgggctgagaccacccccggtggcgggggcagcagcgccgcccggagagtccggcccgtctccctcatggtgcccagccaggctggggccccagggaggcagttccacggcagtgccagcagcctggtggaagcggtcttgatttcagaaggactggggcagtttgctcaagatcccaagttcatcgaggtcaccacccaggagctggccgacgcctgcgacatgaccatagaggagatggagagcgcggccgacaacatcctcagcgggggcgccccacagagccccaatggcgccctcttaccctttgtgaactgcagggacgcggggcaggaccgagccgggggcgaagaggacgcgggctgtgtgcgcgcgcggggtcgaccgagtgaggaggagctccaggacagcagggtctacgtcagcagcctgtagtgggcgctgccagatgcgggcttttttttatttgtttcaatgttcctaatgggttcgtttcagaagtgcctcactgttctcgtgacctggagtt

SEQ ID NO: 4177 - DNA, 6562 bp, Homo sapiens
  source 1..6562: mol_type = unassigned DNA
atggtcaatgagaatacgaggatgtacattccagaggaaaaccaccaaggttccaactatgggagcccacgccccgcccatgccaacatgaatgccaatgcggcagcggggctggcccctgagcacatccccaccccgggggctgccctgtcgtggcaggcggccatcgacgcagcccggcaggctaagctgatgggcagcgctggcaatgcgaccatctccacagtcagctccacgcagcggaagcggcagcaatatgggaaacccaagaagcagggcagcaccacggccacacgcccgccccgagccctgctctgcctgaccctgaagaaccccatccggagggcctgcatcagcattgtcgaatggaaaccatttgaaataattattttactgactatttttgccaattgtgtggccttagcgatctatattccctttccagaagatgattccaacgccaccaattccaacctggaacgagtggaatatctctttctcataatttttacggtggaagcgtttttaaaagtaatcgcctatggactcctctttcaccccaatgcctacctccgcaacggctggaacctactagattttataattgtggttgtggggctttttagtgcaattttagaacaagcaaccaaagcagatggggcaaacgctctcggagggaaaggggccggatttgatgtgaaggcgctgagggccttccgcgtgctgcgccccctgcggctggtgtccggagtcccaagtctccaggtggtcctgaattccatcatcaaggccatggtccccctgctgcacatcgccctgcttgtgctgtttgtcatcatcatctacgccatcatcggcttggagctcttcatggggaagatgcacaagacctgctacaaccaggagggcatagcagatgttccagcagaagatgacccttccccttgtgcgctggaaacgggccacgggcggcagtgccagaacggcacggtgtgcaagcccggctgggatggtcccaagcacggcatcaccaactttgacaactttgccttcgccatgctcacggtgttccagtgcatcaccatggagggctggacggacgtgctgtactgggtcaatgatgccgtaggaagggactggccctggatctattttgttacactaatcatcatagggtcattttttgtacttaacttggttctcggtgtgcttagcggagagttttccaaagagagggagaaggccaaggcccggggagatttccagaagctgcgggagaagcagcagctagaagaggatctcaaaggctacctggattggatcactcaggccgaagacatcgatcctgagaatgaggacgaaggcatggatgaggagaagccccgaaacatgagcatgcccaccagtgagaccgagtccgtcaacaccgaaaacgtggctggaggtgacatcgagggagaaaactgcggggccaggctggcccaccggatctccaagtcaaagttcagccgctactggcgccggtggaatcggttctgcagaaggaagtgccgcgccgcagtcaagtctaatgtcttctactggctggtgattttcctggtgttcctcaacacgctcaccattgcctctgagcactacaaccagcccaactggctcacagaagtccaagacacggcaaacaaggccctgctggccctgttcacggcagagatgctcctgaagatgtacagcctgggcctgcaggcctacttcgtgtccctcttcaaccgctttgactgcttcgtcgtgtgtggcggcatcctggagaccatcctggtggagaccaagatcatgtccccactgggcatctccgtgctcagatgcgtccggctgctgaggattttcaagatcacgaggtactggaactccttgagcaacctggtggcatccttgctgaactctgtgcgctccatcgcctccctgctccttctcctcttcctcttcatcatcatcttctccctcctggggatgcagctctttggaggaaagttcaactttgatgagatgcagacccggaggagcacattcgataacttcccccagtccctcctcactgtgtttcagatcctgaccggggaggactggaattcggtgatgtatgatgggatcatggcttatggcggcccctcttttccagggatgttagtctgtatttacttcatcatcctcttcatctgtggaaactatatcctactgaatgtgttcttggccattgctgtggacaacctggctgatgctgagagcctcacatctgcccaaaaggaggaggaagaggagaaggagagaaagaagctggccaggactgccagcccagagaagaaacaagagttggtggagaagccggcagtgggggaatccaaggaggagaagattgagctgaaatccatcacggctgacggagagtctccacccgccaccaagatcaacatggatgacctccagcccaatgaaaatgaggataagagcccctaccccaacccagaaactacaggagaagaggatgaggaggagccagagatgcctgtcggccctcgcccacgaccactctctgagcttcaccttaaggaaaaggcagtgcccatgccagaagccagcgcgtttttcatcttcagctctaacaacaggtttcgcctccagtgccaccgcattgtcaatgacacgatcttcaccaacctgatcctcttcttcattctgctcagcagcatttccctggctgctgaggacccggtccagcacacctccttcaggaaccatatcctaggcaatgcagactatgtcttcactagtatctttacattagaaattatccttaagatgactgcttatggggctttcttgcacaagggttctttctgccggaactacttcaacatcctggacctgctggtggtcagcgtgtccctcatctcctttggcatccagtccagtgcaatcaatgtcgtgaagatcttgcgagtcctgcgagtactcaggcccctgagggccatcaacagggccaaggggctaaagcatgtggttcagtgtgtgtttgtcgccatccggaccatcgggaacatcgtgattgtcaccaccctgctgcagttcatgtttgcctgcatcggggtccagctcttcaagggaaagctgtacacctgttcagacagttccaagcagacagaggcggaatgcaagggcaactacatcacgtacaaagacggggaggttgaccaccccatcatccaaccccgcagctgggagaacagcaagtttgactttgacaatgttctggcagccatgatggccctcttcaccgtctccaccttcgaagggtggccagagctgctgtaccgctccatcgactcccacacggaagacaagggccccatctacaactaccgtgtggagatctccatcttcttcatcatctacatcatcatcatcgccttcttcatgatgaacatcttcgtgggcttcgtcatcgtcacctttcaggagcagggggagcaggagtacaagaactgtgagctggacaagaaccagcgacagtgcgtggaatacgccctcaaggcccggcccctgcggaggtacatccccaagaaccagcaccagtacaaagtgtggtacgtggtcaactccacctacttcgagtacctgatgttcgtcctcatcctgctcaacaccatctgcctggccatgcagcactacggccagagctgcctgttcaaaatcgccatgaacatcctcaacatgctcttcactggcctcttcaccgtggagatgatcctgaagctcattgccttcaaacccaagggttactttagtgatccctggaatgtttttgacttcctcatcgtaattggcagcataattgacgtcattctcagtgagactaatcactatttctgtgatgcatggaatacatttgacgccttgattgttgtgggtagcattgttgatatagcaatcaccgaggtaaacaacgcagaggaaaactcccgcatctccatcaccttcttccgcctgttccgggtcatgcgtctggtgaagctgctgagccgtggggagggcatccggacgctgctgtggaccttcatcaagtccttccaggccctgccctatgtggccctcctgatcgtgatgctgttcttcatctacgcggtgatcgggatgcaggtgtttgggaaaattgccctgaatgataccacagagatcaaccggaacaacaactttcagaccttcccccaggccgtgctgctcctcttcaggtgtgccaccggggaggcctggcaggacatcatgctggcctgcatgccaggcaagaagtgtgccccagagtccgagcccagcaacagcacggagggtgaaacaccctgtggtagcagctttgctgtcttctacttcatcagcttctacatgctctgtgccttcctgatcatcaacctctttgtagctgtcatcatggacaactttgactacctgacaagggactggtccatccttggtccccaccacctggatgagtttaaaagaatctgggcagagtatgaccctgaagccaagggtcgtatcaaacacctggatgtggtgaccctcctccggcggattcagccgccactaggttttgggaagctgtgccctcaccgcgtggcttgcaaacgcctggtctccatgaacatgcctctgaacagcgacgggacagtcatgttcaatgccaccctgtttgccctggtcaggacggccctgaggatcaaaacagaagggaacctagaacaagccaatgaggagctgcgggcgatcatcaagaagatctggaagcggaccagcatgaagctgctggaccaggtggtgccccctgcaggtgatgatgaggtcaccgttggcaagttctacgccacgttcctgatccaggagtacttccggaagttcaagaagcgcaaagagcagggccttgtgggcaagccctcccagaggaacgcgctgtctctgcaggctggcttgcgcacactgcatgacatcgggcctgagatccgacgggccatctctggagatctcaccgctgaggaggagctggacaaggccatgaaggaggctgtgtccgctgcttctgaagatgacatcttcaggagggccggtggcctgttcggcaaccacgtcagctactaccaaagcgacggccggagcgccttcccccagaccttcaccactcagcgcccgctgcacatcaacaaggcgggcagcagccagggcgacactgagtcgccatcccacgagaagctggtggactccaccttcaccccgagcagctactcgtccaccggctccaacgccaacatcaacaacgccaacaacaccgccctgggtcgcctccctcgccccgccggctaccccagcacggtcagcactgtggagggccacgggccccccttgtcccctgccatccgggtgcaggaggtggcgtggaagctcagctccaacaggtgccactcccgggagagccaggcagccatggcgggtcaggaggagacgtctcaggatgagacctatgaagtgaagatgaaccatgacacggaggcctgcagtgagcccagcctgctctccacagagatgctctcctaccaggatgacgaaaatcggcaactgacgctcccagaggaggacaagagggacatccggcaatctccgaagaggggtttcctccgctctgcctcactaggtcgaagggcctccttccacctggaatgtctgaagcgacagaaggaccgagggggagacatctctcagaagacagtcctgcccttgcatctggttcatcatcaggcattggcagtggcaggcctgagccccctcctccagagaagccattcccctgcctcattccctaggccttttgccaccccaccagccacacctggcagccgaggctggcccccacagcccgtccccaccctgcggcttgagggggtcgagtccagtgagaaactcaacagcagcttcccatccatccactgcggctcctgggctgagaccacccccggtggcgggggcagcagcgccgcccggagagtccggcccgtctccctcatggtgcccagccaggctggggccccagggaggcagttccacggcagtgccagcagcctggtggaagcggtcttgatttcagaaggactggggcagtttgctcaagatcccaagttcatcgaggtcaccacccaggagctggccgacgcctgcgacatgaccatagaggagatggagagcgcggccgacaacatcctcagcgggggcgccccacagagccccaatggcgccctcttaccctttgtgaactgcagggacgcggggcaggaccgagccgggggcgaagaggacgcgggctgtgtgcgcgcgcggggtcgaccgagtgaggaggagctccaggacagcagggtctacgtcagcagcctgtagtgggcgctgccagatgcgggcttttttttatttgtttcaatgttcctaatgggttcgtttcagaagtgcctcactgttctcgtgacctggagtt

SEQ ID NO: 4178 - DNA, 7590 bp, Homo sapiens
  source 1..7590: mol_type = unassigned DNA
atggtcaatgagaatacgaggatgtacattccagaggaaaaccaccaaggttccaactatgggagcccacgccccgcccatgccaacatgaatgccaatgcggcagcggggctggcccctgagcacatccccaccccgggggctgccctgtcgtggcaggcggccatcgacgcagcccggcaggctaagctgatgggcagcgctggcaatgcgaccatctccacagtcagctccacgcagcggaagcggcagcaatatgggaaacccaagaagcagggcagcaccacggccacacgcccgccccgagccctgctctgcctgaccctgaagaaccccatccggagggcctgcatcagcattgtcgaatggaaaccatttgaaataattattttactgactatttttgccaattgtgtggccttagcgatctatattccctttccagaagatgattccaacgccaccaattccaacctggaacgagtggaatatctctttctcataatttttacggtggaagcgtttttaaaagtaatcgcctatggactcctctttcaccccaatgcctacctccgcaacggctggaacctactagattttataattgtggttgtggggctttttagtgcaattttagaacaagcaaccaaagcagatggggcaaacgctctcggagggaaaggggccggatttgatgtgaaggcgctgagggccttccgcgtgctgcgccccctgcggctggtgtccggagtcccaagtctccaggtggtcctgaattccatcatcaaggccatggtccccctgctgcacatcgccctgcttgtgctgtttgtcatcatcatctacgccatcatcggcttggagctcttcatggggaagatgcacaagacctgctacaaccaggagggcatagcagatgttccagcagaagatgacccttccccttgtgcgctggaaacgggccacgggcggcagtgccagaacggcacggtgtgcaagcccggctgggatggtcccaagcacggcatcaccaactttgacaactttgccttcgccatgctcacggtgttccagtgcatcaccatggagggctggacggacgtgctgtactggatgcaggacgctatgggctatgagttaccctgggtgtattttgtcagtctggtcatctttggatcctttttcgttctaaatctggttctcggtgtgttgagcggagagttttccaaagagagggagaaggccaaggcccggggagatttccagaagctgcgggagaagcagcagctagaagaggatctcaaaggctacctggattggatcactcaggccgaagacatcgatcctgagaatgaggacgaaggcatggatgaggagaagccccgaaacatgagcatgcccaccagtgagaccgagtccgtcaacaccgaaaacgtggctggaggtgacatcgagggagaaaactgcggggccaggctggcccaccggatctccaagtcaaagttcagccgctactggcgccggtggaatcggttctgcagaaggaagtgccgcgccgcagtcaagtctaatgtcttctactggctggtgattttcctggtgttcctcaacacgctcaccattgcctctgagcactacaaccagcccaactggctcacagaagtccaagacacggcaaacaaggccctgctggccctgttcacggcagagatgctcctgaagatgtacagcctgggcctgcaggcctacttcgtgtccctcttcaaccgctttgactgcttcgtcgtgtgtggcggcatcctggagaccatcctggtggagaccaagatcatgtccccactgggcatctccgtgctcagatgcgtccggctgctgaggattttcaagatcacgaggtactggaactccttgagcaacctggtggcatccttgctgaactctgtgcgctccatcgcctccctgctccttctcctcttcctcttcatcatcatcttctccctcctggggatgcagctctttggaggaaagttcaactttgatgagatgcagacccggaggagcacattcgataacttcccccagtccctcctcactgtgtttcagatcctgaccggggaggactggaattcggtgatgtatgatgggatcatggcttatggcggcccctcttttccagggatgttagtctgtatttacttcatcatcctcttcatctgtggaaactatatcctactgaatgtgttcttggccattgctgtggacaacctggctgatgctgagagcctcacatctgcccaaaaggaggaggaagaggagaaggagagaaagaagctggccaggactgccagcccagagaagaaacaagagttggtggagaagccggcagtgggggaatccaaggaggagaagattgagctgaaatccatcacggctgacggagagtctccacccgccaccaagatcaacatggatgacctccagcccaatgaaaatgaggataagagcccctaccccaacccagaaactacaggagaagaggatgaggaggagccagagatgcctgtcggccctcgcccacgaccactctctgagcttcaccttaaggaaaaggcagtgcccatgccagaagccagcgcgtttttcatcttcagctctaacaacaggtttcgcctccagtgccaccgcattgtcaatgacacgatcttcaccaacctgatcctcttcttcattctgctcagcagcatttccctggctgctgaggacccggtccagcacacctccttcaggaaccatattctgttttattttgatattgtttttaccaccattttcaccattgaaattgctctgaagatgactgcttatggggctttcttgcacaagggttctttctgccggaactacttcaacatcctggacctgctggtggtcagcgtgtccctcatctcctttggcatccagtccagtgcaatcaatgtcgtgaagatcttgcgagtcctgcgagtactcaggcccctgagggccatcaacagggccaaggggctaaagcatgtggttcagtgtgtgtttgtcgccatccggaccatcgggaacatcgtgattgtcaccaccctgctgcagttcatgtttgcctgcatcggggtccagctcttcaagggaaagctgtacacctgttcagacagttccaagcagacagaggcggaatgcaagggcaactacatcacgtacaaagacggggaggttgaccaccccatcatccaaccccgcagctgggagaacagcaagtttgactttgacaatgttctggcagccatgatggccctcttcaccgtctccaccttcgaagggtggccagagctgctgtaccgctccatcgactcccacacggaagacaagggccccatctacaactaccgtgtggagatctccatcttcttcatcatctacatcatcatcatcgccttcttcatgatgaacatcttcgtgggcttcgtcatcgtcacctttcaggagcagggggagcaggagtacaagaactgtgagctggacaagaaccagcgacagtgcgtggaatacgccctcaaggcccggcccctgcggaggtacatccccaagaaccagcaccagtacaaagtgtggtacgtggtcaactccacctacttcgagtacctgatgttcgtcctcatcctgctcaacaccatctgcctggccatgcagcactacggccagagctgcctgttcaaaatcgccatgaacatcctcaacatgctcttcactggcctcttcaccgtggagatgatcctgaagctcattgccttcaaacccaagcactatttctgtgatgcatggaatacatttgacgccttgattgttgtgggtagcattgttgatatagcaatcaccgaggtaaacccagctgaacatacccaatgctctccctctatgaacgcagaggaaaactcccgcatctccatcaccttcttccgcctgttccgggtcatgcgtctggtgaagctgctgagccgtggggagggcatccggacgctgctgtggaccttcatcaagtccttccaggccctgccctatgtggccctcctgatcgtgatgctgttcttcatctacgcggtgatcgggatgcaggtgtttgggaaaattgccctgaatgataccacagagatcaaccggaacaacaactttcagaccttcccccaggccgtgctgctcctcttcaggtgtgccaccggggaggcctggcaggacatcatgctggcctgcatgccaggcaagaagtgtgccccagagtccgagcccagcaacagcacggagggtgaaacaccctgtggtagcagctttgctgtcttctacttcatcagcttctacatgctctgtgccttcctgatcatcaacctctttgtagctgtcatcatggacaactttgactacctgacaagggactggtccatccttggtccccaccacctggatgagtttaaaagaatctgggcagagtatgaccctgaagccaagggtcgtatcaaacacctggatgtggtgaccctcctccggcggattcagccgccactaggttttgggaagctgtgccctcaccgcgtggcttgcaaacgcctggtctccatgaacatgcctctgaacagcgacgggacagtcatgttcaatgccaccctgtttgccctggtcaggacggccctgaggatcaaaacagaagggaacctagaacaagccaatgaggagctgcgggcgatcatcaagaagatctggaagcggaccagcatgaagctgctggaccaggtggtgccccctgcaggtgatgatgaggtcaccgttggcaagttctacgccacgttcctgatccaggagtacttccggaagttcaagaagcgcaaagagcagggccttgtgggcaagccctcccagaggaacgcgctgtctctgcaggctggcttgcgcacactgcatgacatcgggcctgagatccgacgggccatctctggagatctcaccgctgaggaggagctggacaaggccatgaaggaggctgtgtccgctgcttctgaagatgacatcttcaggagggccggtggcctgttcggcaaccacgtcagctactaccaaagcgacggccggagcgccttcccccagaccttcaccactcagcgcccgctgcacatcaacaaggcgggcagcagccagggcgacactgagtcgccatcccacgagaagctggtggactccaccttcaccccgagcagctactcgtccaccggctccaacgccaacatcaacaacgccaacaacaccgccctgggtcgcctccctcgccccgccggctaccccagcacggtcagcactgtggagggccacgggccccccttgtcccctgccatccgggtgcaggaggtggcgtggaagctcagctccaacaggatgcactgctgtgacatgctggatggtgggaccttccctcccgccctgggcccccgcagggctcctccctgtctgcatcagcagctccagggttccctggcggggctgagagaggacacaccctgcatcgtgcctggccacgcttcactgtgctgctcttccagagtaggagagtggctcccagcaggctgcacagccccccagcatgccaggtgccactcccgggagagccaggcagccatggcgggtcaggaggagacgtctcaggatgagacctatgaagtgaagatgaaccatgacacggaggcctgcagtgagcccagcctgctctccacagagatgctctcctaccaggatgacgaaaatcggcaactgacgctcccagaggaggacaagagggacatccggcaatctccgaagaggggtttcctccgctctgcctcactaggtcgaagggcctccttccacctggaatgtctgaagcgacagaaggaccgagggggagacatctctcagaagacagtcctgcccttgcatctggttcatcatcaggcattggcagtggcaggcctgagccccctcctccagagaagccattcccctgcctcattccctaggccttttgccaccccaccagccacacctggcagccgaggctggcccccacagcccgtccccaccctgcggcttgagggggtcgagtccagtgagaaactcaacagcagcttcccatccatccactgcggctcctgggctgagaccacccccggtggcgggggcagcagcgccgcccggagagtccggcccgtctccctcatggtgcccagccaggctggggccccagggaggcagttccacggcagtgccagcagcctggtggaagcggtcttgatttcagaaggactggggcagtttgctcaagatcccaagttcatcgaggtcaccacccaggagctggccgacgcctgcgacatgaccatagaggagatggagagcgcggccgacaacatcctcagcgggggcgccccacagagccccaatggcgccctcttaccctttgtgaactgcagggacgcggggcaggaccgagccgggggcgaagaggacgcgggctgtgtgcgcgcgcggggtcgaccgagtgaggaggagctccaggacagcagggtctacgtcagcagcctgtagtgggcgctgccagatgcgggcttttttttatttgtttcaatgttcctaatgggttcgtttcagaagtgcctcactgttctcgtgacctggagttaaccggaacagcgtcttcattcatttctgttgggaccagacgcggagcctgggtgcgcgagccgccctccgggaggaaggcgcccggctgcgtctgcagaggcggggagaggaggcggcgagggtcccggggcgcgaggaaggcgcctgccctctcccagctcgcaggccccgggcccggccgcgcctccgcggggagagcaccccggcttcccgcgcgccctcaccaaaaggaccctacagcaaacgggtgtctttcgactctgcttgtagaaaccatttgcacatattctgtacgagcctcgctgtctccctagagccagggccctgcggatttggagaagggagcggggcaggacttccaggaggaccccaacccggcccggagagggaggaggaggcctccaggggcgcggagctctggggatgggcgtcgggccggcagtggtgcggctcactccgtccctgcccacctgcgacgggatcccccgaccggcacgggccacgccgagctcccggccagccgccggcccgcaggcagcgcgagggaggagctgcgccgccggctccgcccaaccaggtggtgctgagcttccgctgagcgctcttttgttttgtggtttgacacttttcttgacagcatgttgcagtttcttttcggttttggttttttttaaatgttttattttgctttcccagcgggaggggaggaagaagagtgtttacaaagtcctgtagccccctcacctttctgttttcacttttgccaatgtacatcgggtttggttttcttgtattatttaaacggttgtggtttcctttttccacggaggttcaatagaagccgctgcaggagagttttaccaa

SEQ ID NO: 4179 - DNA, 6568 bp, Homo sapiens
  source 1..6568: mol_type = unassigned DNA
atggtcaatgagaatacgaggatgtacattccagaggaaaaccaccaaggttccaactatgggagcccacgccccgcccatgccaacatgaatgccaatgcggcagcggggctggcccctgagcacatccccaccccgggggctgccctgtcgtggcaggcggccatcgacgcagcccggcaggctaagctgatgggcagcgctggcaatgcgaccatctccacagtcagctccacgcagcggaagcggcagcaatatgggaaacccaagaagcagggcagcaccacggccacacgcccgccccgagccctgctctgcctgaccctgaagaaccccatccggagggcctgcatcagcattgtcgaatggaaaccatttgaaataattattttactgactatttttgccaattgtgtggccttagcgatctatattccctttccagaagatgattccaacgccaccaattccaacctggaacgagtggaatatctctttctcataatttttacggtggaagcgtttttaaaagtaatcgcctatggactcctctttcaccccaatgcctacctccgcaacggctggaacctactagattttataattgtggttgtggggctttttagtgcaattttagaacaagcaaccaaagcagatggggcaaacgctctcggagggaaaggggccggatttgatgtgaaggcgctgagggccttccgcgtgctgcgccccctgcggctggtgtccggagtcccaagtctccaggtggtcctgaattccatcatcaaggccatggtccccctgctgcacatcgccctgcttgtgctgtttgtcatcatcatctacgccatcatcggcttggagctcttcatggggaagatgcacaagacctgctacaaccaggagggcatagcagatgttccagcagaagatgacccttccccttgtgcgctggaaacgggccacgggcggcagtgccagaacggcacggtgtgcaagcccggctgggatggtcccaagcacggcatcaccaactttgacaactttgccttcgccatgctcacggtgttccagtgcatcaccatggagggctggacggacgtgctgtactgggtcaatgatgccgtaggaagggactggccctggatctattttgttacactaatcatcatagggtcattttttgtacttaacttggttctcggtgtgcttagcggagagttttccaaagagagggagaaggccaaggcccggggagatttccagaagctgcgggagaagcagcagctagaagaggatctcaaaggctacctggattggatcactcaggccgaagacatcgatcctgagaatgaggacgaaggcatggatgaggagaagccccgaaacatgagcatgcccaccagtgagaccgagtccgtcaacaccgaaaacgtggctggaggtgacatcgagggagaaaactgcggggccaggctggcccaccggatctccaagtcaaagttcagccgctactggcgccggtggaatcggttctgcagaaggaagtgccgcgccgcagtcaagtctaatgtcttctactggctggtgattttcctggtgttcctcaacacgctcaccattgcctctgagcactacaaccagcccaactggctcacagaagtccaagacacggcaaacaaggccctgctggccctgttcacggcagagatgctcctgaagatgtacagcctgggcctgcaggcctacttcgtgtccctcttcaaccgctttgactgcttcgtcgtgtgtggcggcatcctggagaccatcctggtggagaccaagatcatgtccccactgggcatctccgtgctcagatgcgtccggctgctgaggattttcaagatcacgaggtactggaactccttgagcaacctggtggcatccttgctgaactctgtgcgctccatcgcctccctgctccttctcctcttcctcttcatcatcatcttctccctcctggggatgcagctctttggaggaaagttcaactttgatgagatgcagacccggaggagcacattcgataacttcccccagtccctcctcactgtgtttcagatcctgaccggggaggactggaattcggtgatgtatgatgggatcatggcttatggcggcccctcttttccagggatgttagtctgtatttacttcatcatcctcttcatctgtggaaactatatcctactgaatgtgttcttggccattgctgtggacaacctggctgatgctgagagcctcacatctgcccaaaaggaggaggaagaggagaaggagagaaagaagctggccaggactgccagcccagagaagaaacaagagttggtggagaagccggcagtgggggaatccaaggaggagaagattgagctgaaatccatcacggctgacggagagtctccacccgccaccaagatcaacatggatgacctccagcccaatgaaaatgaggataagagcccctaccccaacccagaaactacaggagaagaggatgaggaggagccagagatgcctgtcggccctcgcccacgaccactctctgagcttcaccttaaggaaaaggcagtgcccatgccagaagccagcgcgtttttcatcttcagctctaacaacaggtttcgcctccagtgccaccgcattgtcaatgacacgatcttcaccaacctgatcctcttcttcattctgctcagcagcatttccctggctgctgaggacccggtccagcacacctccttcaggaaccatatcctaggcaatgcagactatgtcttcactagtatctttacattagaaattatccttaagatgactgcttatggggctttcttgcacaagggttctttctgccggaactacttcaacatcctggacctgctggtggtcagcgtgtccctcatctcctttggcatccagtccagtgcaatcaatgtcgtgaagatcttgcgagtcctgcgagtactcaggcccctgagggccatcaacagggccaaggggctaaagcatgtggttcagtgtgtgtttgtcgccatccggaccatcgggaacatcgtgattgtcaccaccctgctgcagttcatgtttgcctgcatcggggtccagctcttcaagggaaagctgtacacctgttcagacagttccaagcagacagaggcggaatgcaagggcaactacatcacgtacaaagacggggaggttgaccaccccatcatccaaccccgcagctgggagaacagcaagtttgactttgacaatgttctggcagccatgatggccctcttcaccgtctccaccttcgaagggtggccagagctgctgtaccgctccatcgactcccacacggaagacaagggccccatctacaactaccgtgtggagatctccatcttcttcatcatctacatcatcatcatcgccttcttcatgatgaacatcttcgtgggcttcgtcatcgtcacctttcaggagcagggggagcaggagtacaagaactgtgagctggacaagaaccagcgacagtgcgtggaatacgccctcaaggcccggcccctgcggaggtacatccccaagaaccagcaccagtacaaagtgtggtacgtggtcaactccacctacttcgagtacctgatgttcgtcctcatcctgctcaacaccatctgcctggccatgcagcactacggccagagctgcctgttcaaaatcgccatgaacatcctcaacatgctcttcactggcctcttcaccgtggagatgatcctgaagctcattgccttcaaacccaagcactatttctgtgatgcatggaatacatttgacgccttgattgttgtgggtagcattgttgatatagcaatcaccgaggtaaacccagctgaacatacccaatgctctccctctatgaacgcagaggaaaactcccgcatctccatcaccttcttccgcctgttccgggtcatgcgtctggtgaagctgctgagccgtggggagggcatccggacgctgctgtggaccttcatcaagtccttccaggccctgccctatgtggccctcctgatcgtgatgctgttcttcatctacgcggtgatcgggatgcaggtgtttgggaaaattgccctgaatgataccacagagatcaaccggaacaacaactttcagaccttcccccaggccgtgctgctcctcttcaggtgtgccaccggggaggcctggcaggacatcatgctggcctgcatgccaggcaagaagtgtgccccagagtccgagcccagcaacagcacggagggtgaaacaccctgtggtagcagctttgctgtcttctacttcatcagcttctacatgctctgtgccttcctgatcatcaacctctttgtagctgtcatcatggacaactttgactacctgacaagggactggtccatccttggtccccaccacctggatgagtttaaaagaatctgggcagagtatgaccctgaagccaagggtcgtatcaaacacctggatgtggtgaccctcctccggcggattcagccgccactaggttttgggaagctgtgccctcaccgcgtggcttgcaaacgcctggtctccatgaacatgcctctgaacagcgacgggacagtcatgttcaatgccaccctgtttgccctggtcaggacggccctgaggatcaaaacagaagagggacccagcccatcagaggcccaccaaggggctgaggatcctttccgccctgcagggaacctagaacaagccaatgaggagctgcgggcgatcatcaagaagatctggaagcggaccagcatgaagctgctggaccaggtggtgccccctgcaggtgatgatgaggtcaccgttggcaagttctacgccacgttcctgatccaggagtacttccggaagttcaagaagcgcaaagagcagggccttgtgggcaagccctcccagaggaacgcgctgtctctgcaggctggcttgcgcacactgcatgacatcgggcctgagatccgacgggccatctctggagatctcaccgctgaggaggagctggacaaggccatgaaggaggctgtgtccgctgcttctgaagatgacatcttcaggagggccggtggcctgttcggcaaccacgtcagctactaccaaagcgacggccggagcgccttcccccagaccttcaccactcagcgcccgctgcacatcaacaaggcgggcagcagccagggcgacactgagtcgccatcccacgagaagctggtggactccaccttcaccccgagcagctactcgtccaccggctccaacgccaacatcaacaacgccaacaacaccgccctgggtcgcctccctcgccccgccggctaccccagcacggtcagcactgtggagggccacgggccccccttgtcccctgccatccgggtgcaggaggtggcgtggaagctcagctccaacaggtgccactcccgggagagccaggcagccatggcgggtcaggaggagacgtctcaggatgagacctatgaagtgaagatgaaccatgacacggaggcctgcagtgagcccagcctgctctccacagagatgctctcctaccaggatgacgaaaatcggcaactgacgctcccagaggaggacaagagggacatccggcaatctccgaagaggggtttcctccgctctgcctcactaggtcgaagggcctccttccacctggaatgtctgaagcgacagaaggaccgagggggagacatctctcagaagacagtcctgcccttgcatctggttcatcatcaggcattggcagtggcaggcctgagccccctcctccagagaagccattcccctgcctcattccctaggccttttgccaccccaccagccacacctggcagccgaggctggcccccacagcccgtccccaccctgcggcttgagggggtcgagtccagtgagaaactcaacagcagcttcccatccatccactgcggctcctgggctgagaccacccccggtggcgggggcagcagcgccgcccggagagtccggcccgtctccctcatggtgcccagccaggctggggccccagggaggcagttccacggcagtgccagcagcctggtggaagcggtcttgatttcagaaggactggggcagtttgctcaagatcccaagttcatcgaggtcaccacccaggagctggccgacgcctgcgacatgaccatagaggagatggagagcgcggccgacaacatcctcagcgggggcgccccacagagccccaatggcgccctcttaccctttgtgaactgcagggacgcggggcaggaccgagccgggggcgaagaggacgcgggctgtgtgcgcgcgcggggtcgaccgagtgaggaggagctccaggacagcagggtctacgtcagcagcctgtagtgggcgctgccagatgcgggcttttttttatttgtttcaatgttcctaatgggttcgtttcagaagtgcctcactgttctcgtgacctggagtt

SEQ ID NO: 4180 - DNA, 6595 bp, Homo sapiens
  source 1..6595: mol_type = unassigned DNA
atggtcaatgagaatacgaggatgtacattccagaggaaaaccaccaaggttccaactatgggagcccacgccccgcccatgccaacatgaatgccaatgcggcagcggggctggcccctgagcacatccccaccccgggggctgccctgtcgtggcaggcggccatcgacgcagcccggcaggctaagctgatgggcagcgctggcaatgcgaccatctccacagtcagctccacgcagcggaagcggcagcaatatgggaaacccaagaagcagggcagcaccacggccacacgcccgccccgagccctgctctgcctgaccctgaagaaccccatccggagggcctgcatcagcattgtcgaatggaaaccatttgaaataattattttactgactatttttgccaattgtgtggccttagcgatctatattccctttccagaagatgattccaacgccaccaattccaacctggaacgagtggaatatctctttctcataatttttacggtggaagcgtttttaaaagtaatcgcctatggactcctctttcaccccaatgcctacctccgcaacggctggaacctactagattttataattgtggttgtggggctttttagtgcaattttagaacaagcaaccaaagcagatggggcaaacgctctcggagggaaaggggccggatttgatgtgaaggcgctgagggccttccgcgtgctgcgccccctgcggctggtgtccggagtcccaagtctccaggtggtcctgaattccatcatcaaggccatggtccccctgctgcacatcgccctgcttgtgctgtttgtcatcatcatctacgccatcatcggcttggagctcttcatggggaagatgcacaagacctgctacaaccaggagggcatagcagatgttccagcagaagatgacccttccccttgtgcgctggaaacgggccacgggcggcagtgccagaacggcacggtgtgcaagcccggctgggatggtcccaagcacggcatcaccaactttgacaactttgccttcgccatgctcacggtgttccagtgcatcaccatggagggctggacggacgtgctgtactgggtcaatgatgccgtaggaagggactggccctggatctattttgttacactaatcatcatagggtcattttttgtacttaacttggttctcggtgtgcttagcggagagttttccaaagagagggagaaggccaaggcccggggagatttccagaagctgcgggagaagcagcagctagaagaggatctcaaaggctacctggattggatcactcaggccgaagacatcgatcctgagaatgaggacgaaggcatggatgaggagaagccccgaaacatgagcatgcccaccagtgagaccgagtccgtcaacaccgaaaacgtggctggaggtgacatcgagggagaaaactgcggggccaggctggcccaccggatctccaagtcaaagttcagccgctactggcgccggtggaatcggttctgcagaaggaagtgccgcgccgcagtcaagtctaatgtcttctactggctggtgattttcctggtgttcctcaacacgctcaccattgcctctgagcactacaaccagcccaactggctcacagaagtccaagacacggcaaacaaggccctgctggccctgttcacggcagagatgctcctgaagatgtacagcctgggcctgcaggcctacttcgtgtccctcttcaaccgctttgactgcttcgtcgtgtgtggcggcatcctggagaccatcctggtggagaccaagatcatgtccccactgggcatctccgtgctcagatgcgtccggctgctgaggattttcaagatcacgaggtactggaactccttgagcaacctggtggcatccttgctgaactctgtgcgctccatcgcctccctgctccttctcctcttcctcttcatcatcatcttctccctcctggggatgcagctctttggaggaaagttcaactttgatgagatgcagacccggaggagcacattcgataacttcccccagtccctcctcactgtgtttcagatcctgaccggggaggactggaattcggtgatgtatgatgggatcatggcttatggcggcccctcttttccagggatgttagtctgtatttacttcatcatcctcttcatctgtggaaactatatcctactgaatgtgttcttggccattgctgtggacaacctggctgatgctgagagcctcacatctgcccaaaaggaggaggaagaggagaaggagagaaagaagctggccaggactgccagcccagagaagaaacaagagttggtggagaagccggcagtgggggaatccaaggaggagaagattgagctgaaatccatcacggctgacggagagtctccacccgccaccaagatcaacatggatgacctccagcccaatgaaaatgaggataagagcccctaccccaacccagaaactacaggagaagaggatgaggaggagccagagatgcctgtcggccctcgcccacgaccactctctgagcttcaccttaaggaaaaggcagtgcccatgccagaagccagcgcgtttttcatcttcagctctaacaacaggtttcgcctccagtgccaccgcattgtcaatgacacgatcttcaccaacctgatcctcttcttcattctgctcagcagcatttccctggctgctgaggacccggtccagcacacctccttcaggaaccatattctgttttattttgatattgtttttaccaccattttcaccattgaaattgctctgaagatgactgcttatggggctttcttgcacaagggttctttctgccggaactacttcaacatcctggacctgctggtggtcagcgtgtccctcatctcctttggcatccagtccagtgcaatcaatgtcgtgaagatcttgcgagtcctgcgagtactcaggcccctgagggccatcaacagggccaaggggctaaagcatgtggttcagtgtgtgtttgtcgccatccggaccatcgggaacatcgtgattgtcaccaccctgctgcagttcatgtttgcctgcatcggggtccagctcttcaagggaaagctgtacacctgttcagacagttccaagcagacagaggcggaatgcaagggcaactacatcacgtacaaagacggggaggttgaccaccccatcatccaaccccgcagctgggagaacagcaagtttgactttgacaatgttctggcagccatgatggccctcttcaccgtctccaccttcgaagggtggccagagctgctgtaccgctccatcgactcccacacggaagacaagggccccatctacaactaccgtgtggagatctccatcttcttcatcatctacatcatcatcatcgccttcttcatgatgaacatcttcgtgggcttcgtcatcgtcacctttcaggagcagggggagcaggagtacaagaactgtgagctggacaagaaccagcgacagtgcgtggaatacgccctcaaggcccggcccctgcggaggtacatccccaagaaccagcaccagtacaaagtgtggtacgtggtcaactccacctacttcgagtacctgatgttcgtcctcatcctgctcaacaccatctgcctggccatgcagcactacggccagagctgcctgttcaaaatcgccatgaacatcctcaacatgctcttcactggcctcttcaccgtggagatgatcctgaagctcattgccttcaaacccaagggttactttagtgatccctggaatgtttttgacttcctcatcgtaattggcagcataattgacgtcattctcagtgagactaatcactatttctgtgatgcatggaatacatttgacgccttgattgttgtgggtagcattgttgatatagcaatcaccgaggtaaacccagctgaacatacccaatgctctccctctatgaacgcagaggaaaactcccgcatctccatcaccttcttccgcctgttccgggtcatgcgtctggtgaagctgctgagccgtggggagggcatccggacgctgctgtggaccttcatcaagtccttccaggccctgccctatgtggccctcctgatcgtgatgctgttcttcatctacgcggtgatcgggatgcaggtgtttgggaaaattgccctgaatgataccacagagatcaaccggaacaacaactttcagaccttcccccaggccgtgctgctcctcttcaggtgtgccaccggggaggcctggcaggacatcatgctggcctgcatgccaggcaagaagtgtgccccagagtccgagcccagcaacagcacggagggtgaaacaccctgtggtagcagctttgctgtcttctacttcatcagcttctacatgctctgtgccttcctgatcatcaacctctttgtagctgtcatcatggacaactttgactacctgacaagggactggtccatccttggtccccaccacctggatgagtttaaaagaatctgggcagagtatgaccctgaagccaagggtcgtatcaaacacctggatgtggtgaccctcctccggcggattcagccgccactaggttttgggaagctgtgccctcaccgcgtggcttgcaaacgcctggtctccatgaacatgcctctgaacagcgacgggacagtcatgttcaatgccaccctgtttgccctggtcaggacggccctgaggatcaaaacagaagggaacctagaacaagccaatgaggagctgcgggcgatcatcaagaagatctggaagcggaccagcatgaagctgctggaccaggtggtgccccctgcaggtgatgatgaggtcaccgttggcaagttctacgccacgttcctgatccaggagtacttccggaagttcaagaagcgcaaagagcagggccttgtgggcaagccctcccagaggaacgcgctgtctctgcaggctggcttgcgcacactgcatgacatcgggcctgagatccgacgggccatctctggagatctcaccgctgaggaggagctggacaaggccatgaaggaggctgtgtccgctgcttctgaagatgacatcttcaggagggccggtggcctgttcggcaaccacgtcagctactaccaaagcgacggccggagcgccttcccccagaccttcaccactcagcgcccgctgcacatcaacaaggcgggcagcagccagggcgacactgagtcgccatcccacgagaagctggtggactccaccttcaccccgagcagctactcgtccaccggctccaacgccaacatcaacaacgccaacaacaccgccctgggtcgcctccctcgccccgccggctaccccagcacggtcagcactgtggagggccacgggccccccttgtcccctgccatccgggtgcaggaggtggcgtggaagctcagctccaacaggtgccactcccgggagagccaggcagccatggcgggtcaggaggagacgtctcaggatgagacctatgaagtgaagatgaaccatgacacggaggcctgcagtgagcccagcctgctctccacagagatgctctcctaccaggatgacgaaaatcggcaactgacgctcccagaggaggacaagagggacatccggcaatctccgaagaggggtttcctccgctctgcctcactaggtcgaagggcctccttccacctggaatgtctgaagcgacagaaggaccgagggggagacatctctcagaagacagtcctgcccttgcatctggttcatcatcaggcattggcagtggcaggcctgagccccctcctccagagaagccattcccctgcctcattccctaggccttttgccaccccaccagccacacctggcagccgaggctggcccccacagcccgtccccaccctgcggcttgagggggtcgagtccagtgagaaactcaacagcagcttcccatccatccactgcggctcctgggctgagaccacccccggtggcgggggcagcagcgccgcccggagagtccggcccgtctccctcatggtgcccagccaggctggggccccagggaggcagttccacggcagtgccagcagcctggtggaagcggtcttgatttcagaaggactggggcagtttgctcaagatcccaagttcatcgaggtcaccacccaggagctggccgacgcctgcgacatgaccatagaggagatggagagcgcggccgacaacatcctcagcgggggcgccccacagagccccaatggcgccctcttaccctttgtgaactgcagggacgcggggcaggaccgagccgggggcgaagaggacgcgggctgtgtgcgcgcgcggggtcgaccgagtgaggaggagctccaggacagcagggtctacgtcagcagcctgtagtgggcgctgccagatgcgggcttttttttatttgtttcaatgttcctaatgggttcgtttcagaagtgcctcactgttctcgtgacctggagtt

SEQ ID NO: 4181 - DNA, 6511 bp, Homo sapiens
  source 1..6511: mol_type = unassigned DNA
atggtcaatgagaatacgaggatgtacattccagaggaaaaccaccaaggttccaactatgggagcccacgccccgcccatgccaacatgaatgccaatgcggcagcggggctggcccctgagcacatccccaccccgggggctgccctgtcgtggcaggcggccatcgacgcagcccggcaggctaagctgatgggcagcgctggcaatgcgaccatctccacagtcagctccacgcagcggaagcggcagcaatatgggaaacccaagaagcagggcagcaccacggccacacgcccgccccgagccctgctctgcctgaccctgaagaaccccatccggagggcctgcatcagcattgtcgaatggaaaccatttgaaataattattttactgactatttttgccaattgtgtggccttagcgatctatattccctttccagaagatgattccaacgccaccaattccaacctggaacgagtggaatatctctttctcataatttttacggtggaagcgtttttaaaagtaatcgcctatggactcctctttcaccccaatgcctacctccgcaacggctggaacctactagattttataattgtggttgtggggctttttagtgcaattttagaacaagcaaccaaagcagatggggcaaacgctctcggagggaaaggggccggatttgatgtgaaggcgctgagggccttccgcgtgctgcgccccctgcggctggtgtccggagtcccaagtctccaggtggtcctgaattccatcatcaaggccatggtccccctgctgcacatcgccctgcttgtgctgtttgtcatcatcatctacgccatcatcggcttggagctcttcatggggaagatgcacaagacctgctacaaccaggagggcatagcagatgttccagcagaagatgacccttccccttgtgcgctggaaacgggccacgggcggcagtgccagaacggcacggtgtgcaagcccggctgggatggtcccaagcacggcatcaccaactttgacaactttgccttcgccatgctcacggtgttccagtgcatcaccatggagggctggacggacgtgctgtactggatgcaggacgctatgggctatgagttaccctgggtgtattttgtcagtctggtcatctttggatcctttttcgttctaaatctggttctcggtgtgttgagcggagagttttccaaagagagggagaaggccaaggcccggggagatttccagaagctgcgggagaagcagcagctagaagaggatctcaaaggctacctggattggatcactcaggccgaagacatcgatcctgagaatgaggacgaaggcatggatgaggagaagccccgaaacatgagcatgcccaccagtgagaccgagtccgtcaacaccgaaaacgtggctggaggtgacatcgagggagaaaactgcggggccaggctggcccaccggatctccaagtcaaagttcagccgctactggcgccggtggaatcggttctgcagaaggaagtgccgcgccgcagtcaagtctaatgtcttctactggctggtgattttcctggtgttcctcaacacgctcaccattgcctctgagcactacaaccagcccaactggctcacagaagtccaagacacggcaaacaaggccctgctggccctgttcacggcagagatgctcctgaagatgtacagcctgggcctgcaggcctacttcgtgtccctcttcaaccgctttgactgcttcgtcgtgtgtggcggcatcctggagaccatcctggtggagaccaagatcatgtccccactgggcatctccgtgctcagatgcgtccggctgctgaggattttcaagatcacgaggtactggaactccttgagcaacctggtggcatccttgctgaactctgtgcgctccatcgcctccctgctccttctcctcttcctcttcatcatcatcttctccctcctggggatgcagctctttggaggaaagttcaactttgatgagatgcagacccggaggagcacattcgataacttcccccagtccctcctcactgtgtttcagatcctgaccggggaggactggaattcggtgatgtatgatgggatcatggcttatggcggcccctcttttccagggatgttagtctgtatttacttcatcatcctcttcatctgtggaaactatatcctactgaatgtgttcttggccattgctgtggacaacctggctgatgctgagagcctcacatctgcccaaaaggaggaggaagaggagaaggagagaaagaagctggccaggactgccagcccagagaagaaacaagagttggtggagaagccggcagtgggggaatccaaggaggagaagattgagctgaaatccatcacggctgacggagagtctccacccgccaccaagatcaacatggatgacctccagcccaatgaaaatgaggataagagcccctaccccaacccagaaactacaggagaagaggatgaggaggagccagagatgcctgtcggccctcgcccacgaccactctctgagcttcaccttaaggaaaaggcagtgcccatgccagaagccagcgcgtttttcatcttcagctctaacaacaggtttcgcctccagtgccaccgcattgtcaatgacacgatcttcaccaacctgatcctcttcttcattctgctcagcagcatttccctggctgctgaggacccggtccagcacacctccttcaggaaccatatcctaggcaatgcagactatgtcttcactagtatctttacattagaaattatccttaagatgactgcttatggggctttcttgcacaagggttctttctgccggaactacttcaacatcctggacctgctggtggtcagcgtgtccctcatctcctttggcatccagtccagtgcaatcaatgtcgtgaagatcttgcgagtcctgcgagtactcaggcccctgagggccatcaacagggccaaggggctaaagcatgtggttcagtgtgtgtttgtcgccatccggaccatcgggaacatcgtgattgtcaccaccctgctgcagttcatgtttgcctgcatcggggtccagctcttcaagggaaagctgtacacctgttcagacagttccaagcagacagaggcggaatgcaagggcaactacatcacgtacaaagacggggaggttgaccaccccatcatccaaccccgcagctgggagaacagcaagtttgactttgacaatgttctggcagccatgatggccctcttcaccgtctccaccttcgaagggtggccagagctgctgtaccgctccatcgactcccacacggaagacaagggccccatctacaactaccgtgtggagatctccatcttcttcatcatctacatcatcatcatcgccttcttcatgatgaacatcttcgtgggcttcgtcatcgtcacctttcaggagcagggggagcaggagtacaagaactgtgagctggacaagaaccagcgacagtgcgtggaatacgccctcaaggcccggcccctgcggaggtacatccccaagaaccagcaccagtacaaagtgtggtacgtggtcaactccacctacttcgagtacctgatgttcgtcctcatcctgctcaacaccatctgcctggccatgcagcactacggccagagctgcctgttcaaaatcgccatgaacatcctcaacatgctcttcactggcctcttcaccgtggagatgatcctgaagctcattgccttcaaacccaagcactatttctgtgatgcatggaatacatttgacgccttgattgttgtgggtagcattgttgatatagcaatcaccgaggtaaacccagctgaacatacccaatgctctccctctatgaacgcagaggaaaactcccgcatctccatcaccttcttccgcctgttccgggtcatgcgtctggtgaagctgctgagccgtggggagggcatccggacgctgctgtggaccttcatcaagtccttccaggccctgccctatgtggccctcctgatcgtgatgctgttcttcatctacgcggtgatcgggatgcaggtgtttgggaaaattgccctgaatgataccacagagatcaaccggaacaacaactttcagaccttcccccaggccgtgctgctcctcttcaggtgtgccaccggggaggcctggcaggacatcatgctggcctgcatgccaggcaagaagtgtgccccagagtccgagcccagcaacagcacggagggtgaaacaccctgtggtagcagctttgctgtcttctacttcatcagcttctacatgctctgtgccttcctgatcatcaacctctttgtagctgtcatcatggacaactttgactacctgacaagggactggtccatccttggtccccaccacctggatgagtttaaaagaatctgggcagagtatgaccctgaagccaagggtcgtatcaaacacctggatgtggtgaccctcctccggcggattcagccgccactaggttttgggaagctgtgccctcaccgcgtggcttgcaaacgcctggtctccatgaacatgcctctgaacagcgacgggacagtcatgttcaatgccaccctgtttgccctggtcaggacggccctgaggatcaaaacagaagggaacctagaacaagccaatgaggagctgcgggcgatcatcaagaagatctggaagcggaccagcatgaagctgctggaccaggtggtgccccctgcaggtgatgatgaggtcaccgttggcaagttctacgccacgttcctgatccaggagtacttccggaagttcaagaagcgcaaagagcagggccttgtgggcaagccctcccagaggaacgcgctgtctctgcaggctggcttgcgcacactgcatgacatcgggcctgagatccgacgggccatctctggagatctcaccgctgaggaggagctggacaaggccatgaaggaggctgtgtccgctgcttctgaagatgacatcttcaggagggccggtggcctgttcggcaaccacgtcagctactaccaaagcgacggccggagcgccttcccccagaccttcaccactcagcgcccgctgcacatcaacaaggcgggcagcagccagggcgacactgagtcgccatcccacgagaagctggtggactccaccttcaccccgagcagctactcgtccaccggctccaacgccaacatcaacaacgccaacaacaccgccctgggtcgcctccctcgccccgccggctaccccagcacggtcagcactgtggagggccacgggccccccttgtcccctgccatccgggtgcaggaggtggcgtggaagctcagctccaacaggtgccactcccgggagagccaggcagccatggcgggtcaggaggagacgtctcaggatgagacctatgaagtgaagatgaaccatgacacggaggcctgcagtgagcccagcctgctctccacagagatgctctcctaccaggatgacgaaaatcggcaactgacgctcccagaggaggacaagagggacatccggcaatctccgaagaggggtttcctccgctctgcctcactaggtcgaagggcctccttccacctggaatgtctgaagcgacagaaggaccgagggggagacatctctcagaagacagtcctgcccttgcatctggttcatcatcaggcattggcagtggcaggcctgagccccctcctccagagaagccattcccctgcctcattccctaggccttttgccaccccaccagccacacctggcagccgaggctggcccccacagcccgtccccaccctgcggcttgagggggtcgagtccagtgagaaactcaacagcagcttcccatccatccactgcggctcctgggctgagaccacccccggtggcgggggcagcagcgccgcccggagagtccggcccgtctccctcatggtgcccagccaggctggggccccagggaggcagttccacggcagtgccagcagcctggtggaagcggtcttgatttcagaaggactggggcagtttgctcaagatcccaagttcatcgaggtcaccacccaggagctggccgacgcctgcgacatgaccatagaggagatggagagcgcggccgacaacatcctcagcgggggcgccccacagagccccaatggcgccctcttaccctttgtgaactgcagggacgcggggcaggaccgagccgggggcgaagaggacgcgggctgtgtgcgcgcgcggggtcgaccgagtgaggaggagctccaggacagcagggtctacgtcagcagcctgtagtgggcgctgccagatgcgggcttttttttatttgtttcaatgttcctaatgggttcgtttcagaagtgcctcactgttctcgtgacctggagtt

SEQ ID NO: 4182 - DNA, 6511 bp, Homo sapiens
  source 1..6511: mol_type = unassigned DNA
atggtcaatgagaatacgaggatgtacattccagaggaaaaccaccaaggttccaactatgggagcccacgccccgcccatgccaacatgaatgccaatgcggcagcggggctggcccctgagcacatccccaccccgggggctgccctgtcgtggcaggcggccatcgacgcagcccggcaggctaagctgatgggcagcgctggcaatgcgaccatctccacagtcagctccacgcagcggaagcggcagcaatatgggaaacccaagaagcagggcagcaccacggccacacgcccgccccgagccctgctctgcctgaccctgaagaaccccatccggagggcctgcatcagcattgtcgaatggaaaccatttgaaataattattttactgactatttttgccaattgtgtggccttagcgatctatattccctttccagaagatgattccaacgccaccaattccaacctggaacgagtggaatatctctttctcataatttttacggtggaagcgtttttaaaagtaatcgcctatggactcctctttcaccccaatgcctacctccgcaacggctggaacctactagattttataattgtggttgtggggctttttagtgcaattttagaacaagcaaccaaagcagatggggcaaacgctctcggagggaaaggggccggatttgatgtgaaggcgctgagggccttccgcgtgctgcgccccctgcggctggtgtccggagtcccaagtctccaggtggtcctgaattccatcatcaaggccatggtccccctgctgcacatcgccctgcttgtgctgtttgtcatcatcatctacgccatcatcggcttggagctcttcatggggaagatgcacaagacctgctacaaccaggagggcatagcagatgttccagcagaagatgacccttccccttgtgcgctggaaacgggccacgggcggcagtgccagaacggcacggtgtgcaagcccggctgggatggtcccaagcacggcatcaccaactttgacaactttgccttcgccatgctcacggtgttccagtgcatcaccatggagggctggacggacgtgctgtactgggtcaatgatgccgtaggaagggactggccctggatctattttgttacactaatcatcatagggtcattttttgtacttaacttggttctcggtgtgcttagcggagagttttccaaagagagggagaaggccaaggcccggggagatttccagaagctgcgggagaagcagcagctagaagaggatctcaaaggctacctggattggatcactcaggccgaagacatcgatcctgagaatgaggacgaaggcatggatgaggagaagccccgaaacatgagcatgcccaccagtgagaccgagtccgtcaacaccgaaaacgtggctggaggtgacatcgagggagaaaactgcggggccaggctggcccaccggatctccaagtcaaagttcagccgctactggcgccggtggaatcggttctgcagaaggaagtgccgcgccgcagtcaagtctaatgtcttctactggctggtgattttcctggtgttcctcaacacgctcaccattgcctctgagcactacaaccagcccaactggctcacagaagtccaagacacggcaaacaaggccctgctggccctgttcacggcagagatgctcctgaagatgtacagcctgggcctgcaggcctacttcgtgtccctcttcaaccgctttgactgcttcgtcgtgtgtggcggcatcctggagaccatcctggtggagaccaagatcatgtccccactgggcatctccgtgctcagatgcgtccggctgctgaggattttcaagatcacgaggtactggaactccttgagcaacctggtggcatccttgctgaactctgtgcgctccatcgcctccctgctccttctcctcttcctcttcatcatcatcttctccctcctggggatgcagctctttggaggaaagttcaactttgatgagatgcagacccggaggagcacattcgataacttcccccagtccctcctcactgtgtttcagatcctgaccggggaggactggaattcggtgatgtatgatgggatcatggcttatggcggcccctcttttccagggatgttagtctgtatttacttcatcatcctcttcatctgtggaaactatatcctactgaatgtgttcttggccattgctgtggacaacctggctgatgctgagagcctcacatctgcccaaaaggaggaggaagaggagaaggagagaaagaagctggccaggactgccagcccagagaagaaacaagagttggtggagaagccggcagtgggggaatccaaggaggagaagattgagctgaaatccatcacggctgacggagagtctccacccgccaccaagatcaacatggatgacctccagcccaatgaaaatgaggataagagcccctaccccaacccagaaactacaggagaagaggatgaggaggagccagagatgcctgtcggccctcgcccacgaccactctctgagcttcaccttaaggaaaaggcagtgcccatgccagaagccagcgcgtttttcatcttcagctctaacaacaggtttcgcctccagtgccaccgcattgtcaatgacacgatcttcaccaacctgatcctcttcttcattctgctcagcagcatttccctggctgctgaggacccggtccagcacacctccttcaggaaccatatcctaggcaatgcagactatgtcttcactagtatctttacattagaaattatccttaagatgactgcttatggggctttcttgcacaagggttctttctgccggaactacttcaacatcctggacctgctggtggtcagcgtgtccctcatctcctttggcatccagtccagtgcaatcaatgtcgtgaagatcttgcgagtcctgcgagtactcaggcccctgagggccatcaacagggccaaggggctaaagcatgtggttcagtgtgtgtttgtcgccatccggaccatcgggaacatcgtgattgtcaccaccctgctgcagttcatgtttgcctgcatcggggtccagctcttcaagggaaagctgtacacctgttcagacagttccaagcagacagaggcggaatgcaagggcaactacatcacgtacaaagacggggaggttgaccaccccatcatccaaccccgcagctgggagaacagcaagtttgactttgacaatgttctggcagccatgatggccctcttcaccgtctccaccttcgaagggtggccagagctgctgtaccgctccatcgactcccacacggaagacaagggccccatctacaactaccgtgtggagatctccatcttcttcatcatctacatcatcatcatcgccttcttcatgatgaacatcttcgtgggcttcgtcatcgtcacctttcaggagcagggggagcaggagtacaagaactgtgagctggacaagaaccagcgacagtgcgtggaatacgccctcaaggcccggcccctgcggaggtacatccccaagaaccagcaccagtacaaagtgtggtacgtggtcaactccacctacttcgagtacctgatgttcgtcctcatcctgctcaacaccatctgcctggccatgcagcactacggccagagctgcctgttcaaaatcgccatgaacatcctcaacatgctcttcactggcctcttcaccgtggagatgatcctgaagctcattgccttcaaacccaagggttactttagtgatccctggaatgtttttgacttcctcatcgtaattggcagcataattgacgtcattctcagtgagactaatccagctgaacatacccaatgctctccctctatgaacgcagaggaaaactcccgcatctccatcaccttcttccgcctgttccgggtcatgcgtctggtgaagctgctgagccgtggggagggcatccggacgctgctgtggaccttcatcaagtccttccaggccctgccctatgtggccctcctgatcgtgatgctgttcttcatctacgcggtgatcgggatgcaggtgtttgggaaaattgccctgaatgataccacagagatcaaccggaacaacaactttcagaccttcccccaggccgtgctgctcctcttcaggtgtgccaccggggaggcctggcaggacatcatgctggcctgcatgccaggcaagaagtgtgccccagagtccgagcccagcaacagcacggagggtgaaacaccctgtggtagcagctttgctgtcttctacttcatcagcttctacatgctctgtgccttcctgatcatcaacctctttgtagctgtcatcatggacaactttgactacctgacaagggactggtccatccttggtccccaccacctggatgagtttaaaagaatctgggcagagtatgaccctgaagccaagggtcgtatcaaacacctggatgtggtgaccctcctccggcggattcagccgccactaggttttgggaagctgtgccctcaccgcgtggcttgcaaacgcctggtctccatgaacatgcctctgaacagcgacgggacagtcatgttcaatgccaccctgtttgccctggtcaggacggccctgaggatcaaaacagaagggaacctagaacaagccaatgaggagctgcgggcgatcatcaagaagatctggaagcggaccagcatgaagctgctggaccaggtggtgccccctgcaggtgatgatgaggtcaccgttggcaagttctacgccacgttcctgatccaggagtacttccggaagttcaagaagcgcaaagagcagggccttgtgggcaagccctcccagaggaacgcgctgtctctgcaggctggcttgcgcacactgcatgacatcgggcctgagatccgacgggccatctctggagatctcaccgctgaggaggagctggacaaggccatgaaggaggctgtgtccgctgcttctgaagatgacatcttcaggagggccggtggcctgttcggcaaccacgtcagctactaccaaagcgacggccggagcgccttcccccagaccttcaccactcagcgcccgctgcacatcaacaaggcgggcagcagccagggcgacactgagtcgccatcccacgagaagctggtggactccaccttcaccccgagcagctactcgtccaccggctccaacgccaacatcaacaacgccaacaacaccgccctgggtcgcctccctcgccccgccggctaccccagcacggtcagcactgtggagggccacgggccccccttgtcccctgccatccgggtgcaggaggtggcgtggaagctcagctccaacaggtgccactcccgggagagccaggcagccatggcgggtcaggaggagacgtctcaggatgagacctatgaagtgaagatgaaccatgacacggaggcctgcagtgagcccagcctgctctccacagagatgctctcctaccaggatgacgaaaatcggcaactgacgctcccagaggaggacaagagggacatccggcaatctccgaagaggggtttcctccgctctgcctcactaggtcgaagggcctccttccacctggaatgtctgaagcgacagaaggaccgagggggagacatctctcagaagacagtcctgcccttgcatctggttcatcatcaggcattggcagtggcaggcctgagccccctcctccagagaagccattcccctgcctcattccctaggccttttgccaccccaccagccacacctggcagccgaggctggcccccacagcccgtccccaccctgcggcttgagggggtcgagtccagtgagaaactcaacagcagcttcccatccatccactgcggctcctgggctgagaccacccccggtggcgggggcagcagcgccgcccggagagtccggcccgtctccctcatggtgcccagccaggctggggccccagggaggcagttccacggcagtgccagcagcctggtggaagcggtcttgatttcagaaggactggggcagtttgctcaagatcccaagttcatcgaggtcaccacccaggagctggccgacgcctgcgacatgaccatagaggagatggagagcgcggccgacaacatcctcagcgggggcgccccacagagccccaatggcgccctcttaccctttgtgaactgcagggacgcggggcaggaccgagccgggggcgaagaggacgcgggctgtgtgcgcgcgcggggtcgaccgagtgaggaggagctccaggacagcagggtctacgtcagcagcctgtagtgggcgctgccagatgcgggcttttttttatttgtttcaatgttcctaatgggttcgtttcagaagtgcctcactgttctcgtgacctggagtt

SEQ ID NO: 4183 - DNA, 6529 bp, Homo sapiens
  source 1..6529: mol_type = unassigned DNA
atggtcaatgagaatacgaggatgtacattccagaggaaaaccaccaaggttccaactatgggagcccacgccccgcccatgccaacatgaatgccaatgcggcagcggggctggcccctgagcacatccccaccccgggggctgccctgtcgtggcaggcggccatcgacgcagcccggcaggctaagctgatgggcagcgctggcaatgcgaccatctccacagtcagctccacgcagcggaagcggcagcaatatgggaaacccaagaagcagggcagcaccacggccacacgcccgccccgagccctgctctgcctgaccctgaagaaccccatccggagggcctgcatcagcattgtcgaatggaaaccatttgaaataattattttactgactatttttgccaattgtgtggccttagcgatctatattccctttccagaagatgattccaacgccaccaattccaacctggaacgagtggaatatctctttctcataatttttacggtggaagcgtttttaaaagtaatcgcctatggactcctctttcaccccaatgcctacctccgcaacggctggaacctactagattttataattgtggttgtggggctttttagtgcaattttagaacaagcaaccaaagcagatggggcaaacgctctcggagggaaaggggccggatttgatgtgaaggcgctgagggccttccgcgtgctgcgccccctgcggctggtgtccggagtcccaagtctccaggtggtcctgaattccatcatcaaggccatggtccccctgctgcacatcgccctgcttgtgctgtttgtcatcatcatctacgccatcatcggcttggagctcttcatggggaagatgcacaagacctgctacaaccaggagggcatagcagatgttccagcagaagatgacccttccccttgtgcgctggaaacgggccacgggcggcagtgccagaacggcacggtgtgcaagcccggctgggatggtcccaagcacggcatcaccaactttgacaactttgccttcgccatgctcacggtgttccagtgcatcaccatggagggctggacggacgtgctgtactgggtcaatgatgccgtaggaagggactggccctggatctattttgttacactaatcatcatagggtcattttttgtacttaacttggttctcggtgtgcttagcggagagttttccaaagagagggagaaggccaaggcccggggagatttccagaagctgcgggagaagcagcagctagaagaggatctcaaaggctacctggattggatcactcaggccgaagacatcgatcctgagaatgaggacgaaggcatggatgaggagaagccccgaaacatgagcatgcccaccagtgagaccgagtccgtcaacaccgaaaacgtggctggaggtgacatcgagggagaaaactgcggggccaggctggcccaccggatctccaagtcaaagttcagccgctactggcgccggtggaatcggttctgcagaaggaagtgccgcgccgcagtcaagtctaatgtcttctactggctggtgattttcctggtgttcctcaacacgctcaccattgcctctgagcactacaaccagcccaactggctcacagaagtccaagacacggcaaacaaggccctgctggccctgttcacggcagagatgctcctgaagatgtacagcctgggcctgcaggcctacttcgtgtccctcttcaaccgctttgactgcttcgtcgtgtgtggcggcatcctggagaccatcctggtggagaccaagatcatgtccccactgggcatctccgtgctcagatgcgtccggctgctgaggattttcaagatcacgaggtactggaactccttgagcaacctggtggcatccttgctgaactctgtgcgctccatcgcctccctgctccttctcctcttcctcttcatcatcatcttctccctcctggggatgcagctctttggaggaaagttcaactttgatgagatgcagacccggaggagcacattcgataacttcccccagtccctcctcactgtgtttcagatcctgaccggggaggactggaattcggtgatgtatgatgggatcatggcttatggcggcccctcttttccagggatgttagtctgtatttacttcatcatcctcttcatctgtggaaactatatcctactgaatgtgttcttggccattgctgtggacaacctggctgatgctgagagcctcacatctgcccaaaaggaggaggaagaggagaaggagagaaagaagctggccaggactgccagcccagagaagaaacaagagttggtggagaagccggcagtgggggaatccaaggaggagaagattgagctgaaatccatcacggctgacggagagtctccacccgccaccaagatcaacatggatgacctccagcccaatgaaaatgaggataagagcccctaccccaacccagaaactacaggagaagaggatgaggaggagccagagatgcctgtcggccctcgcccacgaccactctctgagcttcaccttaaggaaaaggcagtgcccatgccagaagccagcgcgtttttcatcttcagctctaacaacaggtttcgcctccagtgccaccgcattgtcaatgacacgatcttcaccaacctgatcctcttcttcattctgctcagcagcatttccctggctgctgaggacccggtccagcacacctccttcaggaaccatattctgttttattttgatattgtttttaccaccattttcaccattgaaattgctctgaagatgactgcttatggggctttcttgcacaagggttctttctgccggaactacttcaacatcctggacctgctggtggtcagcgtgtccctcatctcctttggcatccagtccagtgcaatcaatgtcgtgaagatcttgcgagtcctgcgagtactcaggcccctgagggccatcaacagggccaaggggctaaagcatgtggttcagtgtgtgtttgtcgccatccggaccatcgggaacatcgtgattgtcaccaccctgctgcagttcatgtttgcctgcatcggggtccagctcttcaagggaaagctgtacacctgttcagacagttccaagcagacagaggcggaatgcaagggcaactacatcacgtacaaagacggggaggttgaccaccccatcatccaaccccgcagctgggagaacagcaagtttgactttgacaatgttctggcagccatgatggccctcttcaccgtctccaccttcgaagggtggccagagctgctgtaccgctccatcgactcccacacggaagacaagggccccatctacaactaccgtgtggagatctccatcttcttcatcatctacatcatcatcatcgccttcttcatgatgaacatcttcgtgggcttcgtcatcgtcacctttcaggagcagggggagcaggagtacaagaactgtgagctggacaagaaccagcgacagtgcgtggaatacgccctcaaggcccggcccctgcggaggtacatccccaagaaccagcaccagtacaaagtgtggtacgtggtcaactccacctacttcgagtacctgatgttcgtcctcatcctgctcaacaccatctgcctggccatgcagcactacggccagagctgcctgttcaaaatcgccatgaacatcctcaacatgctcttcactggcctcttcaccgtggagatgatcctgaagctcattgccttcaaacccaagcactatttctgtgatgcatggaatacatttgacgccttgattgttgtgggtagcattgttgatatagcaatcaccgagaacgcagaggaaaactcccgcatctccatcaccttcttccgcctgttccgggtcatgcgtctggtgaagctgctgagccgtggggagggcatccggacgctgctgtggaccttcatcaagtccttccaggccctgccctatgtggccctcctgatcgtgatgctgttcttcatctacgcggtgatcgggatgcaggtgtttgggaaaattgccctgaatgataccacagagatcaaccggaacaacaactttcagaccttcccccaggccgtgctgctcctcttcaggtgtgccaccggggaggcctggcaggacatcatgctggcctgcatgccaggcaagaagtgtgccccagagtccgagcccagcaacagcacggagggtgaaacaccctgtggtagcagctttgctgtcttctacttcatcagcttctacatgctctgtgccttcctgatcatcaacctctttgtagctgtcatcatggacaactttgactacctgacaagggactggtccatccttggtccccaccacctggatgagtttaaaagaatctgggcagagtatgaccctgaagccaagggtcgtatcaaacacctggatgtggtgaccctcctccggcggattcagccgccactaggttttgggaagctgtgccctcaccgcgtggcttgcaaacgcctggtctccatgaacatgcctctgaacagcgacgggacagtcatgttcaatgccaccctgtttgccctggtcaggacggccctgaggatcaaaacagaagagggacccagcccatcagaggcccaccaaggggctgaggatcctttccgccctgcagggaacctagaacaagccaatgaggagctgcgggcgatcatcaagaagatctggaagcggaccagcatgaagctgctggaccaggtggtgccccctgcaggtgatgatgaggtcaccgttggcaagttctacgccacgttcctgatccaggagtacttccggaagttcaagaagcgcaaagagcagggccttgtgggcaagccctcccagaggaacgcgctgtctctgcaggctggcttgcgcacactgcatgacatcgggcctgagatccgacgggccatctctggagatctcaccgctgaggaggagctggacaaggccatgaaggaggctgtgtccgctgcttctgaagatgacatcttcaggagggccggtggcctgttcggcaaccacgtcagctactaccaaagcgacggccggagcgccttcccccagaccttcaccactcagcgcccgctgcacatcaacaaggcgggcagcagccagggcgacactgagtcgccatcccacgagaagctggtggactccaccttcaccccgagcagctactcgtccaccggctccaacgccaacatcaacaacgccaacaacaccgccctgggtcgcctccctcgccccgccggctaccccagcacggtcagcactgtggagggccacgggccccccttgtcccctgccatccgggtgcaggaggtggcgtggaagctcagctccaacaggtgccactcccgggagagccaggcagccatggcgggtcaggaggagacgtctcaggatgagacctatgaagtgaagatgaaccatgacacggaggcctgcagtgagcccagcctgctctccacagagatgctctcctaccaggatgacgaaaatcggcaactgacgctcccagaggaggacaagagggacatccggcaatctccgaagaggggtttcctccgctctgcctcactaggtcgaagggcctccttccacctggaatgtctgaagcgacagaaggaccgagggggagacatctctcagaagacagtcctgcccttgcatctggttcatcatcaggcattggcagtggcaggcctgagccccctcctccagagaagccattcccctgcctcattccctaggccttttgccaccccaccagccacacctggcagccgaggctggcccccacagcccgtccccaccctgcggcttgagggggtcgagtccagtgagaaactcaacagcagcttcccatccatccactgcggctcctgggctgagaccacccccggtggcgggggcagcagcgccgcccggagagtccggcccgtctccctcatggtgcccagccaggctggggccccagggaggcagttccacggcagtgccagcagcctggtggaagcggtcttgatttcagaaggactggggcagtttgctcaagatcccaagttcatcgaggtcaccacccaggagctggccgacgcctgcgacatgaccatagaggagatggagagcgcggccgacaacatcctcagcgggggcgccccacagagccccaatggcgccctcttaccctttgtgaactgcagggacgcggggcaggaccgagccgggggcgaagaggacgcgggctgtgtgcgcgcgcggggtcgaccgagtgaggaggagctccaggacagcagggtctacgtcagcagcctgtagtgggcgctgccagatgcgggcttttttttatttgtttcaatgttcctaatgggttcgtttcagaagtgcctcactgttctcgtgacctggagtt

SEQ ID NO: 4184 - DNA, 8425 bp, Homo sapiens
  source 1..8425: mol_type = unassigned DNA
ggaaggggcccggatgtactgaggatgcgttacagtttcactcgaggaggcagtagtggaaaggagcagtttttggggtttgatgccataatgggaatcaggtaatcgtcggcggggaagaagaaacgctgcagaccacggcttcctcgaatcttgcgcgaaagccgccggcctcggaggagggattaatccagacccgccggggggtgttttcacatttcttcctcttcgtggctgctcctcctattaaaaccatttttggtccatggtcaatgagaatacgaggatgtacattccagaggaaaaccaccaaggttccaactatgggagcccacgccccgcccatgccaacatgaatgccaatgcggcagcggggctggcccctgagcacatccccaccccgggggctgccctgtcgtggcaggcggccatcgacgcagcccggcaggctaagctgatgggcagcgctggcaatgcgaccatctccacagtcagctccacgcagcggaagcggcagcaatatgggaaacccaagaagcagggcagcaccacggccacacgcccgccccgagccctgctctgcctgaccctgaagaaccccatccggagggcctgcatcagcattgtcgaatggaaaccatttgaaataattattttactgactatttttgccaattgtgtggccttagcgatctatattccctttccagaagatgattccaacgccaccaattccaacctggaacgagtggaatatctctttctcataatttttacggtggaagcgtttttaaaagtaatcgcctatggactcctctttcaccccaatgcctacctccgcaacggctggaacctactagattttataattgtggttgtggggctttttagtgcaattttagaacaagcaaccaaagcagatggggcaaacgctctcggagggaaaggggccggatttgatgtgaaggcgctgagggccttccgcgtgctgcgccccctgcggctggtgtccggagtcccaagtctccaggtggtcctgaattccatcatcaaggccatggtccccctgctgcacatcgccctgcttgtgctgtttgtcatcatcatctacgccatcatcggcttggagctcttcatggggaagatgcacaagacctgctacaaccaggagggcatagcagatgttccagcagaagatgacccttccccttgtgcgctggaaacgggccacgggcggcagtgccagaacggcacggtgtgcaagcccggctgggatggtcccaagcacggcatcaccaactttgacaactttgccttcgccatgctcacggtgttccagtgcatcaccatggagggctggacggacgtgctgtactgggtcaatgatgccgtaggaagggactggccctggatctattttgttacactaatcatcatagggtcattttttgtacttaacttggttctcggtgtgcttagcggagagttttccaaagagagggagaaggccaaggcccggggagatttccagaagctgcgggagaagcagcagctagaagaggatctcaaaggctacctggattggatcactcaggccgaagacatcgatcctgagaatgaggacgaaggcatggatgaggagaagccccgaaacatgagcatgcccaccagtgagaccgagtccgtcaacaccgaaaacgtggctggaggtgacatcgagggagaaaactgcggggccaggctggcccaccggatctccaagtcaaagttcagccgctactggcgccggtggaatcggttctgcagaaggaagtgccgcgccgcagtcaagtctaatgtcttctactggctggtgattttcctggtgttcctcaacacgctcaccattgcctctgagcactacaaccagcccaactggctcacagaagtccaagacacggcaaacaaggccctgctggccctgttcacggcagagatgctcctgaagatgtacagcctgggcctgcaggcctacttcgtgtccctcttcaaccgctttgactgcttcgtcgtgtgtggcggcatcctggagaccatcctggtggagaccaagatcatgtccccactgggcatctccgtgctcagatgcgtccggctgctgaggattttcaagatcacgaggtactggaactccttgagcaacctggtggcatccttgctgaactctgtgcgctccatcgcctccctgctccttctcctcttcctcttcatcatcatcttctccctcctggggatgcagctctttggaggaaagttcaactttgatgagatgcagacccggaggagcacattcgataacttcccccagtccctcctcactgtgtttcagatcctgaccggggaggactggaattcggtgatgtatgatgggatcatggcttatggcggcccctcttttccagggatgttagtctgtatttacttcatcatcctcttcatctgtggaaactatatcctactgaatgtgttcttggccattgctgtggacaacctggctgatgctgagagcctcacatctgcccaaaaggaggaggaagaggagaaggagagaaagaagctggccaggactgccagcccagagaagaaacaagagttggtggagaagccggcagtgggggaatccaaggaggagaagattgagctgaaatccatcacggctgacggagagtctccacccgccaccaagatcaacatggatgacctccagcccaatgaaaatgaggataagagcccctaccccaacccagaaactacaggagaagaggatgaggaggagccagagatgcctgtcggccctcgcccacgaccactctctgagcttcaccttaaggaaaaggcagtgcccatgccagaagccagcgcgtttttcatcttcagctctaacaacaggtttcgcctccagtgccaccgcattgtcaatgacacgatcttcaccaacctgatcctcttcttcattctgctcagcagcatttccctggctgctgaggacccggtccagcacacctccttcaggaaccatattctgttttattttgatattgtttttaccaccattttcaccattgaaattgctctgaagatgactgcttatggggctttcttgcacaagggttctttctgccggaactacttcaacatcctggacctgctggtggtcagcgtgtccctcatctcctttggcatccagtccagtgcaatcaatgtcgtgaagatcttgcgagtcctgcgagtactcaggcccctgagggccatcaacagggccaaggggctaaagcatgtggttcagtgtgtgtttgtcgccatccggaccatcgggaacatcgtgattgtcaccaccctgctgcagttcatgtttgcctgcatcggggtccagctcttcaagggaaagctgtacacctgttcagacagttccaagcagacagaggcggaatgcaagggcaactacatcacgtacaaagacggggaggttgaccaccccatcatccaaccccgcagctgggagaacagcaagtttgactttgacaatgttctggcagccatgatggccctcttcaccgtctccaccttcgaagggtggccagagctgctgtaccgctccatcgactcccacacggaagacaagggccccatctacaactaccgtgtggagatctccatcttcttcatcatctacatcatcatcatcgccttcttcatgatgaacatcttcgtgggcttcgtcatcgtcacctttcaggagcagggggagcaggagtacaagaactgtgagctggacaagaaccagcgacagtgcgtggaatacgccctcaaggcccggcccctgcggaggtacatccccaagaaccagcaccagtacaaagtgtggtacgtggtcaactccacctacttcgagtacctgatgttcgtcctcatcctgctcaacaccatctgcctggccatgcagcactacggccagagctgcctgttcaaaatcgccatgaacatcctcaacatgctcttcactggcctcttcaccgtggagatgatcctgaagctcattgccttcaaacccaagcactatttctgtgatgcatggaatacatttgacgccttgattgttgtgggtagcattgttgatatagcaatcaccgaggtaaacccagctgaacatacccaatgctctccctctatgaacgcagaggaaaactcccgcatctccatcaccttcttccgcctgttccgggtcatgcgtctggtgaagctgctgagccgtggggagggcatccggacgctgctgtggaccttcatcaagtccttccaggccctgccctatgtggccctcctgatcgtgatgctgttcttcatctacgcggtgatcgggatgcaggtgtttgggaaaattgccctgaatgataccacagagatcaaccggaacaacaactttcagaccttcccccaggccgtgctgctcctcttcaggtgtgccaccggggaggcctggcaggacatcatgctggcctgcatgccaggcaagaagtgtgccccagagtccgagcccagcaacagcacggagggtgaaacaccctgtggtagcagctttgctgtcttctacttcatcagcttctacatgctctgtgccttcctgatcatcaacctctttgtagctgtcatcatggacaactttgactacctgacaagggactggtccatccttggtccccaccacctggatgagtttaaaagaatctgggcagagtatgaccctgaagccaagggtcgtatcaaacacctggatgtggtgaccctcctccggcggattcagccgccactaggttttgggaagctgtgccctcaccgcgtggcttgcaaacgcctggtctccatgaacatgcctctgaacagcgacgggacagtcatgttcaatgccaccctgtttgccctggtcaggacggccctgaggatcaaaacagaagggaacctagaacaagccaatgaggagctgcgggcgatcatcaagaagatctggaagcggaccagcatgaagctgctggaccaggtggtgccccctgcaggtgatgatgaggtcaccgttggcaagttctacgccacgttcctgatccaggagtacttccggaagttcaagaagcgcaaagagcagggccttgtgggcaagccctcccagaggaacgcgctgtctctgcaggctggcttgcgcacactgcatgacatcgggcctgagatccgacgggccatctctggagatctcaccgctgaggaggagctggacaaggccatgaaggaggctgtgtccgctgcttctgaagatgacatcttcaggagggccggtggcctgttcggcaaccacgtcagctactaccaaagcgacggccggagcgccttcccccagaccttcaccactcagcgcccgctgcacatcaacaaggcgggcagcagccagggcgacactgagtcgccatcccacgagaagctggtggactccaccttcaccccgagcagctactcgtccaccggctccaacgccaacatcaacaacgccaacaacaccgccctgggtcgcctccctcgccccgccggctaccccagcacggtcagcactgtggagggccacgggccccccttgtcccctgccatccgggtgcaggaggtggcgtggaagctcagctccaacaggtgccactcccgggagagccaggcagccatggcgggtcaggaggagacgtctcaggatgagacctatgaagtgaagatgaaccatgacacggaggcctgcagtgagcccagcctgctctccacagagatgctctcctaccaggatgacgaaaatcggcaactgacgctcccagaggaggacaagagggacatccggcaatctccgaagaggggtttcctccgctctgcctcactaggtcgaagggcctccttccacctggaatgtctgaagcgacagaaggaccgagggggagacatctctcagaagacagtcctgcccttgcatctggttcatcatcaggcattggcagtggcaggcctgagccccctcctccagagaagccattcccctgcctcattccctaggccttttgccaccccaccagccacacctggcagccgaggctggcccccacagcccgtccccaccctgcggcttgagggggtcgagtccagtgagaaactcaacagcagcttcccatccatccactgcggctcctgggctgagaccacccccggtggcgggggcagcagcgccgcccggagagtccggcccgtctccctcatggtgcccagccaggctggggccccagggaggcagttccacggcagtgccagcagcctggtggaagcggtcttgatttcagaaggactggggcagtttgctcaagatcccaagttcatcgaggtcaccacccaggagctggccgacgcctgcgacatgaccatagaggagatggagagcgcggccgacaacatcctcagcgggggcgccccacagagccccaatggcgccctcttaccctttgtgaactgcagggacgcggggcaggaccgagccgggggcgaagaggacgcgggctgtgtgcgcgcgcggggtcgaccgagtgaggaggagctccaggacagcagggtctacgtcagcagcctgtagtgggcgctgccagatgcgggcttttttttatttgtttcaatgttcctaatgggttcgtttcagaagtgcctcactgttctcgtgacctggagttaaccggaacagcgtcttcattcatttctgttgggaccagacgcggagcctgggtgcgcgagccgccctccgggaggaaggcgcccggctgcgtctgcagaggcggggagaggaggcggcgagggtcccggggcgcgaggaaggcgcctgccctctcccagctcgcaggccccgggcccggccgcgcctccgcggggagagcaccccggcttcccgcgcgccctcaccaaaaggaccctacagcaaacgggtgtctttcgactctgcttgtagaaaccatttgcacatattctgtacgagcctcgctgtctccctagagccagggccctgcggatttggagaagggagcggggcaggacttccaggaggaccccaacccggcccggagagggaggaggaggcctccaggggcgcggagctctggggatgggcgtcgggccggcagtggtgcggctcactccgtccctgcccacctgcgacgggatcccccgaccggcacgggccacgccgagctcccggccagccgccggcccgcaggcagcgcgagggaggagctgcgccgccggctccgcccaaccaggtggtgctgagcttccgctgagcgctcttttgttttgtggtttgacacttttcttgacagcatgttgcagtttcttttcggttttggttttttttaaatgttttattttgctttcccagcgggaggggaggaagaagagtgtttacaaagtcctgtagccccctcacctttctgttttcacttttgccaatgtacatcgggtttggttttcttgtattatttaaacggttgtggtttcctttttccacggaggttcaatagaagccgctgcaggagagttttaccaaccattgtgtatgcccaataatttgttatcatttccttaggtagtaacctatttttgttctggtttggttcggttatctaatggaaaggtaactggcaatgcacttgatgtggtcttgcacatgtgggtgatagagttgggttcctttttatgctgggtgtacaggtgggtttgggagagaggagcatgcgcgagagagtctccgagtgtgtgcgacgcgtgtgtgtgtggtgggttgtctgtgtgcatatgtcctgcccgtgtatatgcacccacaccatgtgcccgtgcacaccagtgactacgcagtcccccctttctggtttagctgtgggaagatctgaatctggggccgtttgaaagcaaaaacaaaccactgtctctgcttctgaaacgggaatcagtaactctttgcattttctgtcccacaagatatgcaaaaacaatgcaataatattcatttaaaaatacaattgtgagttgtgttggcattaaaactgtattttaaaaaaagacagaaatttaagggaaaaacacaagaaggcattttgcttcaatatattccgtgtaatgttttattgcattgataatgtttctgttgaagaaaccgttatacttgaattcaggtcagtttcagtatttttcaaatatttttttaaaactgaattgcaattgtgccaagcgaatataatgaattgaattaagttggttttcggattcacttcttgtatattttgctgcatgtaaagtaaatcattttgtatttggagtgtgacaagcttta

SEQ ID NO: 4185 - DNA, 6568 bp, Homo sapiens
  source 1..6568: mol_type = unassigned DNA
atggtcaatgagaatacgaggatgtacattccagaggaaaaccaccaaggttccaactatgggagcccacgccccgcccatgccaacatgaatgccaatgcggcagcggggctggcccctgagcacatccccaccccgggggctgccctgtcgtggcaggcggccatcgacgcagcccggcaggctaagctgatgggcagcgctggcaatgcgaccatctccacagtcagctccacgcagcggaagcggcagcaatatgggaaacccaagaagcagggcagcaccacggccacacgcccgccccgagccctgctctgcctgaccctgaagaaccccatccggagggcctgcatcagcattgtcgaatggaaaccatttgaaataattattttactgactatttttgccaattgtgtggccttagcgatctatattccctttccagaagatgattccaacgccaccaattccaacctggaacgagtggaatatctctttctcataatttttacggtggaagcgtttttaaaagtaatcgcctatggactcctctttcaccccaatgcctacctccgcaacggctggaacctactagattttataattgtggttgtggggctttttagtgcaattttagaacaagcaaccaaagcagatggggcaaacgctctcggagggaaaggggccggatttgatgtgaaggcgctgagggccttccgcgtgctgcgccccctgcggctggtgtccggagtcccaagtctccaggtggtcctgaattccatcatcaaggccatggtccccctgctgcacatcgccctgcttgtgctgtttgtcatcatcatctacgccatcatcggcttggagctcttcatggggaagatgcacaagacctgctacaaccaggagggcatagcagatgttccagcagaagatgacccttccccttgtgcgctggaaacgggccacgggcggcagtgccagaacggcacggtgtgcaagcccggctgggatggtcccaagcacggcatcaccaactttgacaactttgccttcgccatgctcacggtgttccagtgcatcaccatggagggctggacggacgtgctgtactgggtcaatgatgccgtaggaagggactggccctggatctattttgttacactaatcatcatagggtcattttttgtacttaacttggttctcggtgtgcttagcggagagttttccaaagagagggagaaggccaaggcccggggagatttccagaagctgcgggagaagcagcagctagaagaggatctcaaaggctacctggattggatcactcaggccgaagacatcgatcctgagaatgaggacgaaggcatggatgaggagaagccccgaaacatgagcatgcccaccagtgagaccgagtccgtcaacaccgaaaacgtggctggaggtgacatcgagggagaaaactgcggggccaggctggcccaccggatctccaagtcaaagttcagccgctactggcgccggtggaatcggttctgcagaaggaagtgccgcgccgcagtcaagtctaatgtcttctactggctggtgattttcctggtgttcctcaacacgctcaccattgcctctgagcactacaaccagcccaactggctcacagaagtccaagacacggcaaacaaggccctgctggccctgttcacggcagagatgctcctgaagatgtacagcctgggcctgcaggcctacttcgtgtccctcttcaaccgctttgactgcttcgtcgtgtgtggcggcatcctggagaccatcctggtggagaccaagatcatgtccccactgggcatctccgtgctcagatgcgtccggctgctgaggattttcaagatcacgaggtactggaactccttgagcaacctggtggcatccttgctgaactctgtgcgctccatcgcctccctgctccttctcctcttcctcttcatcatcatcttctccctcctggggatgcagctctttggaggaaagttcaactttgatgagatgcagacccggaggagcacattcgataacttcccccagtccctcctcactgtgtttcagatcctgaccggggaggactggaattcggtgatgtatgatgggatcatggcttatggcggcccctcttttccagggatgttagtctgtatttacttcatcatcctcttcatctgtggaaactatatcctactgaatgtgttcttggccattgctgtggacaacctggctgatgctgagagcctcacatctgcccaaaaggaggaggaagaggagaaggagagaaagaagctggccaggactgccagcccagagaagaaacaagagttggtggagaagccggcagtgggggaatccaaggaggagaagattgagctgaaatccatcacggctgacggagagtctccacccgccaccaagatcaacatggatgacctccagcccaatgaaaatgaggataagagcccctaccccaacccagaaactacaggagaagaggatgaggaggagccagagatgcctgtcggccctcgcccacgaccactctctgagcttcaccttaaggaaaaggcagtgcccatgccagaagccagcgcgtttttcatcttcagctctaacaacaggtttcgcctccagtgccaccgcattgtcaatgacacgatcttcaccaacctgatcctcttcttcattctgctcagcagcatttccctggctgctgaggacccggtccagcacacctccttcaggaaccatattctgttttattttgatattgtttttaccaccattttcaccattgaaattgctctgaagatgactgcttatggggctttcttgcacaagggttctttctgccggaactacttcaacatcctggacctgctggtggtcagcgtgtccctcatctcctttggcatccagtccagtgcaatcaatgtcgtgaagatcttgcgagtcctgcgagtactcaggcccctgagggccatcaacagggccaaggggctaaagcatgtggttcagtgtgtgtttgtcgccatccggaccatcgggaacatcgtgattgtcaccaccctgctgcagttcatgtttgcctgcatcggggtccagctcttcaagggaaagctgtacacctgttcagacagttccaagcagacagaggcggaatgcaagggcaactacatcacgtacaaagacggggaggttgaccaccccatcatccaaccccgcagctgggagaacagcaagtttgactttgacaatgttctggcagccatgatggccctcttcaccgtctccaccttcgaagggtggccagagctgctgtaccgctccatcgactcccacacggaagacaagggccccatctacaactaccgtgtggagatctccatcttcttcatcatctacatcatcatcatcgccttcttcatgatgaacatcttcgtgggcttcgtcatcgtcacctttcaggagcagggggagcaggagtacaagaactgtgagctggacaagaaccagcgacagtgcgtggaatacgccctcaaggcccggcccctgcggaggtacatccccaagaaccagcaccagtacaaagtgtggtacgtggtcaactccacctacttcgagtacctgatgttcgtcctcatcctgctcaacaccatctgcctggccatgcagcactacggccagagctgcctgttcaaaatcgccatgaacatcctcaacatgctcttcactggcctcttcaccgtggagatgatcctgaagctcattgccttcaaacccaagggttactttagtgatccctggaatgtttttgacttcctcatcgtaattggcagcataattgacgtcattctcagtgagactaatccagctgaacatacccaatgctctccctctatgaacgcagaggaaaactcccgcatctccatcaccttcttccgcctgttccgggtcatgcgtctggtgaagctgctgagccgtggggagggcatccggacgctgctgtggaccttcatcaagtccttccaggccctgccctatgtggccctcctgatcgtgatgctgttcttcatctacgcggtgatcgggatgcaggtgtttgggaaaattgccctgaatgataccacagagatcaaccggaacaacaactttcagaccttcccccaggccgtgctgctcctcttcaggtgtgccaccggggaggcctggcaggacatcatgctggcctgcatgccaggcaagaagtgtgccccagagtccgagcccagcaacagcacggagggtgaaacaccctgtggtagcagctttgctgtcttctacttcatcagcttctacatgctctgtgccttcctgatcatcaacctctttgtagctgtcatcatggacaactttgactacctgacaagggactggtccatccttggtccccaccacctggatgagtttaaaagaatctgggcagagtatgaccctgaagccaagggtcgtatcaaacacctggatgtggtgaccctcctccggcggattcagccgccactaggttttgggaagctgtgccctcaccgcgtggcttgcaaacgcctggtctccatgaacatgcctctgaacagcgacgggacagtcatgttcaatgccaccctgtttgccctggtcaggacggccctgaggatcaaaacagaagagggacccagcccatcagaggcccaccaaggggctgaggatcctttccgccctgcagggaacctagaacaagccaatgaggagctgcgggcgatcatcaagaagatctggaagcggaccagcatgaagctgctggaccaggtggtgccccctgcaggtgatgatgaggtcaccgttggcaagttctacgccacgttcctgatccaggagtacttccggaagttcaagaagcgcaaagagcagggccttgtgggcaagccctcccagaggaacgcgctgtctctgcaggctggcttgcgcacactgcatgacatcgggcctgagatccgacgggccatctctggagatctcaccgctgaggaggagctggacaaggccatgaaggaggctgtgtccgctgcttctgaagatgacatcttcaggagggccggtggcctgttcggcaaccacgtcagctactaccaaagcgacggccggagcgccttcccccagaccttcaccactcagcgcccgctgcacatcaacaaggcgggcagcagccagggcgacactgagtcgccatcccacgagaagctggtggactccaccttcaccccgagcagctactcgtccaccggctccaacgccaacatcaacaacgccaacaacaccgccctgggtcgcctccctcgccccgccggctaccccagcacggtcagcactgtggagggccacgggccccccttgtcccctgccatccgggtgcaggaggtggcgtggaagctcagctccaacaggtgccactcccgggagagccaggcagccatggcgggtcaggaggagacgtctcaggatgagacctatgaagtgaagatgaaccatgacacggaggcctgcagtgagcccagcctgctctccacagagatgctctcctaccaggatgacgaaaatcggcaactgacgctcccagaggaggacaagagggacatccggcaatctccgaagaggggtttcctccgctctgcctcactaggtcgaagggcctccttccacctggaatgtctgaagcgacagaaggaccgagggggagacatctctcagaagacagtcctgcccttgcatctggttcatcatcaggcattggcagtggcaggcctgagccccctcctccagagaagccattcccctgcctcattccctaggccttttgccaccccaccagccacacctggcagccgaggctggcccccacagcccgtccccaccctgcggcttgagggggtcgagtccagtgagaaactcaacagcagcttcccatccatccactgcggctcctgggctgagaccacccccggtggcgggggcagcagcgccgcccggagagtccggcccgtctccctcatggtgcccagccaggctggggccccagggaggcagttccacggcagtgccagcagcctggtggaagcggtcttgatttcagaaggactggggcagtttgctcaagatcccaagttcatcgaggtcaccacccaggagctggccgacgcctgcgacatgaccatagaggagatggagagcgcggccgacaacatcctcagcgggggcgccccacagagccccaatggcgccctcttaccctttgtgaactgcagggacgcggggcaggaccgagccgggggcgaagaggacgcgggctgtgtgcgcgcgcggggtcgaccgagtgaggaggagctccaggacagcagggtctacgtcagcagcctgtagtgggcgctgccagatgcgggcttttttttatttgtttcaatgttcctaatgggttcgtttcagaagtgcctcactgttctcgtgacctggagtt

SEQ ID NO: 4186 - DNA, 7590 bp, Homo sapiens
  source 1..7590: mol_type = unassigned DNA
atggtcaatgagaatacgaggatgtacattccagaggaaaaccaccaaggttccaactatgggagcccacgccccgcccatgccaacatgaatgccaatgcggcagcggggctggcccctgagcacatccccaccccgggggctgccctgtcgtggcaggcggccatcgacgcagcccggcaggctaagctgatgggcagcgctggcaatgcgaccatctccacagtcagctccacgcagcggaagcggcagcaatatgggaaacccaagaagcagggcagcaccacggccacacgcccgccccgagccctgctctgcctgaccctgaagaaccccatccggagggcctgcatcagcattgtcgaatggaaaccatttgaaataattattttactgactatttttgccaattgtgtggccttagcgatctatattccctttccagaagatgattccaacgccaccaattccaacctggaacgagtggaatatctctttctcataatttttacggtggaagcgtttttaaaagtaatcgcctatggactcctctttcaccccaatgcctacctccgcaacggctggaacctactagattttataattgtggttgtggggctttttagtgcaattttagaacaagcaaccaaagcagatggggcaaacgctctcggagggaaaggggccggatttgatgtgaaggcgctgagggccttccgcgtgctgcgccccctgcggctggtgtccggagtcccaagtctccaggtggtcctgaattccatcatcaaggccatggtccccctgctgcacatcgccctgcttgtgctgtttgtcatcatcatctacgccatcatcggcttggagctcttcatggggaagatgcacaagacctgctacaaccaggagggcatagcagatgttccagcagaagatgacccttccccttgtgcgctggaaacgggccacgggcggcagtgccagaacggcacggtgtgcaagcccggctgggatggtcccaagcacggcatcaccaactttgacaactttgccttcgccatgctcacggtgttccagtgcatcaccatggagggctggacggacgtgctgtactggatgcaggacgctatgggctatgagttaccctgggtgtattttgtcagtctggtcatctttggatcctttttcgttctaaatctggttctcggtgtgttgagcggagagttttccaaagagagggagaaggccaaggcccggggagatttccagaagctgcgggagaagcagcagctagaagaggatctcaaaggctacctggattggatcactcaggccgaagacatcgatcctgagaatgaggacgaaggcatggatgaggagaagccccgaaacatgagcatgcccaccagtgagaccgagtccgtcaacaccgaaaacgtggctggaggtgacatcgagggagaaaactgcggggccaggctggcccaccggatctccaagtcaaagttcagccgctactggcgccggtggaatcggttctgcagaaggaagtgccgcgccgcagtcaagtctaatgtcttctactggctggtgattttcctggtgttcctcaacacgctcaccattgcctctgagcactacaaccagcccaactggctcacagaagtccaagacacggcaaacaaggccctgctggccctgttcacggcagagatgctcctgaagatgtacagcctgggcctgcaggcctacttcgtgtccctcttcaaccgctttgactgcttcgtcgtgtgtggcggcatcctggagaccatcctggtggagaccaagatcatgtccccactgggcatctccgtgctcagatgcgtccggctgctgaggattttcaagatcacgaggtactggaactccttgagcaacctggtggcatccttgctgaactctgtgcgctccatcgcctccctgctccttctcctcttcctcttcatcatcatcttctccctcctggggatgcagctctttggaggaaagttcaactttgatgagatgcagacccggaggagcacattcgataacttcccccagtccctcctcactgtgtttcagatcctgaccggggaggactggaattcggtgatgtatgatgggatcatggcttatggcggcccctcttttccagggatgttagtctgtatttacttcatcatcctcttcatctgtggaaactatatcctactgaatgtgttcttggccattgctgtggacaacctggctgatgctgagagcctcacatctgcccaaaaggaggaggaagaggagaaggagagaaagaagctggccaggactgccagcccagagaagaaacaagagttggtggagaagccggcagtgggggaatccaaggaggagaagattgagctgaaatccatcacggctgacggagagtctccacccgccaccaagatcaacatggatgacctccagcccaatgaaaatgaggataagagcccctaccccaacccagaaactacaggagaagaggatgaggaggagccagagatgcctgtcggccctcgcccacgaccactctctgagcttcaccttaaggaaaaggcagtgcccatgccagaagccagcgcgtttttcatcttcagctctaacaacaggtttcgcctccagtgccaccgcattgtcaatgacacgatcttcaccaacctgatcctcttcttcattctgctcagcagcatttccctggctgctgaggacccggtccagcacacctccttcaggaaccatattctgttttattttgatattgtttttaccaccattttcaccattgaaattgctctgaagatgactgcttatggggctttcttgcacaagggttctttctgccggaactacttcaacatcctggacctgctggtggtcagcgtgtccctcatctcctttggcatccagtccagtgcaatcaatgtcgtgaagatcttgcgagtcctgcgagtactcaggcccctgagggccatcaacagggccaaggggctaaagcatgtggttcagtgtgtgtttgtcgccatccggaccatcgggaacatcgtgattgtcaccaccctgctgcagttcatgtttgcctgcatcggggtccagctcttcaagggaaagctgtacacctgttcagacagttccaagcagacagaggcggaatgcaagggcaactacatcacgtacaaagacggggaggttgaccaccccatcatccaaccccgcagctgggagaacagcaagtttgactttgacaatgttctggcagccatgatggccctcttcaccgtctccaccttcgaagggtggccagagctgctgtaccgctccatcgactcccacacggaagacaagggccccatctacaactaccgtgtggagatctccatcttcttcatcatctacatcatcatcatcgccttcttcatgatgaacatcttcgtgggcttcgtcatcgtcacctttcaggagcagggggagcaggagtacaagaactgtgagctggacaagaaccagcgacagtgcgtggaatacgccctcaaggcccggcccctgcggaggtacatccccaagaaccagcaccagtacaaagtgtggtacgtggtcaactccacctacttcgagtacctgatgttcgtcctcatcctgctcaacaccatctgcctggccatgcagcactacggccagagctgcctgttcaaaatcgccatgaacatcctcaacatgctcttcactggcctcttcaccgtggagatgatcctgaagctcattgccttcaaacccaagggttactttagtgatccctggaatgtttttgacttcctcatcgtaattggcagcataattgacgtcattctcagtgagactaatccagctgaacatacccaatgctctccctctatgaacgcagaggaaaactcccgcatctccatcaccttcttccgcctgttccgggtcatgcgtctggtgaagctgctgagccgtggggagggcatccggacgctgctgtggaccttcatcaagtccttccaggccctgccctatgtggccctcctgatcgtgatgctgttcttcatctacgcggtgatcgggatgcaggtgtttgggaaaattgccctgaatgataccacagagatcaaccggaacaacaactttcagaccttcccccaggccgtgctgctcctcttcaggtgtgccaccggggaggcctggcaggacatcatgctggcctgcatgccaggcaagaagtgtgccccagagtccgagcccagcaacagcacggagggtgaaacaccctgtggtagcagctttgctgtcttctacttcatcagcttctacatgctctgtgccttcctgatcatcaacctctttgtagctgtcatcatggacaactttgactacctgacaagggactggtccatccttggtccccaccacctggatgagtttaaaagaatctgggcagagtatgaccctgaagccaagggtcgtatcaaacacctggatgtggtgaccctcctccggcggattcagccgccactaggttttgggaagctgtgccctcaccgcgtggcttgcaaacgcctggtctccatgaacatgcctctgaacagcgacgggacagtcatgttcaatgccaccctgtttgccctggtcaggacggccctgaggatcaaaacagaagggaacctagaacaagccaatgaggagctgcgggcgatcatcaagaagatctggaagcggaccagcatgaagctgctggaccaggtggtgccccctgcaggtgatgatgaggtcaccgttggcaagttctacgccacgttcctgatccaggagtacttccggaagttcaagaagcgcaaagagcagggccttgtgggcaagccctcccagaggaacgcgctgtctctgcaggctggcttgcgcacactgcatgacatcgggcctgagatccgacgggccatctctggagatctcaccgctgaggaggagctggacaaggccatgaaggaggctgtgtccgctgcttctgaagatgacatcttcaggagggccggtggcctgttcggcaaccacgtcagctactaccaaagcgacggccggagcgccttcccccagaccttcaccactcagcgcccgctgcacatcaacaaggcgggcagcagccagggcgacactgagtcgccatcccacgagaagctggtggactccaccttcaccccgagcagctactcgtccaccggctccaacgccaacatcaacaacgccaacaacaccgccctgggtcgcctccctcgccccgccggctaccccagcacggtcagcactgtggagggccacgggccccccttgtcccctgccatccgggtgcaggaggtggcgtggaagctcagctccaacaggatgcactgctgtgacatgctggatggtgggaccttccctcccgccctgggcccccgcagggctcctccctgtctgcatcagcagctccagggttccctggcggggctgagagaggacacaccctgcatcgtgcctggccacgcttcactgtgctgctcttccagagtaggagagtggctcccagcaggctgcacagccccccagcatgccaggtgccactcccgggagagccaggcagccatggcgggtcaggaggagacgtctcaggatgagacctatgaagtgaagatgaaccatgacacggaggcctgcagtgagcccagcctgctctccacagagatgctctcctaccaggatgacgaaaatcggcaactgacgctcccagaggaggacaagagggacatccggcaatctccgaagaggggtttcctccgctctgcctcactaggtcgaagggcctccttccacctggaatgtctgaagcgacagaaggaccgagggggagacatctctcagaagacagtcctgcccttgcatctggttcatcatcaggcattggcagtggcaggcctgagccccctcctccagagaagccattcccctgcctcattccctaggccttttgccaccccaccagccacacctggcagccgaggctggcccccacagcccgtccccaccctgcggcttgagggggtcgagtccagtgagaaactcaacagcagcttcccatccatccactgcggctcctgggctgagaccacccccggtggcgggggcagcagcgccgcccggagagtccggcccgtctccctcatggtgcccagccaggctggggccccagggaggcagttccacggcagtgccagcagcctggtggaagcggtcttgatttcagaaggactggggcagtttgctcaagatcccaagttcatcgaggtcaccacccaggagctggccgacgcctgcgacatgaccatagaggagatggagagcgcggccgacaacatcctcagcgggggcgccccacagagccccaatggcgccctcttaccctttgtgaactgcagggacgcggggcaggaccgagccgggggcgaagaggacgcgggctgtgtgcgcgcgcggggtcgaccgagtgaggaggagctccaggacagcagggtctacgtcagcagcctgtagtgggcgctgccagatgcgggcttttttttatttgtttcaatgttcctaatgggttcgtttcagaagtgcctcactgttctcgtgacctggagttaaccggaacagcgtcttcattcatttctgttgggaccagacgcggagcctgggtgcgcgagccgccctccgggaggaaggcgcccggctgcgtctgcagaggcggggagaggaggcggcgagggtcccggggcgcgaggaaggcgcctgccctctcccagctcgcaggccccgggcccggccgcgcctccgcggggagagcaccccggcttcccgcgcgccctcaccaaaaggaccctacagcaaacgggtgtctttcgactctgcttgtagaaaccatttgcacatattctgtacgagcctcgctgtctccctagagccagggccctgcggatttggagaagggagcggggcaggacttccaggaggaccccaacccggcccggagagggaggaggaggcctccaggggcgcggagctctggggatgggcgtcgggccggcagtggtgcggctcactccgtccctgcccacctgcgacgggatcccccgaccggcacgggccacgccgagctcccggccagccgccggcccgcaggcagcgcgagggaggagctgcgccgccggctccgcccaaccaggtggtgctgagcttccgctgagcgctcttttgttttgtggtttgacacttttcttgacagcatgttgcagtttcttttcggttttggttttttttaaatgttttattttgctttcccagcgggaggggaggaagaagagtgtttacaaagtcctgtagccccctcacctttctgttttcacttttgccaatgtacatcgggtttggttttcttgtattatttaaacggttgtggtttcctttttccacggaggttcaatagaagccgctgcaggagagttttaccaa

SEQ ID NO: 4187 - DNA, 6811 bp, Homo sapiens
  source 1..6811: mol_type = unassigned DNA
ctcctattaaaaccatttttggtccatggtcaatgagaatacgaggatgtacattccagaggaaaaccaccaaggttccaactatgggagcccacgccccgcccatgccaacatgaatgccaatgcggcagcggggctggcccctgagcacatccccaccccgggggctgccctgtcgtggcaggcggccatcgacgcagcccggcaggctaagctgatgggcagcgctggcaatgcgaccatctccacagtcagctccacgcagcggaagcggcagcaatatgggaaacccaagaagcagggcagcaccacggccacacgcccgccccgagccctgctctgcctgaccctgaagaaccccatccggagggcctgcatcagcattgtcgaatggaaaccatttgaaataattattttactgactatttttgccaattgtgtggccttagcgatctatattccctttccagaagatgattccaacgccaccaattccaacctggaacgagtggaatatctctttctcataatttttacggtggaagcgtttttaaaagtaatcgcctatggactcctctttcaccccaatgcctacctccgcaacggctggaacctactagattttataattgtggttgtggggctttttagtgcaattttagaacaagcaaccaaagcagatggggcaaacgctctcggagggaaaggggccggatttgatgtgaaggcgctgagggccttccgcgtgctgcgccccctgcggctggtgtccggagtcccaagtctccaggtggtcctgaattccatcatcaaggccatggtccccctgctgcacatcgccctgcttgtgctgtttgtcatcatcatctacgccatcatcggcttggagctcttcatggggaagatgcacaagacctgctacaaccaggagggcatagcagatgttccagcagaagatgacccttccccttgtgcgctggaaacgggccacgggcggcagtgccagaacggcacggtgtgcaagcccggctgggatggtcccaagcacggcatcaccaactttgacaactttgccttcgccatgctcacggtgttccagtgcatcaccatggagggctggacggacgtgctgtactgggtcaatgatgccgtaggaagggactggccctggatctattttgttacactaatcatcatagggtcattttttgtacttaacttggttctcggtgtgcttagcggagagttttccaaagagagggagaaggccaaggcccggggagatttccagaagctgcgggagaagcagcagctagaagaggatctcaaaggctacctggattggatcactcaggccgaagacatcgatcctgagaatgaggacgaaggcatggatgaggagaagccccgaaacatgagcatgcccaccagtgagaccgagtccgtcaacaccgaaaacgtggctggaggtgacatcgagggagaaaactgcggggccaggctggcccaccggatctccaagtcaaagttcagccgctactggcgccggtggaatcggttctgcagaaggaagtgccgcgccgcagtcaagtctaatgtcttctactggctggtgattttcctggtgttcctcaacacgctcaccattgcctctgagcactacaaccagcccaactggctcacagaagtccaagacacggcaaacaaggccctgctggccctgttcacggcagagatgctcctgaagatgtacagcctgggcctgcaggcctacttcgtgtccctcttcaaccgctttgactgcttcgtcgtgtgtggcggcatcctggagaccatcctggtggagaccaagatcatgtccccactgggcatctccgtgctcagatgcgtccggctgctgaggattttcaagatcacgaggtactggaactccttgagcaacctggtggcatccttgctgaactctgtgcgctccatcgcctccctgctccttctcctcttcctcttcatcatcatcttctccctcctggggatgcagctctttggaggaaagttcaactttgatgagatgcagacccggaggagcacattcgataacttcccccagtccctcctcactgtgtttcagatcctgaccggggaggactggaattcggtgatgtatgatgggatcatggcttatggcggcccctcttttccagggatgttagtctgtatttacttcatcatcctcttcatctgtggaaactatatcctactgaatgtgttcttggccattgctgtggacaacctggctgatgctgagagcctcacatctgcccaaaaggaggaggaagaggagaaggagagaaagaagctggccaggactgccagcccagagaagaaacaagagttggtggagaagccggcagtgggggaatccaaggaggagaagattgagctgaaatccatcacggctgacggagagtctccacccgccaccaagatcaacatggatgacctccagcccaatgaaaatgaggataagagcccctaccccaacccagaaactacaggagaagaggatgaggaggagccagagatgcctgtcggccctcgcccacgaccactctctgagcttcaccttaaggaaaaggcagtgcccatgccagaagccagcgcgtttttcatcttcagctctaacaacaggtttcgcctccagtgccaccgcattgtcaatgacacgatcttcaccaacctgatcctcttcttcattctgctcagcagcatttccctggctgctgaggacccggtccagcacacctccttcaggaaccatatcctaggcaatgcagactatgtcttcactagtatctttacattagaaattatccttaagatgactgcttatggggctttcttgcacaagggttctttctgccggaactacttcaacatcctggacctgctggtggtcagcgtgtccctcatctcctttggcatccagtccagtgcaatcaatgtcgtgaagatcttgcgagtcctgcgagtactcaggcccctgagggccatcaacagggccaaggggctaaagcatgtggttcagtgtgtgtttgtcgccatccggaccatcgggaacatcgtgattgtcaccaccctgctgcagttcatgtttgcctgcatcggggtccagctcttcaagggaaagctgtacacctgttcagacagttccaagcagacagaggcggaatgcaagggcaactacatcacgtacaaagacggggaggttgaccaccccatcatccaaccccgcagctgggagaacagcaagtttgactttgacaatgttctggcagccatgatggccctcttcaccgtctccaccttcgaagggtggccagagctgctgtaccgctccatcgactcccacacggaagacaagggccccatctacaactaccgtgtggagatctccatcttcttcatcatctacatcatcatcatcgccttcttcatgatgaacatcttcgtgggcttcgtcatcgtcacctttcaggagcagggggagcaggagtacaagaactgtgagctggacaagaaccagcgacagtgcgtggaatacgccctcaaggcccggcccctgcggaggtacatccccaagaaccagcaccagtacaaagtgtggtacgtggtcaactccacctacttcgagtacctgatgttcgtcctcatcctgctcaacaccatctgcctggccatgcagcactacggccagagctgcctgttcaaaatcgccatgaacatcctcaacatgctcttcactggcctcttcaccgtggagatgatcctgaagctcattgccttcaaacccaaggtaggcctctgagaaagacctttgattcccaggcatcaggggtggacagaacggggaggtggggtgcaggtattgaaggcagaatgaggggaagagggaaaaaggcatcggtgaaggaccatccctgctccgatggtcagtgccccaactcctacacctgcccagagctgaaccaggccaactccaggaaacactctcagctctcagtgttgaccctggctggcatgcacaagctgcagattcctcgctgagctgaacctctgagcctctcctaggagaggcaggtgatggtctttctcctatgtcccatcctctagtacataacctgttaatagaagaaactatgctcatagactggcagaccaaacctctccaggcccagccccccagatccactcaggcctctgttccaccctcctcccatttcatcagccacacagaccaacctcatataaaacattcagccagggctggatttgctcagggctcaggactgagggctccagcccatgggcactcctgttccctgcctaagaggctatggcattgctccttacatgctctggggcaggaagaacaattaccagcaaatttctctgctttgttccttgtgtaagggcaagaagattaggcctgctgctgaatgaggcagggtcagaattcctgttctttggatcatctgtgcccttcctagccagtcacccccattgtcctcagtggtggaggagcagacactggtatgagccacaccttccaccctgggcctctgtagatgggtcagaatcacgggtatccactggccgggattcaccaccaggacagctgcttctgagggaggctataagagcaactgagcagcccccaggctaccataacaccttttggagaaggatgagaaggaacgagttctaggagcatcatgcagttacagacttgagacaatctctccagcttactgagccttcccctccctcctttggtagttttcccagaggcaacacagatcaacaggaggccaagagcaagaatccctggccatatcttctattttcattcaagtttttactggtctcaagattaattgggggtgggggagggtccagctcggcctttgaatccatgttcattgaggagatatccacagccttctttgaatgaatattcactcacactttggattccatatcatgtgctacatgtatatcatcgcacgtcattctcaaaacgtccctttaaagtaggtattagcatccctctgtggagaagggggaagggaggctcaaacaattaagtgcccaggattaattgatccactgctaagaactggcagaacggagactggaatccggcacctctgacttcactgtattttccaccacactgaggttaactatcattttcccatgtcaagtgttctgcgggtattttttagcaagagggaaacaaccttggagggacttaaaagataagacaatattcctacaatgcagattcttctgtcactcaaagaatgcctggggatcccagctgattttcatagaggaagtctcctaagggacatcctttggtgatagaacggtggtttcctgccttctccagagaagcaagtacactctttttcaccttcctgtacaagtcccatttaggaggacagatcttgtcctgacctagagaggacccctgcgttgccctgacaccttccttagggtacacggtgtctgtgcccacacatggtcctattccaagccctgcagcccaggagctctgacagttcgccacccacagcagcatgaccagctgaggccaggagtgcagtcactgcctagccgagcctcagtctcggatgactcctctcagtggggaaactggcatcattttcatacagtgtcacgagacatatggtttaaatatttcaaagccttgagtcattccacagttgactcagatgtgtttctgacgatgtctgaggcagtctggagagcctgcagtggactttctgaatcatgcctcctgagcacgggagacatacagacaaccttccctgggaagtgcatgaaattgacacctgcaggagcctccgtcctccgtctaaaagacactccacctaaatcctgccaatcaaggaacaagccagtttcctaggaagtaaccattgcgagtggtctaaactgtaaagtgcctcctaatttcctctgtccctggttttctattgtgagaagatggggcaagataacagagacttttacccaagaaggaagacagccatcctgggcccatttgcatttcacattccagggtacatctatggtgtaaagagaaaggaaaatggatctttccctgtgaatttccctaaaggggctctggcaagagggggataaaggtcaccacccagttaggagcatcatggagcacagctgagtccctggattcttactgagctatgttcttcattcacaaatagactccaggtaaagcagctccaaaattttcaggcagaaaaccaaactggaaaaacttgaagctctggaagaatatccagctggatctggcccaagaaccagtggcttctaaccatgacctgaatccatgacaactttcatttcccaccattaagtaggactctgtgctgcactttttatttcactggcatggttgtttgtgtatgacccagatgagcatcagcatttgctgtgaaaggatggctaggaaccaaggatgttgaagacagtctgaagttgtcactgcttatgtttcgtctctgcaactggctggttggttggtccatcagccggtcaacttgtattcttgcttcattctttcattgttttcatggtcatggatgttcccaatttcttcatttctgtgtgttctcctcaccactccatggaaaataaatttactcaagtaagtccctgccttaaatctaaccatcccactccttaaattcatactctgttc

SEQ ID NO: 4188 - DNA, 7721 bp, Homo sapiens
  source 1..7721: mol_type = unassigned DNA
agaataagggcagggaccgcggctcctacctcttggtgatccccttccccattccgcccccgcctcaacgcccagcacagtgccctgcacacagtagtcgctcaataaatgttcgtggatgatgatgatgatgatgatgaaaaaaatgcagcatcaacggcagcagcaagcggaccacgcgaacgaggcaaactatgcaagaggcaccagacttcctctttctggtgaaggaccaacttctcagccgaatagctccaagcaaactgtcctgtcttggcaagctgcaatcgatgctgctagacaggccaaggctgcccaaactatgagcacctctgcacccccacctgtaggatctctctcccaaagaaaacgtcagcaatacgccaagagcaaaaaacagggtaactcgtccaacagccgacctgcccgcgcccttttctgtttatcactcaataaccccatccgaagagcctgcattagtatagtggaatggaaaccatttgacatatttatattattggctatttttgccaattgtgtggccttagctatttacatcccattccctgaagatgattctaattcaacaaatcataacttggaaaaagtagaatatgccttcctgattatttttacagtcgagacatttttgaagattatagcgtatggattattgctacatcctaatgcttatgttaggaatggatggaatttactggattttgttatagtaatagtaggattgtttagtgtaattttggaacaattaaccaaagaaacagaaggcgggaaccactcaagcggcaaatctggaggctttgatgtcaaagccctccgtgcctttcgagtgttgcgaccacttcgactagtgtcaggagtgcccagtttacaagttgtcctgaactccattataaaagccatggttcccctccttcacatagcccttttggtattatttgtaatcataatctatgctattataggattggaactttttattggaaaaatgcacaaaacatgtttttttgctgactcagatatcgtagctgaagaggacccagctccatgtgcgttctcagggaatggacgccagtgtactgccaatggcacggaatgtaggagtggctgggttggcccgaacggaggcatcaccaactttgataactttgcctttgccatgcttactgtgtttcagtgcatcaccatggagggctggacagatgtgctctactgggtaaatgatgcgataggatgggaatggccatgggtgtattttgttagtctgatcatccttggctcatttttcgtccttaacctggttcttggtgtccttagtggagaattctcaaaggaaagagagaaggcaaaagcacggggagatttccagaagctccgggagaagcagcagctggaggaggatctaaagggctacttggattggatcacccaagctgaggacatcgatccggagaatgaggaagaaggaggagaggaaggcaaacgaaatactagcatgcccaccagcgagactgagtctgtgaacacagagaacgtcagcggtgaaggcgagaaccgaggctgctgtggaagtctctggtgctggtggagacggagaggcgcggccaaggcggggccctctgggtgtcggcggtggggtcaagccatctcaaaatccaaactcagccgacgctggcgtcgctggaaccgattcaatcgcagaagatgtagggccgccgtgaagtctgtcacgttttactggctggttatcgtcctggtgtttctgaacaccttaaccatttcctctgagcactacaatcagccagattggttgacacagattcaagatattgccaacaaagtcctcttggctctgttcacctgcgagatgctggtaaaaatgtacagcttgggcctccaagcatatttcgtctctcttttcaaccggtttgattgcttcgtggtgtgtggtggaatcactgagacgatcttggtggaactggaaatcatgtctcccctggggatctctgtgtttcggtgtgtgcgcctcttaagaatcttcaaagtgaccaggcactggacttccctgagcaacttagtggcatccttattaaactccatgaagtccatcgcttcgctgttgcttctgctttttctcttcattatcatcttttccttgcttgggatgcagctgtttggcggcaagtttaattttgatgaaacgcaaaccaagcggagcacctttgacaatttccctcaagcacttctcacagtgttccagatcctgacaggcgaagactggaatgctgtgatgtacgatggcatcatggcttacgggggcccatcctcttcaggaatgatcgtctgcatctacttcatcatcctcttcatttgtggtaactatattctactgaatgtcttcttggccatcgctgtagacaatttggctgatgctgaaagtctgaacactgctcagaaagaagaagcggaagaaaaggagaggaaaaagattgccagaaaagagagcctagaaaataaaaagaacaacaaaccagaagtcaaccagatagccaacagtgacaacaaggttacaattgatgactatagagaagaggatgaagacaaggacccctatccgccttgcgatgtgccagtaggggaagaggaagaggaagaggaggaggatgaacctgaggttcctgccggaccccgtcctcgaaggatctcggagttgaacatgaaggaaaaaattgcccccatccctgaagggagcgctttcttcattcttagcaagaccaacccgatccgcgtaggctgccacaagctcatcaaccaccacatcttcaccaacctcatccttgtcttcatcatgctgagcagcgctgccctggccgcagaggaccccatccgcagccactccttccggaacacgatactgggttactttgactatgccttcacagccatctttactgttgagatcctgttgaagatgacaacttttggagctttcctccacaaaggggccttctgcaggaactacttcaatttgctggatatgctggtggttggggtgtctctggtgtcatttgggattcaatccagtgccatctccgttgtgaagattctgagggtcttaagggtcctgcgtcccctcagggccatcaacagagcaaaaggacttaagcacgtggtccagtgcgtcttcgtggccatccggaccatcggcaacatcatgatcgtcaccaccctcctgcagttcatgtttgcctgtatcggggtccagttgttcaaggggaagttctatcgctgtacggatgaagccaaaagtaaccctgaagaatgcaggggacttttcatcctctacaaggatggggatgttgacagtcctgtggtccgtgaacggatctggcaaaacagtgatttcaacttcgacaacgtcctctctgctatgatggcgctcttcacagtctccacgtttgagggctggcctgcgttgctgtataaagccatcgactcgaatggagagaacatcggcccaatctacaaccaccgcgtggagatctccatcttcttcatcatctacatcatcattgtagctttcttcatgatgaacatctttgtgggctttgtcatcgttacatttcaggaacaaggagaaaaagagtataagaactgtgagctggacaaaaatcagcgtcagtgtgttgaatacgccttgaaagcacgtcccttgcggagatacatccccaaaaacccctaccagtacaagttctggtacgtggtgaactcttcgcctttcgaatacatgatgtttgtcctcatcatgctcaacacactctgcttggccatgcagcactacgagcagtccaagatgttcaatgatgccatggacattctgaacatggtcttcaccggggtgttcaccgtcgagatggttttgaaagtcatcgcatttaagcctaaggggtattttagtgacgcctggaacacgtttgactccctcatcgtaatcggcagcattatagacgtggccctcagcgaagcagacccaactgaaagtgaaaatgtccctgtcccaactgctacacctgggaactctgaagagagcaatagaatctccatcacctttttccgtcttttccgagtgatgcgattggtgaagcttctcagcaggggggaaggcatccggacattgctgtggacttttattaagtcctttcaggcgctcccgtatgtggccctcctcatagccatgctgttcttcatctatgcggtcattggcatgcagatgtttgggaaagttgccatgagagataacaaccagatcaataggaacaataacttccagacgtttccccaggcggtgctgctgctcttcaggtgtgcaacaggtgaggcctggcaggagatcatgctggcctgtctcccagggaagctctgtgaccctgagtcagattacaaccccggggaggagtatacatgtgggagcaactttgccattgtctatttcatcagtttttacatgctctgtgcatttctgatcatcaatctgtttgtggctgtcatcatggataatttcgactatctgacccgggactggtctattttggggcctcaccatttagatgaattcaaaagaatatggtcagaatatgaccctgaggcaaagggaaggataaaacaccttgatgtggtcactctgcttcgacgcatccagcctcccctggggtttgggaagttatgtccacacagggtagcgtgcaagagattagttgccatgaacatgcctctcaacagtgacgggacagtcatgtttaatgcaaccctgtttgctttggttcgaacggctcttaagatcaagaccgaagggaacctggagcaagctaatgaagaacttcgggctgtgataaagaaaatttggaagaaaaccagcatgaaattacttgaccaagttgtccctccagctggtgatgatgaggtaaccgtggggaagttctatgccactttcctgatacaggactactttaggaaattcaagaaacggaaagaacaaggactggtgggaaagtaccctgcgaagaacaccacaattgccctacaggcgggattaaggacactgcatgacattgggccagaaatccggcgtgctatatcgtgtgatttgcaagatgacgagcctgaggaaacaaaacgagaagaagaagatgatgtgttcaaaagaaatggtgccctgcttggaaaccatgtcaatcatgttaatagtgataggagagattcccttcagcagaccaataccacccaccgtcccctgcatgtccaaaggccttcaattccacctgcaagtgatactgagaaaccgctgtttcctccagcaggaaattcggtgtgtcataaccatcataaccataattccataggaaagcaagttcccacctcaacaaatgccaatctcaataatgccaatatgtccaaagctgcccatggaaagcggcccagcattgggaaccttgagcatgtgtctgaaaatgggcatcattcttcccacaagcatgaccgggagcctcagagaaggtccagtgtgaaaagaacccgctattatgaaacttacattaggtccgactcaggagatgaacagctcccaactatttgccgggaagacccagagatacatggctatttcagggacccccactgcttgggggagcaggagtatttcagtagtgaggaatgctacgaggatgacagctcgcccacctggagcaggcaaaactatggctactacagcagatacccaggcagaaacatcgactctgagaggccccgaggctaccatcatccccaaggattcttggaggacgatgactcgcccgtttgctatgattcacggagatctccaaggagacgcctactacctcccaccccagcatcccaccggagatcctccttcaactttgagtgcctgcgccggcagagcagccaggaagaggtcccgtcgtctcccatcttcccccatcgcacggccctgcctctgcatctaatgcagcaacagatcatggcagttgccggcctagattcaagtaaagcccagaagtactcaccgagtcactcgacccggtcgtgggccacccctccagcaacccctccctaccgggactggacaccgtgctacacccccctgatccaagtggagcagtcagaggccctggaccaggtgaacggcagcctgccgtccctgcaccgcagctcctggtacacagacgagcccgacatctcctaccggactttcacaccagccagcctgactgtccccagcagcttccggaacaaaaacagcgacaagcagaggagtgcggacagcttggtggaggcagtcctgatatccgaaggcttgggacgctatgcaagggacccaaaatttgtgtcagcaacaaaacacgaaatcgctgatgcctgtgacctcaccatcgacgagatggagagtgcagccagcaccctgcttaatgggaacgtgcgtccccgagccaacggggatgtgggccccctctcacaccggcaggactatgagctacaggactttggtcctggctacagcgacgaagagccagaccctgggagggatgaggaggacctggcggatgaaatgatatgcatcaccaccttgtagcccccagcgaggggcagactggctctggcctcaggtggggcgcaggagagccaggggaaaagtgcctcatagttaggaaagtttaggcactagttgggagtaatattcaattaattagacttttgtataagagatgtcatgcctcaagaaagccataaacctggtaggaacaggtcccaagcggttgagcctggcagagtaccatgcgctcggccccagctgcaggaaacagcaggccccgccctctcacagaggatgggtgaggaggccagacctgccctgccccattgtccagatgggcactgctgtggagtctgcttctcccatgtaccagggcaccaggcccacccaactgaaggcatggcggcggggtgcaggggaaagttaaaggtgatgacgatcatcacacctgtgtcgttacctcagccatcggtctagcatatcagtcactgggcccaacatatccatttttaaaccctttcccccaaatacactgcgtcctggttcctgtttagctgttctgaaatacggtgtgtaagtaagtcagaacccagctaccagtgattattgcgagggcaatgggacctcataaataaggttttctgtgatgtgacgccagtttacataagagaatatcactccgatggtcggtttctgactgtcacgctaagggcaactgtaaactggaataataatgcactcgcaaccaggtaaacttagatacactagtttgtttaaaattatagatttactgtacatgacttgtaatatactataatttgtatttgtaaagagatggtctatattttgtaattactgtattgtatttgaactgcagcaatatccatgggtcctaataattgtagttccccactaaaatctagaaattattagtatttttactcgggctatccagaagtagaagaaatagagccaattctcatttattcagcgaaaatcctctggggttaaaattttaagtttgaaagaacttgacactacagaaatttttctaaaatattttgagtcactataaacctatcatctttccacaaga

SEQ ID NO: 4189 - DNA, 7636 bp, Homo sapiens
  source 1..7636: mol_type = unassigned DNA
gggcgagcgcctccgtccccggatgtgagctccggctgcccgcggtcccgagccagcggcggcgcgggcggcggcggcgggcaccgggcaccgcggcgggcgggcagacgggcgggcatggggggagcgccgagcggccccggcggccgggccggcatcaccgcggcgtctctccgctagaggaggggacaagccagttctcctttgcagcaaaaaattacatgtatatattattaagataatatatacattggattttatttttttaaaaagtttattttgctccatttttgaaaaagagagagcttgggtggcgagcggttttttttttaaatcaattatccttattttctgttatttgtccccgtccctccccacccccctgctgaagcgagaataagggcagggaccgcggctcctacctcttggtgatccccttccccattccgcccccgcctcaacgcccagcacagtgccctgcacacagtagtcgctcaataaatgttcgtggatgatgatgatgatgatgatgaaaaaaatgcagcatcaacggcagcagcaagcggaccacgcgaacgaggcaaactatgcaagaggcaccagacttcctctttctggtgaaggaccaacttctcagccgaatagctccaagcaaactgtcctgtcttggcaagctgcaatcgatgctgctagacaggccaaggctgcccaaactatgagcacctctgcacccccacctgtaggatctctctcccaaagaaaacgtcagcaatacgccaagagcaaaaaacagggtaactcgtccaacagccgacctgcccgcgcccttttctgtttatcactcaataaccccatccgaagagcctgcattagtatagtggaatggaaaccatttgacatatttatattattggctatttttgccaattgtgtggccttagctatttacatcccattccctgaagatgattctaattcaacaaatcataacttggaaaaagtagaatatgccttcctgattatttttacagtcgagacatttttgaagattatagcgtatggattattgctacatcctaatgcttatgttaggaatggatggaatttactggattttgttatagtaatagtaggattgtttagtgtaattttggaacaattaaccaaagaaacagaaggcgggaaccactcaagcggcaaatctggaggctttgatgtcaaagccctccgtgcctttcgagtgttgcgaccacttcgactagtgtcaggagtgcccagtttacaagttgtcctgaactccattataaaagccatggttcccctccttcacatagcccttttggtattatttgtaatcataatctatgctattataggattggaactttttattggaaaaatgcacaaaacatgtttttttgctgactcagatatcgtagctgaagaggacccagctccatgtgcgttctcagggaatggacgccagtgtactgccaatggcacggaatgtaggagtggctgggttggcccgaacggaggcatcaccaactttgataactttgcctttgccatgcttactgtgtttcagtgcatcaccatggagggctggacagatgtgctctactggatgaatgatgctatgggatttgaattgccctgggtgtattttgtcagtctcgtcatctttgggtcatttttcgtactaaatcttgtacttggtgtattgagcggagaattctcaaaggaaagagagaaggcaaaagcacggggagatttccagaagctccgggagaagcagcagctggaggaggatctaaagggctacttggattggatcacccaagctgaggacatcgatccggagaatgaggaagaaggaggagaggaaggcaaacgaaatactagcatgcccaccagcgagactgagtctgtgaacacagagaacgtcagcggtgaaggcgagaaccgaggctgctgtggaagtctctgtcaagccatctcaaaatccaaactcagccgacgctggcgtcgctggaaccgattcaatcgcagaagatgtagggccgccgtgaagtctgtcacgttttactggctggttatcgtcctggtgtttctgaacaccttaaccatttcctctgagcactacaatcagccagattggttgacacagattcaagatattgccaacaaagtcctcttggctctgttcacctgcgagatgctggtaaaaatgtacagcttgggcctccaagcatatttcgtctctcttttcaaccggtttgattgcttcgtggtgtgtggtggaatcactgagacgatcttggtggaactggaaatcatgtctcccctggggatctctgtgtttcggtgtgtgcgcctcttaagaatcttcaaagtgaccaggcactggacttccctgagcaacttagtggcatccttattaaactccatgaagtccatcgcttcgctgttgcttctgctttttctcttcattatcatcttttccttgcttgggatgcagctgtttggcggcaagtttaattttgatgaaacgcaaaccaagcggagcacctttgacaatttccctcaagcacttctcacagtgttccagatcctgacaggcgaagactggaatgctgtgatgtacgatggcatcatggcttacgggggcccatcctcttcaggaatgatcgtctgcatctacttcatcatcctcttcatttgtggtaactatattctactgaatgtcttcttggccatcgctgtagacaatttggctgatgctgaaagtctgaacactgctcagaaagaagaagcggaagaaaaggagaggaaaaagattgccagaaaagagagcctagaaaataaaaagaacaacaaaccagaagtcaaccagatagccaacagtgacaacaaggttacaattgatgactatagagaagaggatgaagacaaggacccctatccgccttgcgatgtgccagtaggggaagaggaagaggaagaggaggaggatgaacctgaggttcctgccggaccccgtcctcgaaggatctcggagttgaacatgaaggaaaaaattgcccccatccctgaagggagcgctttcttcattcttagcaagaccaacccgatccgcgtaggctgccacaagctcatcaaccaccacatcttcaccaacctcatccttgtcttcatcatgctgagcagcgctgccctggccgcagaggaccccatccgcagccactccttccggaacacgatactgggttactttgactatgccttcacagccatctttactgttgagatcctgttgaagatgacaacttttggagctttcctccacaaaggggccttctgcaggaactacttcaatttgctggatatgctggtggttggggtgtctctggtgtcatttgggattcaatccagtgccatctccgttgtgaagattctgagggtcttaagggtcctgcgtcccctcagggccatcaacagagcaaaaggacttaagcacgtggtccagtgcgtcttcgtggccatccggaccatcggcaacatcatgatcgtcaccaccctcctgcagttcatgtttgcctgtatcggggtccagttgttcaaggggaagttctatcgctgtacggatgaagccaaaagtaaccctgaagaatgcaggggacttttcatcctctacaaggatggggatgttgacagtcctgtggtccgtgaacggatctggcaaaacagtgatttcaacttcgacaacgtcctctctgctatgatggcgctcttcacagtctccacgtttgagggctggcctgcgttgctgtataaagccatcgactcgaatggagagaacatcggcccaatctacaaccaccgcgtggagatctccatcttcttcatcatctacatcatcattgtagctttcttcatgatgaacatctttgtgggctttgtcatcgttacatttcaggaacaaggagaaaaagagtataagaactgtgagctggacaaaaatcagcgtcagtgtgttgaatacgccttgaaagcacgtcccttgcggagatacatccccaaaaacccctaccagtacaagttctggtacgtggtgaactcttcgcctttcgaatacatgatgtttgtcctcatcatgctcaacacactctgcttggccatgcagcactacgagcagtccaagatgttcaatgatgccatggacattctgaacatggtcttcaccggggtgttcaccgtcgagatggttttgaaagtcatcgcatttaagcctaaggggtattttagtgacgcctggaacacgtttgactccctcatcgtaatcggcagcattatagacgtggccctcagcgaagcagacccaactgaaagtgaaaatgtccctgtcccaactgctacacctgggaactctgaagagagcaatagaatctccatcacctttttccgtcttttccgagtgatgcgattggtgaagcttctcagcaggggggaaggcatccggacattgctgtggacttttattaagtcctttcaggcgctcccgtatgtggccctcctcatagccatgctgttcttcatctatgcggtcattggcatgcagatgtttgggaaagttgccatgagagataacaaccagatcaataggaacaataacttccagacgtttccccaggcggtgctgctgctcttcaggtgtgcaacaggtgaggcctggcaggagatcatgctggcctgtctcccagggaagctctgtgaccctgagtcagattacaaccccggggaggagtatacatgtgggagcaactttgccattgtctatttcatcagtttttacatgctctgtgcatttctgatcatcaatctgtttgtggctgtcatcatggataatttcgactatctgacccgggactggtctattttggggcctcaccatttagatgaattcaaaagaatatggtcagaatatgaccctgaggcaaagggaaggataaaacaccttgatgtggtcactctgcttcgacgcatccagcctcccctggggtttgggaagttatgtccacacagggtagcgtgcaagagattagttgccatgaacatgcctctcaacagtgacgggacagtcatgtttaatgcaaccctgtttgctttggttcgaacggctcttaagatcaagaccgaagggaacctggagcaagctaatgaagaacttcgggctgtgataaagaaaatttggaagaaaaccagcatgaaattacttgaccaagttgtccctccagctggtgatgatgaggtaaccgtggggaagttctatgccactttcctgatacaggactactttaggaaattcaagaaacggaaagaacaaggactggtgggaaagtaccctgcgaagaacaccacaattgccctacaggcgggattaaggacactgcatgacattgggccagaaatccggcgtgctatatcgtgtgatttgcaagatgacgagcctgaggaaacaaaacgagaagaagaagatgatgtgttcaaaagaaatggtgccctgcttggaaaccatgtcaatcatgttaatagtgataggagagattcccttcagcagaccaataccacccaccgtcccctgcatgtccaaaggccttcaattccacctgcaagtgatactgagaaaccgctgtttcctccagcaggaaattcggtgtgtcataaccatcataaccataattccataggaaagcaagttcccacctcaacaaatgccaatctcaataatgccaatatgtccaaagctgcccatggaaagcggcccagcattgggaaccttgagcatgtgtctgaaaatgggcatcattcttcccacaagcatgaccgggagcctcagagaaggtccagtgtgaaaagaacccgctattatgaaacttacattaggtccgactcaggagatgaacagctcccaactatttgccgggaagacccagagatacatggctatttcagggacccccactgcttgggggagcaggagtatttcagtagtgaggaatgctacgaggatgacagctcgcccacctggagcaggcaaaactatggctactacagcagatacccaggcagaaacatcgactctgagaggccccgaggctaccatcatccccaaggattcttggaggacgatgactcgcccgtttgctatgattcacggagatctccaaggagacgcctactacctcccaccccagcatcccaccggagatcctccttcaactttgagtgcctgcgccggcagagcagccaggaagaggtcccgtcgtctcccatcttcccccatcgcacggccctgcctctgcatctaatgcagcaacagatcatggcagttgccggcctagattcaagtaaagcccagaagtactcaccgagtcactcgacccggtcgtgggccacccctccagcaacccctccctaccgggactggacaccgtgctacacccccctgatccaagtggagcagtcagaggccctggaccaggtgaacggcagcctgccgtccctgcaccgcagctcctggtacacagacgagcccgacatctcctaccggactttcacaccagccagcctgactgtccccagcagcttccggaacaaaaacagcgacaagcagaggagtgcggacagcttggtggaggcagtcctgatatccgaaggcttgggacgctatgcaagggacccaaaatttgtgtcagcaacaaaacacgaaatcgctgatgcctgtgacctcaccatcgacgagatggagagtgcagccagcaccctgcttaatgggaacgtgcgtccccgagccaacggggatgtgggccccctctcacaccggcaggactatgagctacaggactttggtcctggctacagcgacgaagagccagaccctgggagggatgaggaggacctggcggatgaaatgatatgcatcaccaccttgtagcccccagcgaggggcagactggctctggcctcaggtggggcgcaggagagccaggggaaaagtgcctcatagttaggaaagtttaggcactagttgggagtaatattcaattaattagacttttgtataagagatgtcatgcctcaagaaagccataaacctggtaggaacaggtcccaagcggttgagcctggcagagtaccatgcgctcggccccagctgcaggaaacagcaggccccgccctctcacagaggatgggtgaggaggccagacctgccctgccccattgtccagatgggcactgctgtggagtctgcttctcccatgtaccagggcaccaggcccacccaactgaaggcatggcggcggggtgcaggggaaagttaaaggtgatgacgatcatcacacctgtgtcgttacctcagccatcggtctagcatatcagtcactgggcccaacatatccatttttaaaccctttcccccaaatacactgcgtcctggttcctgtttagctgttctgaaatacggtgtgtaagtaagtcagaacccagctaccagtgattattgcgagggcaatgggacctcataaataaggttttctgtgatgtgacgccagtttacataagagaatatcac

SEQ ID NO: 4190 - DNA, 6414 bp, Homo sapiens
  source 1..6414: mol_type = unassigned DNA
atgatgatgatgatgatgatgaaaaaaatgcagcatcaacggcagcagcaagcggaccacgcgaacgaggcaaactatgcaagaggcaccagacttcctctttctggtgaaggaccaacttctcagccgaatagctccaagcaaactgtcctgtcttggcaagctgcaatcgatgctgctagacaggccaaggctgcccaaactatgagcacctctgcacccccacctgtaggatctctctcccaaagaaaacgtcagcaatacgccaagagcaaaaaacagggtaactcgtccaacagccgacctgcccgcgcccttttctgtttatcactcaataaccccatccgaagagcctgcattagtatagtggaatggaaaccatttgacatatttatattattggctatttttgccaattgtgtggccttagctatttacatcccattccctgaagatgattctaattcaacaaatcataacttggaaaaagtagaatatgccttcctgattatttttacagtcgagacatttttgaagattatagcgtatggattattgctacatcctaatgcttatgttaggaatggatggaatttactggattttgttatagtaatagtaggattgtttagtgtaattttggaacaattaaccaaagaaacagaaggcgggaaccactcaagcggcaaatctggaggctttgatgtcaaagccctccgtgcctttcgagtgttgcgaccacttcgactagtgtcaggagtgcccagtttacaagttgtcctgaactccattataaaagccatggttcccctccttcacatagcccttttggtattatttgtaatcataatctatgctattataggattggaactttttattggaaaaatgcacaaaacatgtttttttgctgactcagatatcgtagctgaagaggacccagctccatgtgcgttctcagggaatggacgccagtgtactgccaatggcacggaatgtaggagtggctgggttggcccgaacggaggcatcaccaactttgataactttgcctttgccatgcttactgtgtttcagtgcatcaccatggagggctggacagatgtgctctactggatgaatgatgctatgggatttgaattgccctgggtgtattttgtcagtctcgtcatctttgggtcatttttcgtactaaatcttgtacttggtgtattgagcggagaattctcaaaggaaagagagaaggcaaaagcacggggagatttccagaagctccgggagaagcagcagctggaggaggatctaaagggctacttggattggatcacccaagctgaggacatcgatccggagaatgaggaagaaggaggagaggaaggcaaacgaaatactagcatgcccaccagcgagactgagtctgtgaacacagagaacgtcagcggtgaaggcgagaaccgaggctgctgtggaagtctctgtcaagccatctcaaaatccaaactcagccgacgctggcgtcgctggaaccgattcaatcgcagaagatgtagggccgccgtgaagtctgtcacgttttactggctggttatcgtcctggtgtttctgaacaccttaaccatttcctctgagcactacaatcagccagattggttgacacagattcaagatattgccaacaaagtcctcttggctctgttcacctgcgagatgctggtaaaaatgtacagcttgggcctccaagcatatttcgtctctcttttcaaccggtttgattgcttcgtggtgtgtggtggaatcactgagacgatcttggtggaactggaaatcatgtctcccctggggatctctgtgtttcggtgtgtgcgcctcttaagaatcttcaaagtgaccaggcactggacttccctgagcaacttagtggcatccttattaaactccatgaagtccatcgcttcgctgttgcttctgctttttctcttcattatcatcttttccttgcttgggatgcagctgtttggcggcaagtttaattttgatgaaacgcaaaccaagcggagcacctttgacaatttccctcaagcacttctcacagtgttccagatcctgacaggcgaagactggaatgctgtgatgtacgatggcatcatggcttacgggggcccatcctcttcaggaatgatcgtctgcatctacttcatcatcctcttcatttgtggtaactatattctactgaatgtcttcttggccatcgctgtagacaatttggctgatgctgaaagtctgaacactgctcagaaagaagaagcggaagaaaaggagaggaaaaagattgccagaaaagagagcctagaaaataaaaagaacaacaaaccagaagtcaaccagatagccaacagtgacaacaaggttacaattgatgactatagagaagaggatgaagacaaggacccctatccgccttgcgatgtgccagtaggggaagaggaagaggaagaggaggaggatgaacctgaggttcctgccggaccccgtcctcgaaggatctcggagttgaacatgaaggaaaaaattgcccccatccctgaagggagcgctttcttcattcttagcaagaccaacccgatccgcgtaggctgccacaagctcatcaaccaccacatcttcaccaacctcatccttgtcttcatcatgctgagcagcgctgccctggccgcagaggaccccatccgcagccactccttccggaacacgatactgggttactttgactatgccttcacagccatctttactgttgagatcctgttgaagatgacaacttttggagctttcctccacaaaggggccttctgcaggaactacttcaatttgctggatatgctggtggttggggtgtctctggtgtcatttgggattcaatccagtgccatctccgttgtgaagattctgagggtcttaagggtcctgcgtcccctcagggccatcaacagagcaaaaggacttaagcacgtggtccagtgcgtcttcgtggccatccggaccatcggcaacatcatgatcgtcaccaccctcctgcagttcatgtttgcctgtatcggggtccagttgttcaaggggaagttctatcgctgtacggatgaagccaaaagtaaccctgaagaatgcaggggacttttcatcctctacaaggatggggatgttgacagtcctgtggtccgtgaacggatctggcaaaacagtgatttcaacttcgacaacgtcctctctgctatgatggcgctcttcacagtctccacgtttgagggctggcctgcgttgctgtataaagccatcgactcgaatggagagaacatcggcccaatctacaaccaccgcgtggagatctccatcttcttcatcatctacatcatcattgtagctttcttcatgatgaacatctttgtgggctttgtcatcgttacatttcaggaacaaggagaaaaagagtataagaactgtgagctggacaaaaatcagcgtcagtgtgttgaatacgccttgaaagcacgtcccttgcggagatacatccccaaaaacccctaccagtacaagttctggtacgtggtgaactcttcgcctttcgaatacatgatgtttgtcctcatcatgctcaacacactctgcttggccatgcagcactacgagcagtccaagatgttcaatgatgccatggacattctgaacatggtcttcaccggggtgttcaccgtcgagatggttttgaaagtcatcgcatttaagcctaaggggtattttagtgacgcctggaacacgtttgactccctcatcgtaatcggcagcattatagacgtggccctcagcgaagcagacaactctgaagagagcaatagaatctccatcacctttttccgtcttttccgagtgatgcgattggtgaagcttctcagcaggggggaaggcatccggacattgctgtggacttttattaagtcctttcaggcgctcccgtatgtggccctcctcatagccatgctgttcttcatctatgcggtcattggcatgcagatgtttgggaaagttgccatgagagataacaaccagatcaataggaacaataacttccagacgtttccccaggcggtgctgctgctcttcaggtgtgcaacaggtgaggcctggcaggagatcatgctggcctgtctcccagggaagctctgtgaccctgagtcagattacaaccccggggaggagtatacatgtgggagcaactttgccattgtctatttcatcagtttttacatgctctgtgcatttctgatcatcaatctgtttgtggctgtcatcatggataatttcgactatctgacccgggactggtctattttggggcctcaccatttagatgaattcaaaagaatatggtcagaatatgaccctgaggcaaagggaaggataaaacaccttgatgtggtcactctgcttcgacgcatccagcctcccctggggtttgggaagttatgtccacacagggtagcgtgcaagagattagttgccatgaacatgcctctcaacagtgacgggacagtcatgtttaatgcaaccctgtttgctttggttcgaacggctcttaagatcaagaccgaagggaacctggagcaagctaatgaagaacttcgggctgtgataaagaaaatttggaagaaaaccagcatgaaattacttgaccaagttgtccctccagctggtgatgatgaggtaaccgtggggaagttctatgccactttcctgatacaggactactttaggaaattcaagaaacggaaagaacaaggactggtgggaaagtaccctgcgaagaacaccacaattgccctacaggcgggattaaggacactgcatgacattgggccagaaatccggcgtgctatatcgtgtgatttgcaagatgacgagcctgaggaaacaaaacgagaagaagaagatgatgtgttcaaaagaaatggtgccctgcttggaaaccatgtcaatcatgttaatagtgataggagagattcccttcagcagaccaataccacccaccgtcccctgcatgtccaaaggccttcaattccacctgcaagtgatactgagaaaccgctgtttcctccagcaggaaattcggtgtgtcataaccatcataaccataattccataggaaagcaagttcccacctcaacaaatgccaatctcaataatgccaatatgtccaaagctgcccatggaaagcggcccagcattgggaaccttgagcatgtgtctgaaaatgggcatcattcttcccacaagcatgaccgggagcctcagagaaggtccagtgtgaaaaggtccgactcaggagatgaacagctcccaactatttgccgggaagacccagagatacatggctatttcagggacccccactgcttgggggagcaggagtatttcagtagtgaggaatgctacgaggatgacagctcgcccacctggagcaggcaaaactatggctactacagcagatacccaggcagaaacatcgactctgagaggccccgaggctaccatcatccccaaggattcttggaggacgatgactcgcccgtttgctatgattcacggagatctccaaggagacgcctactacctcccaccccagcatcccaccggagatcctccttcaactttgagtgcctgcgccggcagagcagccaggaagaggtcccgtcgtctcccatcttcccccatcgcacggccctgcctctgcatctaatgcagcaacagatcatggcagttgccggcctagattcaagtaaagcccagaagtactcaccgagtcactcgacccggtcgtgggccacccctccagcaacccctccctaccgggactggacaccgtgctacacccccctgatccaagtggagcagtcagaggccctggaccaggtgaacggcagcctgccgtccctgcaccgcagctcctggtacacagacgagcccgacatctcctaccggactttcacaccagccagcctgactgtccccagcagcttccggaacaaaaacagcgacaagcagaggagtgcggacagcttggtggaggcagtcctgatatccgaaggcttgggacgctatgcaagggacccaaaatttgtgtcagcaacaaaacacgaaatcgctgatgcctgtgacctcaccatcgacgagatggagagtgcagccagcaccctgcttaatgggaacgtgcgtccccgagccaacggggatgtgggccccctctcacaccggcaggactatgagctacaggactttggtcctggctacagcgacgaagagccagaccctgggagggatgaggaggacctggcggatgaaatgatatgcatcaccaccttgtag

SEQ ID NO: 4191 - DNA, 5667 bp, Homo sapiens
  source 1..5667: mol_type = unassigned DNA
gccaatggcacggaatgtaggagtggctgggttggcccgaacggaggcatcaccaactttgataactttgcctttgccatgcttactgtgtttcagtgcatcaccatggagggctggacagatgtgctctactggatgaatgatgctatgggatttgaattgccctgggtgtattttgtcagtctcgtcatctttgggtcatttttcgtactaaatcttgtacttggtgtattgagcggagaattctcaaaggaaagagagaaggcaaaagcacggggagatttccagaagctccgggagaagcagcagctggaggaggatctaaagggctacttggattggatcacccaagctgaggacatcgatccggagaatgaggaagaaggaggagaggaaggcaaacgaaatactagcatgcccaccagcgagactgagtctgtgaacacagagaacgtcagcggtgaaggcgagaaccgaggctgctgtggaagtctctggtgctggtggagacggagaggcgcggccaaggcggggccctctgggtgtcggcggtggggtcaagccatctcaaaatccaaactcagccgacgctggcgtcgctggaaccgattcaatcgcagaagatgtagggccgccgtgaagtctgtcacgttttactggctggttatcgtcctggtgtttctgaacaccttaaccatttcctctgagcactacaatcagccagattggttgacacagattcaagatattgccaacaaagtcctcttggctctgttcacctgcgagatgctggtaaaaatgtacagcttgggcctccaagcatatttcgtctctcttttcaaccggtttgattgcttcgtggtgtgtggtggaatcactgagacgatcttggtggaactggaaatcatgtctcccctggggatctctgtgtttcggtgtgtgcgcctcttaagaatcttcaaagtgaccaggcactggacttccctgagcaacttagtggcatccttattaaactccatgaagtccatcgcttcgctgttgcttctgctttttctcttcattatcatcttttccttgcttgggatgcagctgtttggcggcaagtttaattttgatgaaacgcaaaccaagcggagcacctttgacaatttccctcaagcacttctcacagtgttccagatcctgacaggcgaagactggaatgctgtgatgtacgatggcatcatggcttacgggggcccatcctcttcaggaatgatcgtctgcatctacttcatcatcctcttcatttgtggtaactatattctactgaatgtcttcttggccatcgctgtagacaatttggctgatgctgaaagtctgaacactgctcagaaagaagaagcggaagaaaaggagaggaaaaagattgccagaaaagagagcctagaaaataaaaagaacaacaaaccagaagtcaaccagatagccaacagtgacaacaaggttacaattgatgactatagagaagaggatgaagacaaggacccctatccgccttgcgatgtgccagtaggggaagaggaagaggaagaggaggaggatgaacctgaggttcctgccggaccccgtcctcgaaggatctcggagttgaacatgaaggaaaaaattgcccccatccctgaagggagcgctttcttcattcttagcaagaccaacccgatccgcgtaggctgccacaagctcatcaaccaccacatcttcaccaacctcatccttgtcttcatcatgctgagcagcgctgccctggccgcagaggaccccatccgcagccactccttccggaacacgatactgggttactttgactatgccttcacagccatctttactgttgagatcctgttgaagatgacaacttttggagctttcctccacaaaggggccttctgcaggaactacttcaatttgctggatatgctggtggttggggtgtctctggtgtcatttgggattcaatccagtgccatctccgttgtgaagattctgagggtcttaagggtcctgcgtcccctcagggccatcaacagagcaaaaggacttaagcacgtggtccagtgcgtcttcgtggccatccggaccatcggcaacatcatgatcgtcaccaccctcctgcagttcatgtttgcctgtatcggggtccagttgttcaaggggaagttctatcgctgtacggatgaagccaaaagtaaccctgaagaatgcaggggacttttcatcctctacaaggatggggatgttgacagtcctgtggtccgtgaacggatctggcaaaacagtgatttcaacttcgacaacgtcctctctgctatgatggcgctcttcacagtctccacgtttgagggctggcctgcgttgctgtataaagccatcgactcgaatggagagaacatcggcccaatctacaaccaccgcgtggagatctccatcttcttcatcatctacatcatcattgtagctttcttcatgatgaacatctttgtgggctttgtcatcgttacatttcaggaacaaggagaaaaagagtataagaactgtgagctggacaaaaatcagcgtcagtgtgttgaatacgccttgaaagcacgtcccttgcggagatacatccccaaaaacccctaccagtacaagttctggtacgtggtgaactcttcgcctttcgaatacatgatgtttgtcctcatcatgctcaacacactctgcttggccatgcagcactacgagcagtccaagatgttcaatgatgccatggacattctgaacatggtcttcaccggggtgttcaccgtcgagatggttttgaaagtcatcgcatttaagcctaagcactatttcactgatgcatggaacacttttgatgccttaattgttgttggtagcgtcgttgatattgctataactgaagtgaatccaactgaaagtgaaaatgtccctgtcccaactgctacacctgggaactctgaagagagcaatagaatctccatcacctttttccgtcttttccgagtgatgcgattggtgaagcttctcagcaggggggaaggcatccggacattgctgtggacttttattaagtcctttcaggcgctcccgtatgtggccctcctcatagccatgctgttcttcatctatgcggtcattggcatgcagatgtttgggaaagttgccatgagagataacaaccagatcaataggaacaataacttccagacgtttccccaggcggtgctgctgctcttcaggtgtgcaacaggtgaggcctggcaggagatcatgctggcctgtctcccagggaagctctgtgaccctgagtcagattacaaccccggggaggagtatacatgtgggagcaactttgccattgtctatttcatcagtttttacatgctctgtgcatttctgatcatcaatctgtttgtggctgtcatcatggataatttcgactatctgacccgggactggtctattttggggcctcaccatttagatgaattcaaaagaatatggtcagaatatgaccctgaggcaaagggaaggataaaacaccttgatgtggtcactctgcttcgacgcatccagcctcccctggggtttgggaagttatgtccacacagggtagcgtgcaagagattagttgccatgaacatgcctctcaacagtgacgggacagtcatgtttaatgcaaccctgtttgctttggttcgaacggctcttaagatcaagaccgaagggaacctggagcaagctaatgaagaacttcgggctgtgataaagaaaatttggaagaaaaccagcatgaaattacttgaccaagttgtccctccagctggtgatgatgaggtaaccgtggggaagttctatgccactttcctgatacaggactactttaggaaattcaagaaacggaaagaacaaggactggtgggaaagtaccctgcgaagaacaccacaattgccctacaggcgggattaaggacactgcatgacattgggccagaaatccggcgtgctatatcgtgtgatttgcaagatgacgagcctgaggaaacaaaacgagaagaagaagatgatgtgttcaaaagaaatggtgccctgcttggaaaccatgtcaatcatgttaatagtgataggagagattcccttcagcagaccaataccacccaccgtcccctgcatgtccaaaggccttcaattccacctgcaagtgatactgagaaaccgctgtttcctccagcaggaaattcggtgtgtcataaccatcataaccataattccataggaaagcaagttcccacctcaacaaatgccaatctcaataatgccaatatgtccaaagctgcccatggaaagcggcccagcattgggaaccttgagcatgtgtctgaaaatgggcatcattcttcccacaagcatgaccgggagcctcagagaaggtccagtgtgaaaagaacccgctattatgaaacttacattaggtccgactcaggagatgaacagctcccaactatttgccgggaagacccagagatacatggctatttcagggacccccactgcttgggggagcaggagtatttcagtagtgaggaatgctacgaggatgacagctcgcccacctggagcaggcaaaactatggctactacagcagatacccaggcagaaacatcgactctgagaggccccgaggctaccatcatccccaaggattcttggaggacgatgactcgcccgtttgctatgattcacggagatctccaaggagacgcctactacctcccaccccagcatcccaccggagatcctccttcaactttgagtgcctgcgccggcagagcagccaggaagaggtcccgtcgtctcccatcttcccccatcgcacggccctgcctctgcatctaatgcagcaacagatcatggcagttgccggcctagattcaagtaaagcccagaagtactcaccgagtcactcgacccggtcgtgggccacccctccagcaacccctccctaccgggactggacaccgtgctacacccccctgatccaagtggagcagtcagaggccctggaccaggtgaacggcagcctgccgtccctgcaccgcagctcctggtacacagacgagcccgacatctcctaccggactttcacaccagccagcctgactgtccccagcagcttccggaacaaaaacagcgacaagcagaggagtgcggacagcttggtggaggcagtcctgatatccgaaggcttgggacgctatgcaagggacccaaaatttgtgtcagcaacaaaacacgaaatcgctgatgcctgtgacctcaccatcgacgagatggagagtgcagccagcaccctgcttaatgggaacgtgcgtccccgagccaacggggatgtgggccccctctcacaccggcaggactatgagctacaggactttggtcctggctacagcgacgaagagccagaccctgggagggatgaggaggacctggcggatgaaatgatatgcatcaccaccttgtagcccccagcgaggggcagactggctctggcctcaggtggggcgcaggagagccaggggaaaagtgcctcatagttaggaaagtttaggcactagttgggagta

SEQ ID NO: 4192 - DNA, 1830 bp, Homo sapiens
  source 1..1830: mol_type = unassigned DNA
ctcttagtgctggctgtttgggcctgaggctgatgggagagacctggttgtgtccagcagccttggggttgctgtataaagccatcgactcgaatggagagaacatcggcccaatctacaaccaccgcgtggagatctccatcttcttcatcatctacatcatcattgtagctttcttcatgatgaacatctttgtgggctttgtcatcgttacatttcaggaacaaggagaaaaagagtataagaactgtgagctggacaaaaatcagcgtcagtgtgttgaatacgccttgaaagcacgtcccttgcggagatacatccccaaaaacccctaccagtacaagttctggtacgtggtgaactcttcgcctttcgaatacatgatgtttgtcctcatcatgctcaacacactctgcttggccatgcagcactacgagcagtccaagatgttcaatgatgccatggacattctgaacatggtcttcaccggggtgttcaccgtcgagatggttttgaaagtcatcgcatttaagcctaaggggtattttagtgacgcctggaacacgtttgactccctcatcgtaatcggcagcattatagacgtggccctcagcgaagcagacaactctgaagagagcaatagaatctccatcacctttttccgtcttttccgagtgatgcgattggtgaagcttctcagcaggggggaaggcatccggacattgctgtggacttttattaagtcctttcaggcgctcccgtatgtggccctcctcatagccatgctgttcttcatctatgcggtcattggcatgcagatgtttgggaaagttgccatgagagataacaaccagatcaataggaacaataacttccagacgtttccccaggcggtgctgctgctcttcaggtgtgcaacaggtgaggcctggcaggagatcatgctggcctgtctcccagggaagctctgtgaccctgagtcagattacaaccccggggaggagtatacatgtgggagcaactttgccattgtctatttcatcagtttttacatgctctgtgcatttctgatcatcaatctgtttgtggctgtcatcatggataatttcgactatctgacccgggactggtctattttggggcctcaccatttagatgaattcaaaagaatatggtcagaatatgaccctgaggcaaagggaaggataaaacaccttgatgtggtcactctgcttcgacgcatccagcctcccctggggtttgggaagttatgtccacacagggtagcgtgcaagagattagttgccatgaacatgcctctcaacagtgacgggacagtcatgtttaatgcaaccctgtttgctttggttcgaacggctcttaagatcaagaccgaagggaacctggagcaagctaatgaagaacttcgggctgtgataaagaaaatttggaagaaaaccagcatgaaattacttgaccaagttgtccctccagctggtgatgatgaggtaaccgtggggaagttctatgccactttcctgatacaggactactttaggaaattcaagaaacggaaagaacaaggactggtgggaaagtaccctgcgaagaacaccacaattgccctacagatgcttgaacggatgctttagaattttctgcctgagctacggcaccaagctggttagtcggaaggcgtttgtggctaaggccttgaaagggaaaagtctcaagtgggcttatttctactgaaacagcatttcagaagaaatgcaggaaaaagcagacccaaggccccagggagaccccttccaagcaaagcactcctcc

SEQ ID NO: 4193 - DNA, 1749 bp, Homo sapiens
  source 1..1749: mol_type = unassigned DNA
aatctcattctgttttctaatggaactagtctaaaaaggtcccctctcattgggtatagactgaatcctgctaaagggttaaccagaacttgtcaccagcgagacgactgtgtgcagggccagcctaggctgagtgcagcctgcctgtgatggggaacaggctctgccaggcagggttctttggctggagtctcaaagcctggcgcttgtatcctgaagatgaatggcctggcccagtcccgactagagacatgcatctcttatctccactgctacagcgcgggattaaggacactgcatgacattgggccagaaatccggcgtgctatatcgtgtgatttgcaagatgacgagcctgaggaaacaaaacgagaagaagaagatgatgtgttcaaaagaaatggtgccctgcttggaaaccatgtcaatcatgttaatagtgataggagagattcccttcagcagaccaataccacccaccgtcccctgcatgtccaaaggccttcaattccacctgcaagtgatactgagaaaccgctgtttcctccagcaggaaattcggtgtgtcataaccatcataaccataattccataggaaagcaagttcccacctcaacaaatgccaatctcaataatgccaatatgtccaaagctgcccatggaaagcggcccagcattgggaaccttgagcatgtgtctgaaaatgggcatcattcttcccacaagcatgaccgggagcctcagagaaggtccagtgtgaaaagaacccgctattatgaaacttacattaggtccgactcaggagatgaacagctcccaactatttgccgggaagacccagagatacatggctatttcagggacccccactgcttgggggagcaggagtatttcagtagtgaggaatgctacgaggatgacagctcgcccacctggagcaggcaaaactatggctactacagcagatacccaggcagaaacatcgactctgagaggccccgaggctaccatcatccccaaggattcttggaggacgatgactcgcccgtttgctatgattcacggagatctccaaggagacgcctactacctcccaccccagcatcccaccggagatcctccttcaactttgagtgcctgcgccggcagagcagccaggaagaggtcccgtcgtctcccatcttcccccatcgcacggccctgcctctgcatctaatgcagcaacagtcccctctttcctcagatcatggcagttgccggcctagattcaagtaaagcccagaagtactcaccgagtcactcgacccggtcgtgggccacccctccagcaacccctccctaccgggactggacaccgtgctacacccccctgatccaagtggagcagtcagaggccctggaccaggtgaacggcagcctgccgtccctgcaccgcagctcctggtacacagacgagcccgacatctcctaccggactttcacaccagccagcctgactgtccccagcagcttccggaacaaaaacagcgacaagcagaggagtgcggacagcttggtggaggcagtcctgatatccgaaggcttgggacgctatgcaagggacccaaaatttgtgtcagcaacaaaacacgaaatcgctgatgcctgtgacctcaccatcgacgagatggagagtgcagccagcaccctgcttaatgggaacgtgcgtccccgagccaacggggatgtgggccccctctcacaccggca

SEQ ID NO: 4194 - DNA, 6037 bp, Homo sapiens
  source 1..6037: mol_type = unassigned DNA
ctccaaagctgggggaagagaggggggttgtgtgcagatggcccttcaatctcgaaagaaagatgtcggaatctgaaggcgggaaagacaccaccccagagcccagtccagccaatggggcaggccctggtcccgaatgggggctgtgccccgggcccccagctgtggaaggtgaaagcagtggggcatcaggcctagggacccctaagcgaagaaaccagcacagcaagcacaagacagtggcagtggccagtgcccagcggtcacctcgggcactcttctgcctcaccctggccaatcctctgcgacggtcctgcatcagcatcgtggagtggaagcccttcgacatcctcatcctgctgaccatctttgccaactgcgtggccctgggagtttacatccccttccctgaggacgactccaacactgccaaccacaacctggagcaggtggagtacgtattcctggtgattttcactgtggagacggtgctcaagatcgtggcctacgggctggtgctccaccccagcgcctacatccgcaatggctggaacctactcgacttcatcatcgtcgtggtcgggctgttcagcgttctgctggagcagggccccggacggccaggcgacgccccgcacaccgggggaaagccaggaggcttcgatgtgaaggcattgagggcgtttcgggtgctgcggccactgaggctggtgtctggggtcccgagcctgcacatagtgctcaattccatcatgaaggctctggtgccgctgctgcacattgcactgctcgtgctcttcgtcatcatcatttatgccatcattgggctcgagctgttccttggacgaatgcacaagacgtgctacttcctgggatccgacatggaagcggaggaggacccatcgccctgtgcgtcttcgggatcagggcgtgcgtgcacgctgaaccagactgagtgccgcgggcgctggccagggcccaatggaggcatcaccaactttgacaacttcttcttcgccatgctgacagtcttccagtgtgtcaccatggaaggctggaccgatgtgctctactggatgcaagatgccatggggtatgaactgccctgggtgtactttgtgagccttgtcatctttgggtccttcttcgtcctcaaccttgtgcttggcgtcctgagtggggagttctccaaggagagagagaaagcgaaagctcgcggggacttccagaagcagcgggagaagcagcagatggaggaagacctgcggggctacctggactggatcactcaagccgaagagctggacatggaggacccctccgccgatgacaaccttgggccacagctggccgagctgaccaataggaggcgtggacgtctgcgctggttcagtcattctactcgctccacacactccaccagcagccatgccagcctcccagccagtgacaccggttccatgacagagacccaaggcgatgaggatgaggaggagggggctctggccagctgtacacgctgcctaaacaagatcatgaaaaccagagtctgccgccgcctccgccgagccaaccgggtccttcgggcacgctgccgtcgggcagtgaagtccaatgcctgctactgggctgtgctgttgctcgtcttcctcaacacgttgaccatcgcctctgagcaccacgggcagcctgtgtggctcacccagatccaggagtatgccaacaaagtgttgctctgtctgttcacggtggagatgcttctcaaattgtacggtctgggcccctctgcctatgtgtcttccttcttcaaccgctttgactgctttgtggtctgtgggggcatcctagagaccaccttggtggaggtgggcgccatgcagcccttgggcatctcagtgctccgatgtgtgcgcctcctcaggatctttaaggtcaccagacactgggcttctctgagcaatctggtggcatccctgctcaattcaatgaaatccatcgcatccttgctgcttctcctcttcctcttcatcattatcttctccctgcttggcatgcagctgtttgggggcaagttcaactttgaccagacccacaccaagcgaagcacctttgacacgttcccccaggccctcctcactgtctttcagatcctgacaggtgaggactggaacgtggtcatgtatgatggtatcatggcatatggtggccccttcttcccaggaatgttggtgtgcatctatttcatcattctcttcatctgtggcaactacatcctgttgaacgtgtttcttgccattgctgtggacaacctggccagtggagatgcaggcactgccaaggacaagggcggggagaagagcaatgagaaggatctcccacaggagaatgaaggcctggtgcctggtgtggagaaagaggaagaggagggtgcaaggagggaaggagcagacatggaggaggaggaggaggaggaagaagaggaagaagaggaagaagaggaagagggtgcagggggtgtggaactcctgcaggaagttgtacccaaggagaaggtggtacccatccctgagggcagcgccttcttctgcctcagccaaaccaacccgctgaggaagggctgccacaccctcatccaccatcatgtcttcaccaatcttatcctggtgttcatcatcctcagcagtgtgtccctggccgctgaggaccccatccgagcccactccttccgcaaccatattctgggttacttcgattatgccttcacctccattttcactgtggagattctactaaagatgacagtgtttggggccttcctgcaccgcggctccttctgccgtagctggtttaatatgttggatctgctggtggtcagtgtgtccctcatctcctttggcatccactccagcgccatctcggtggtgaagattctgcgagtactccgagtactgcggcccctccgagccatcaacagggccaagggactcaagcatgtggtgcagtgtgtatttgtggccatccggaccatcggaaacatcatgattgtcaccacacttctgcaatttatgttcgcctgcatcggggtgcagctcttcaaggggaaattctacacctgcacggacgaggccaaacacacccctcaagaatgcaagggctccttcctggtatacccagatggagacgtgtcacggcccctggtccgggagcggctctgggtcaacagtgatttcaactttgacaatgtcctttcagccatgatggccctgttcactgtctccacctttgaaggctggcctgcactgctatacaaggccatcgatgcatatgcagaggaccatggccccatctataattaccgtgtggagatctcagtgttcttcattgtctacatcatcatcattgcgttcttcatgatgaacatcttcgtgggcttcgtcatcatcactttccgtgcccagggcgagcaggagtaccaaaactgtgagctggacaagaaccagcgtcaatgtgtggaatatgccctcaaggcccagccactccgccgttacatccccaagaacccgcatcagtatcgtgtgtgggccactgtgaactctgctgcctttgagtacctgatgttcctgctcatcctgctcaacacagttgccctagccatgcagcactatgagcagactgctcccttcaactatgccatggacatcctcaacatggtcttcactggcctcttcactattgagatggtgctcaaaatcatcgccttcaagcccaagcattacttcactgatgcctggaacacgtttgacgctcttattgtggtgggcagcatagtggatattgccgtcactgaagtcaataatggtggccaccttggcgagagctctgaggacagctcccgcatttccattaccttctttcgcctcttccgagttatgcggctggtcaagcttctcagtaagggtgaagggatccgcacattgctctggacattcatcaagtccttccaggccttgccctatgtggctcttctcatcgcaatgatattcttcatctatgccgtcattggcatgcagatgttcggcaaggtggctcttcaggatggcacacagataaaccgaaacaacaacttccagacctttccacaggctgtgctgcttctgttcaggtgtgccactggtgaggcatggcaggagataatgcttgccagccttcccggaaatcggtgtgatcctgagtctgacttcggccctggtgaagagtttacctgtggtagcaattttgccatcgcctatttcatcagcttcttcatgctctgtgccttcctgatcataaatctctttgtggctgtgatcatggacaactttgattatctcaccagagattggtccatcctgggcccccatcaccttgatgaattcaagaggatctggtctgaatatgaccctggggccaagggccgcatcaaacacttggatgtggttgccctgctgagacgtatccagccccctctgggatttgggaagctgtgcccacaccgagtggcctgcaagagacttgtggcaatgaacatgcccctcaactcagatgggacggtgacattcaacgccacactctttgccctggtccggacatccctgaagatcaaaacagaagggaacctggagcaagccaaccaggagctgcggattgtcatcaaaaagatctggaagcggatgaaacagaagctgctagatgaggtcatccccccaccagacgaggaggaggtcaccgtgggcaaattctacgccacatttctgatccaggactatttccgcaaattccggcggaggaaagaaaaagggctactaggcaacgacgccgcccctagcacctcttccgcccttcaggctggtctgcggagcctgcaggacttgggtcctgagatgcggcaggccctcacctgtgacacagaggaggaggaagaagaggggcaggagggagtggaggaggaagatgaaaaggacttggaaactaacaaagccacgatggtctcccagccctcagctcgccggggctccgggatttctgtgtctctgcctgtcggggacagacttccagattcactctcctttgggcccagtgatgatgacagggggactcccacctccagtcagcccagtgtgccccaggctggatccaacacccacaggagaggctctggggctctcattttcaccatcccagaagaaggaaattctcagcccaagggaaccaaagggcaaaacaagcaagatgaggatgaggaagtccctgatcggctttcctacctagatgagcaggcagggactcccccgtgctcagtccttttgccacctcacagagctcagagatacatggatgggcacctggtaccacgccgccgtctgctgccccccacacctgcaggtcggaagccctccttcaccatccagtgtctgcagcgccagggcagttgtgaggatttacccatcccaggcacctatcatcgtgggcgaaattcagggcccaatagggctcagggttcctgggcaacaccacctcagcggggtcggctcctgtatgccccgctgttgttggtggaagagggcgcagcgggggaggggtacctcggcagatccagtggcccactgcgcaccttcacctgtctgcacgtgcctggaacccactcggaccccagccatgggaagaggggcagtgccgacagcttggtggaggctgtgcttatctcagagggtctgggcctctttgctcgagacccacgtttcgtggccctggccaagcaggagattgcagatgcgtgtcgcctgacgctggatgagatggacaatgctgccagtgacctgctggcacagggaaccagctctctctatagcgacgaggagtccatcctctcccgcttcgatgaggaggacttgggagacgagatggcctgcgtccacgccctctgaattcccacccctccccaactgctcaataaacctcctgccctcccctccccagcaggaggcaggcatggaccaca

SEQ ID NO: 4195 - DNA, 5813 bp, Homo sapiens
  source 1..5813: mol_type = unassigned DNA
atgtcggaatctgaaggcgggaaaggtgagagaatccttccatccctgcagacccttggagcaagcatcgtggagtggaagcccttcgacatcctcatcctgctgaccatctttgccaactgcgtggccctgggagtttacatccccttccctgaggacgactccaacactgccaaccacaacctggagcaggtggagtacgtattcctggtgattttcactgtggagacggtgctcaagatcgtggcctacgggctggtgctccaccccagcgcctacatccgcaatggctggaacctactcgacttcatcatcgtcgtggtcgggctgttcagcgttctgctggagcagggccccggacggccaggcgacgccccgcacaccgggggaaagccaggaggcttcgatgtgaaggcattgagggcgtttcgggtgctgcggccactgaggctggtgtctggggtcccgagcctgcacatagtgctcaattccatcatgaaggctctggtgccgctgctgcacattgcactgctcgtgctcttcgtcatcatcatttatgccatcattgggctcgagctgttccttggacgaatgcacaagacgtgctacttcctgggatccgacatggaagcggaggaggacccatcgccctgtgcgtcttcgggatcagggcgtgcgtgcacgctgaaccagactgagtgccgcgggcgctggccagggcccaatggaggcatcaccaactttgacaacttcttcttcgccatgctgacagtcttccagtgtgtcaccatggaaggctggaccgatgtgctctactggatgcaagatgccatggggtatgaactgccctgggtgtactttgtgagccttgtcatctttgggtccttcttcgtcctcaaccttgtgcttggcgtcctgagtggggagttctccaaggagagagagaaagcgaaagctcgcggggacttccagaagcagcgggagaagcagcagatggaggaagacctgcggggctacctggactggatcactcaagccgaagagctggacatggaggacccctccgccgatgacaaccttggttctatggctgaagagggccgggcgggccatcggccacagctggccgagctgaccaataggaggcgtggacgtctgcgctggttcagtcattctactcgctccacacactccaccagcagccatgccagcctcccagccagtgacaccggttccatgacagagacccaaggcgatgaggatgaggaggagggggctctggccagctgtacacgctgcctaaacaagatcatgaaaaccagagtctgccgccgcctccgccgagccaaccgggtccttcgggcacgctgccgtcgggcagtgaagtccaatgcctgctactgggctgtgctgttgctcgtcttcctcaacacgttgaccatcgcctctgagcaccacgggcagcctgtgtggctcacccagatccaggagtatgccaacaaagtgttgctctgtctgttcacggtggagatgcttctcaaattgtacggtctgggcccctctgcctatgtgtcttccttcttcaaccgctttgactgctttgtggtctgtgggggcatcctagagaccaccttggtggaggtgggcgccatgcagcccttgggcatctcagtgctccgatgtgtgcgcctcctcaggatctttaaggtcaccagacactgggcttctctgagcaatctggtggcatccctgctcaattcaatgaaatccatcgcatccttgctgcttctcctcttcctcttcatcattatcttctccctgcttggcatgcagctgtttgggggcaagttcaactttgaccagacccacaccaagcgaagcacctttgacacgttcccccaggccctcctcactgtctttcagatcctgacaggtgaggactggaacgtggtcatgtatgatggtatcatggcatatggtggccccttcttcccaggaatgttggtgtgcatctatttcatcattctcttcatctgtggcaactacatcctgttgaacgtgtttcttgccattgctgtggacaacctggccagtggagatgcaggcactgccaaggacaagggcggggagaagagcaatgagaaggatctcccacaggagaatgaaggcctggtgcctggtgtggagaaagaggaagaggagggtgcaaggagggaaggagcagacatggaggaggaggaggaggaggaagaagaggaagaagaggaagaagaggaagagggtgcagggggtgtggaactcctgcaggaagttgtacccaaggagaaggtggtacccatccctgagggcagcgccttcttctgcctcagccaaaccaacccgctgaggaagggctgccacaccctcatccaccatcatgtcttcaccaatcttatcctggtgttcatcatcctcagcagtgtgtccctggccgctgaggaccccatccgagcccactccttccgcaaccatattctgggttacttcgattatgccttcacctccattttcactgtggagattctactaaagatgacagtgtttggggccttcctgcaccgcggctccttctgccgtagctggtttaatatgttggatctgctggtggtcagtgtgtccctcatctcctttggcatccactccagcgccatctcggtggtgaagattctgcgagtactccgagtactgcggcccctccgagccatcaacagggccaagggactcaagcatgtggtgcagtgtgtatttgtggccatccggaccatcggaaacatcatgattgtcaccacacttctgcaatttatgttcgcctgcatcggggtgcagctcttcaaggggaaattctacacctgcacggacgaggccaaacacacccctcaagaatgcaagggctccttcctggtatacccagatggagacgtgtcacggcccctggtccgggagcggctctgggtcaacagtgatttcaactttgacaatgtcctttcagccatgatggccctgttcactgtctccacctttgaaggctggcctgcactgctatacaaggccatcgatgcatatgcagaggaccatggccccatctataattaccgtgtggagatctcagtgttcttcattgtctacatcatcatcattgcgttcttcatgatgaacatcttcgtgggcttcgtcatcatcactttccgtgcccagggcgagcaggagtaccaaaactgtgagctggacaagaaccagcgtcaatgtgtggaatatgccctcaaggcccagccactccgccgttacatccccaagaacccgcatcagtatcgtgtgtgggccactgtgaactctgctgcctttgagtacctgatgttcctgctcatcctgctcaacacagttgccctagccatgcagcactatgagcagactgctcccttcaactatgccatggacatcctcaacatggtcttcactggcctcttcactattgagatggtgctcaaaatcatcgccttcaagcccaagcattacttcactgatgcctggaacacgtttgacgctcttattgtggtgggcagcatagtggatattgccgtcactgaagtcaataatggtggccaccttggcgagagctctgaggacagctcccgcatttccattaccttctttcgcctcttccgagttatgcggctggtcaagcttctcagtaagggtgaagggatccgcacattgctctggacattcatcaagtccttccaggccttgccctatgtggctcttctcatcgcaatgatattcttcatctatgccgtcattggcatgcagatgttcggcaaggtggctcttcaggatggcacacagataaaccgaaacaacaacttccagacctttccacaggctgtgctgcttctgttcaggtgtgccactggtgaggcatggcaggagataatgcttgccagccttcccggaaatcggtgtgatcctgagtctgacttcggccctggtgaagagtttacctgtggtagcaattttgccatcgcctatttcatcagcttcttcatgctctgtgccttcctgatcataaatctctttgtggctgtgatcatggacaactttgattatctcaccagagattggtccatcctgggcccccatcaccttgatgaattcaagaggatctggtctgaatatgaccctggggccaagggccgcatcaaacacttggatgtggttgccctgctgagacgtatccagccccctctgggatttgggaagctgtgcccacaccgagtggcctgcaagagacttgtggcaatgaacatgcccctcaactcagatgggacggtgacattcaacgccacactctttgccctggtccggacatccctgaagatcaaaacagaagggaacctggagcaagccaaccaggagctgcggattgtcatcaaaaagatctggaagcggatgaaacagaagctgctagatgaggtcatccccccaccagacgaggaggaggtcaccgtgggcaaattctacgccacatttctgatccaggactatttccgcaaattccggcggaggaaagaaaaagggctactaggcaacgacgccgcccctagcacctcttccgcccttcaggctggtctgcggagcctgcaggacttgggtcctgagatgcggcaggccctcacctgtgacacagaggaggaggaagaagaggggcaggagggagtggaggaggaagatgaaaaggacttggaaactaacaaagccacgatggtctcccagccctcagctcgccggggctccgggatttctgtgtctctgcctgtcggggacagacttccagattcactctcctttgggcccagtgatgatgacagggggactcccacctccagtcagcccagtgtgccccaggctggatccaacacccacaggagaggctctggggctctcattttcaccatcccagaagaaggaaattctcagcccaagggaaccaaagggcaaaacaagcaagatgaggatgaggaagtccctgatcggctttcctacctagatgagcaggcagggactcccccgtgctcagtccttttgccacctcacagagctcagagatacatggatgggcacctggtaccacgccgccgtctgctgccccccacacctgcaggtcggaagccctccttcaccatccagtgtctgcagcgccagggcagttgtgaggatttacccatcccaggcacctatcatcgtgggcgaaattcagggcccaatagggctcagggttcctgggcaacaccacctcagcggggtcggctcctgtatgccccgctgttgttggtggaagagggcgcagcgggggaggggtacctcggcagatccagtggcccactgcgcaccttcacctgtctgcacgtgcctggaacccactcggaccccagccatgggaagaggggcagtgccgacagcttggtggaggctgtgcttatctcagagggtctgggcctctttgctcgagacccacgtttcgtggccctggccaagcaggagattgcagatgcgtgtcgcctgacgctggatgagatggacaatgctgccagtgacctgctggcacagggaaccagctctctctatagcgacgaggagtccatcctctcccgcttcgatgaggaggacttgggagacgagatggcctgcgtccacgccctctgaattcccacccctccccaactgctcaataaacctcctgccctcccctccccagcaggaggcaggcatggaccaca

SEQ ID NO: 4196 - DNA, 6070 bp, Homo sapiens
  source 1..6070: mol_type = unassigned DNA
ctccaaagctgggggaagagaggggggttgtgtgcagatggcccttcaatctcgaaagaaagatgtcggaatctgaaggcgggaaagacaccaccccagagcccagtccagccaatggggcaggccctggtcccgaatgggggctgtgccccgggcccccagctgtggaaggtgaaagcagtggggcatcaggcctagggacccctaagcgaagaaaccagcacagcaagcacaagacagtggcagtggccagtgcccagcggtcacctcgggcactcttctgcctcaccctggccaatcctctgcgacggtcctgcatcagcatcgtggagtggaagcccttcgacatcctcatcctgctgaccatctttgccaactgcgtggccctgggagtttacatccccttccctgaggacgactccaacactgccaaccacaacctggagcaggtggagtacgtattcctggtgattttcactgtggagacggtgctcaagatcgtggcctacgggctggtgctccaccccagcgcctacatccgcaatggctggaacctactcgacttcatcatcgtcgtggtcgggctgttcagcgttctgctggagcagggccccggacggccaggcgacgccccgcacaccgggggaaagccaggaggcttcgatgtgaaggcattgagggcgtttcgggtgctgcggccactgaggctggtgtctggggtcccgagcctgcacatagtgctcaattccatcatgaaggctctggtgccgctgctgcacattgcactgctcgtgctcttcgtcatcatcatttatgccatcattgggctcgagctgttccttggacgaatgcacaagacgtgctacttcctgggatccgacatggaagcggaggaggacccatcgccctgtgcgtcttcgggatcagggcgtgcgtgcacgctgaaccagactgagtgccgcgggcgctggccagggcccaatggaggcatcaccaactttgacaacttcttcttcgccatgctgacagtcttccagtgtgtcaccatggaaggctggaccgatgtgctctactggatgcaagatgccatggggtatgaactgccctgggtgtactttgtgagccttgtcatctttgggtccttcttcgtcctcaaccttgtgcttggcgtcctgagtggggagttctccaaggagagagagaaagcgaaagctcgcggggacttccagaagcagcgggagaagcagcagatggaggaagacctgcggggctacctggactggatcactcaagccgaagagctggacatggaggacccctccgccgatgacaaccttggttctatggctgaagagggccgggcgggccatcggccacagctggccgagctgaccaataggaggcgtggacgtctgcgctggttcagtcattctactcgctccacacactccaccagcagccatgccagcctcccagccagtgacaccggttccatgacagagacccaaggcgatgaggatgaggaggagggggctctggccagctgtacacgctgcctaaacaagatcatgaaaaccagagtctgccgccgcctccgccgagccaaccgggtccttcgggcacgctgccgtcgggcagtgaagtccaatgcctgctactgggctgtgctgttgctcgtcttcctcaacacgttgaccatcgcctctgagcaccacgggcagcctgtgtggctcacccagatccaggagtatgccaacaaagtgttgctctgtctgttcacggtggagatgcttctcaaattgtacggtctgggcccctctgcctatgtgtcttccttcttcaaccgctttgactgctttgtggtctgtgggggcatcctagagaccaccttggtggaggtgggcgccatgcagcccttgggcatctcagtgctccgatgtgtgcgcctcctcaggatctttaaggtcaccagacactgggcttctctgagcaatctggtggcatccctgctcaattcaatgaaatccatcgcatccttgctgcttctcctcttcctcttcatcattatcttctccctgcttggcatgcagctgtttgggggcaagttcaactttgaccagacccacaccaagcgaagcacctttgacacgttcccccaggccctcctcactgtctttcagatcctgacaggtgaggactggaacgtggtcatgtatgatggtatcatggcatatggtggccccttcttcccaggaatgttggtgtgcatctatttcatcattctcttcatctgtggcaactacatcctgttgaacgtgtttcttgccattgctgtggacaacctggccagtggagatgcaggcactgccaaggacaagggcggggagaagagcaatgagaaggatctcccacaggagaatgaaggcctggtgcctggtgtggagaaagaggaagaggagggtgcaaggagggaaggagcagacatggaggaggaggaggaggaggaagaagaggaagaagaggaagaagaggaagagggtgcagggggtgtggaactcctgcaggaagttgtacccaaggagaaggtggtacccatccctgagggcagcgccttcttctgcctcagccaaaccaacccgctgaggaagggctgccacaccctcatccaccatcatgtcttcaccaatcttatcctggtgttcatcatcctcagcagtgtgtccctggccgctgaggaccccatccgagcccactccttccgcaaccatattctgggttacttcgattatgccttcacctccattttcactgtggagattctactaaagatgacagtgtttggggccttcctgcaccgcggctccttctgccgtagctggtttaatatgttggatctgctggtggtcagtgtgtccctcatctcctttggcatccactccagcgccatctcggtggtgaagattctgcgagtactccgagtactgcggcccctccgagccatcaacagggccaagggactcaagcatgtggtgcagtgtgtatttgtggccatccggaccatcggaaacatcatgattgtcaccacacttctgcaatttatgttcgcctgcatcggggtgcagctcttcaaggggaaattctacacctgcacggacgaggccaaacacacccctcaagaatgcaagggctccttcctggtatacccagatggagacgtgtcacggcccctggtccgggagcggctctgggtcaacagtgatttcaactttgacaatgtcctttcagccatgatggccctgttcactgtctccacctttgaaggctggcctgcactgctatacaaggccatcgatgcatatgcagaggaccatggccccatctataattaccgtgtggagatctcagtgttcttcattgtctacatcatcatcattgcgttcttcatgatgaacatcttcgtgggcttcgtcatcatcactttccgtgcccagggcgagcaggagtaccaaaactgtgagctggacaagaaccagcgtcaatgtgtggaatatgccctcaaggcccagccactccgccgttacatccccaagaacccgcatcagtatcgtgtgtgggccactgtgaactctgctgcctttgagtacctgatgttcctgctcatcctgctcaacacagttgccctagccatgcagcactatgagcagactgctcccttcaactatgccatggacatcctcaacatggtcttcactggcctcttcactattgagatggtgctcaaaatcatcgccttcaagcccaagcattacttcactgatgcctggaacacgtttgacgctcttattgtggtgggcagcatagtggatattgccgtcactgaagtcaataatggtggccaccttggcgagagctctgaggacagctcccgcatttccattaccttctttcgcctcttccgagttatgcggctggtcaagcttctcagtaagggtgaagggatccgcacattgctctggacattcatcaagtccttccaggccttgccctatgtggctcttctcatcgcaatgatattcttcatctatgccgtcattggcatgcagatgttcggcaaggtggctcttcaggatggcacacagataaaccgaaacaacaacttccagacctttccacaggctgtgctgcttctgttcaggtgtgccactggtgaggcatggcaggagataatgcttgccagccttcccggaaatcggtgtgatcctgagtctgacttcggccctggtgaagagtttacctgtggtagcaattttgccatcgcctatttcatcagcttcttcatgctctgtgccttcctgatcataaatctctttgtggctgtgatcatggacaactttgattatctcaccagagattggtccatcctgggcccccatcaccttgatgaattcaagaggatctggtctgaatatgaccctggggccaagggccgcatcaaacacttggatgtggttgccctgctgagacgtatccagccccctctgggatttgggaagctgtgcccacaccgagtggcctgcaagagacttgtggcaatgaacatgcccctcaactcagatgggacggtgacattcaacgccacactctttgccctggtccggacatccctgaagatcaaaacagaagggaacctggagcaagccaaccaggagctgcggattgtcatcaaaaagatctggaagcggatgaaacagaagctgctagatgaggtcatccccccaccagacgaggaggaggtcaccgtgggcaaattctacgccacatttctgatccaggactatttccgcaaattccggcggaggaaagaaaaagggctactaggcaacgacgccgcccctagcacctcttccgcccttcaggctggtctgcggagcctgcaggacttgggtcctgagatgcggcaggccctcacctgtgacacagaggaggaggaagaagaggggcaggagggagtggaggaggaagatgaaaaggacttggaaactaacaaagccacgatggtctcccagccctcagctcgccggggctccgggatttctgtgtctctgcctgtcggggacagacttccagattcactctcctttgggcccagtgatgatgacagggggactcccacctccagtcagcccagtgtgccccaggctggatccaacacccacaggagaggctctggggctctcattttcaccatcccagaagaaggaaattctcagcccaagggaaccaaagggcaaaacaagcaagatgaggatgaggaagtccctgatcggctttcctacctagatgagcaggcagggactcccccgtgctcagtccttttgccacctcacagagctcagagatacatggatgggcacctggtaccacgccgccgtctgctgccccccacacctgcaggtcggaagccctccttcaccatccagtgtctgcagcgccagggcagttgtgaggatttacccatcccaggcacctatcatcgtgggcgaaattcagggcccaatagggctcagggttcctgggcaacaccacctcagcggggtcggctcctgtatgccccgctgttgttggtggaagagggcgcagcgggggaggggtacctcggcagatccagtggcccactgcgcaccttcacctgtctgcacgtgcctggaacccactcggaccccagccatgggaagaggggcagtgccgacagcttggtggaggctgtgcttatctcagagggtctgggcctctttgctcgagacccacgtttcgtggccctggccaagcaggagattgcagatgcgtgtcgcctgacgctggatgagatggacaatgctgccagtgacctgctggcacagggaaccagctctctctatagcgacgaggagtccatcctctcccgcttcgatgaggaggacttgggagacgagatggcctgcgtccacgccctctgaattcccacccctccccaactgctcaataaacctcctgccctcccctccccagcaggaggcaggcatggaccaca

SEQ ID NO: 4197 - DNA, 6166 bp, Homo sapiens
  source 1..6166: mol_type = unassigned DNA
tcaggcccggcagcggggagccgagtggaggctaattttacttgctgggagcgaggagagtaatcctcctgcccccactcctgcccccgccccctggctggctcagcagggcaggctcagccgacagcctcagccagcctagtccccaaggcgggggcattggggacacagggaagggaaagcactggggtgggggagcaggagaaagccagattcccagggaagccatggagccatcctcaccccaggatgaaggcctgaggaagaaacagcccaagaagccagttcctgagattctgccaaggccaccccgggccttgttctgcctgaccctggagaaccccctgaggaaggcctgcatcagcattgtagaatggaagcccttcgagacgatcatcttgctcaccatctttgccaattgtgtggccctggccgtgtacctgcccatgccggaagatgacaacaactctctgaacctcggcctggagaagctggagtatttcttcctcattgtcttctcgattgaagccgccatgaagatcattgcctacggcttcttattccaccaggacgcttacctgcgcagtggctggaatgtgctggacttcaccattgtcttcctgggggtcttcaccgtgattctggaacaggttaacgtcatccaaagccacacagccccaatgagcagcaaaggagccggcttggatgtcaaggccctcagagccttccgagtgctcagacccctccggctggtgtcgggggtgcctagcctgcaggtggtcctgaactccatcttcaaggccatgctccccctctttcacatcgccctgctggtcctctttatggtcatcatctatgccatcatcgggctggagctcttcaagggcaagatgcacaagacctgctacttcattggtacagatatcgtggccacggtggagaatgaagagccatcgccctgcgccaggacgggctcagggcgccggtgcaccatcaatggcagtgagtgccggggcggctggccagggcccaaccatggcatcacccacttcgacaacttcggcttctccatgctcaccgtgtaccagtgcattaccatggagggatggactgacgtcctttactgggtcaatgatgccatcgggaatgagtggccctggatctattttgtcaccctcattttgctgggatccttcttcatcctcaacctggtgctgggtgtcctgagtggggaattcaccaaggagcgggagaaggccaagtccaggggaaccttccagaagctccgggagaagcagcaactagatgaggaccttcggggctacatgagctggatcacgcagggcgaggtcatggatgttgaggacttcagagaaggaaaactgtctttggatgaaggtggctctgacacagagagcctgtatgaaattgcaggcttgaacaaaatcatccagttcatccgacattggaggcagtggaaccgcatctttcgctggaagtgccatgacatcgtgaagtccaaggtcttctattggctggtgattctcatcgttgccctcaacaccctgtctatcgcctcagagcaccacaaccagcctctctggctgacccgtttgcaagacattgccaaccgggtgctgctgtccctcttcaccactgagatgctgatgaagatgtacgggctgggcctgcgccagtacttcatgtctatcttcaaccgcttcgactgcttcgtggtgtgtagcggtatcctggagatcctgctggtggagtcgggtgccatgacacccctgggcatctccgtgctccgctgcatccgcctcctgaggatcttcaagatcaccaaatattggacgtcgctgagcaacctggtggcatccctgctcaactccatccgctccatcgcctccctgctgctgctgctcttcctcttcatcgtcatcttcgccctcctgggcatgcagctctttggggggaggtatgactttgaagacacagaagtacggcgcagcaactttgacaactttccccaagccctcatcagcgtcttccaggtactgacaggggaagactggacctcaatgatgtacaatgggatcatggcctacggcgggccgtcctaccctggcatgcttgtgtgcatttacttcatcatccttttcgtctgtggcaactacatcctgctcaatgtcttcctggccattgccgtggacaacctggccgaggcggagagcctgacttctgcccagaaggccaaggctgaggagaaaaaacgcaggaagatgtccaagggtctcccagacaagtcagaagaggagaagtcaacgatggccaagaagctggagcagaaacccaagggtgagggcatccccaccactgccaagctgaaaatcgatgagtttgaatctaatgtcaatgaggtgaaggatccctacccctcagccgacttcccaggggatgacgaggaagatgagcctgagatcccgctgagcccccgaccacgtcccctggctgagctgcagctgaaagagaaggccgtgcccattccagaagccagctccttcttcatcttcagccccaccaataagatccgtgtcctgtgtcaccgcatcgtcaatgccacctggtttaccaacttcatcctgctcttcatcctgctcagcagcgctgcactggctgcggaagaccccatccgggctgattccatgagaaatcagatccttaaacactttgacatcgggttcacctctgtcttcactgtggagattgtcctcaagatgacgacctacggagccttcctgcacaagggttccttctgccgcaattacttcaacatgctggacctgctggtggtggccgtgtccctcatctccatgggacttgagtccagtgccatctccgtggtgaagatcctgagggtgctgagggtgctccgaccactcagagccatcaacagagccaaggggttgaagcacgtggtgcagtgcatgttcgtggccatcagcaccatcgggaacatcgtgctggtcactaccctcctacagttcatgtttgcctgcatcggcgtccagctcttcaaggggaagttcttcaggtgcaccgacttgtccaagatgacagaggaggagtgcaggggctactactacgtgtacaaggacggggaccccatgcagatagagctgcgtcaccgcgagtgggtacacagcgacttccacttcgacaatgtgctctcagccatgatgtccctcttcacggtctccaccttcgagggatggcctcagctgctgtacaaggccatagactccaatgcggaggacgtgggtcccatctacaacaaccgtgtggagatggccatcttcttcatcatctacatcatcctcattgccttcttcatgatgaacatctttgtgggcttcgtcattgtcaccttccaggagcagggagagactgagtacaagaactgtgagctggacaagaaccagcgccaatgtgtacagtatgccctgaaggcccgcccactgaggtgctacattcccaaaaacccataccagtaccaggtgtggtacattgtcacctcctcctactttgaatacctgatgtttgccctcatcatgctcaacaccatctgcctcggcatgcagcactacaaccagtcggagcagatgaaccacatctcagacatcctcaatgtggccttcactatcatcttcaccctggagatgatcctcaagctcatggccttcaaggccaggggctactttggagacccctggaatgtgtttgacttcctgattgtcattggcagcatcattgatgtcatcctcagtgagatcgacactttcctggcctccagcgggggactgtattgcctgggtggaggctgcgggaacgttgacccagatgagagtgcccgcatctccagcgccttcttccgcctgttccgtgtcatgaggctgatcaagctgctgagccgggcagaaggagtgcgaaccctcctgtggacgttcatcaagtccttccaggccctaccctacgtggctctgctcatcgtcatgctcttcttcatctacgctgtcatcggcatgcagatgtttgggaagatcgccttggtggatgggacccaaataaaccggaacaacaacttccagaccttcccacaagctgtgctactgctcttcaggtgtgcaacaggtgaggcctggcaggagatcctactggcctgcagctatgggaagctgtgtgacccagagtcggactatgccccaggggaggagtacacatgtggcaccaactttgcatactactacttcatcagcttctacatgctctgtgccttcctggtcatcaacctctttgtggctgtcatcatggacaattttgactacctcacccgggactggtccatcctgggccctcatcacctggatgagttcaaggccatctgggcagagtatgacccagaggctaaggggagaatcaaacacctggacgtggtgaccctgctgagaaggattcagccccctctgggctttgggaagttctgcccacatcgggtagcttgtaagcggctggtgggcatgaacatgcccctgaacagcgacggcacagtcaccttcaatgccacactctttgccctggtccgcacggcactcaagatcaagacggaaggtaactttgagcaggccaacgaggagctgagggccatcatcaagaagatctggaagagaaccagcatgaagctcttggaccaggtcatccctccaataggagatgatgaggtgacagtggggaagttctacgccacattcctcatccaggagcacttccggaagttcatgaaacgccaagaggagtattatggctatcggcccaagaaggacattgtacagatccaggcagggctgcggaccattgaggaagaggcagcccccgagatctgtcgcacggtctcaggagacctggctgctgaggaggagctggagagagccatggtggaggctgcgatggaggagggaatattccggaggactggaggcctgtttggccaggtggacaacttcctggaaaggaccaactccctgccccccgtcatggccaatcagagacccctccagtttgctgagatagagatggaagagatggagtcacctgtcttcttggaggacttcccacaagatccacgcaccaaccccctggctcgtgccaataccaacaatgccaacgccaatgtcgcctatggcaacagcaaccatagcaacagccatgtgttttccagtgtccactatgaaagggagttcccagaagagacagagacgcctgctaccagaggacgagcccttggccaaccctgcagggtcctgggaccccacagcaaaccctgtgtggagatgctgaagggactgctgacccagagggcaatgcccagaggccaggcacctcctgccccctgccagtgccccagggtggagtcctccatgcctgaggacagaaagagctccacaccagggtctcttcatgaggagacaccccacagcaggagcaccagggagaatacttccaggtgctcagcaccagctacagccctgctgatccaaaaggctctggttcgagggggcctgggcaccttggcagctgatgcaaacttcatcatggcaacaggccaggccctggcagatgcctgccaaatggaaccagaggaagtggagatcatggcaacagagctactgaaaggacgagaggccccagagggcatggccagctccctgggatgcctgaacctcgggtcctccctgggcagcctcgaccaacaccagggctcccaggagacccttattcctccaaggctgtgatgcccacacagcatcagcatgggcttagagctggcatgaccaatgggggtggggaagttgctggggtggagaagggctagcccaccgcagcagcctccctccctctcagcagctagatgcatggcctgaggcagggtggtcaggaaccacctcaaaaagtgcggaggaagtagctggacaggccctgcccctcaccagcaagaggcatgattggatggagcttctaatgtcattcaaaaaggcctggtcagtgcctgtctggcctagggccactcccacctgcaggacattaaaatctccaggcctgtgacactggc

SEQ ID NO: 4198 - DNA, 5994 bp, Homo sapiens
  source 1..5994: mol_type = unassigned DNA
ctcagccgacagcctcagccagcctagtccccaaggcgggggcattggggacacagggaagggaaagcactggggtgggggagcaggagaaagccagattcccagggaagccatggagccatcctcaccccaggatgaaggcctgaggaagaaacagcccaagaagccagttcctgagattctgccaaggccaccccgggccttgttctgcctgaccctggagaaccccctgaggaaggcctgcatcagcattgtagaatggaagcccttcgagacgatcatcttgctcaccatctttgccaattgtgtggccctggccgtgtacctgcccatgccggaagatgacaacaactctctgaacctcggcctggagaagctggagtatttcttcctcattgtcttctcgattgaagccgccatgaagatcattgcctacggcttcttattccaccaggacgcttacctgcgcagtggctggaatgtgctggacttcaccattgtcttcctgggggtcttcaccgtgattctggaacaggttaacgtcatccaaagccacacagccccaatgagcagcaaaggagccggcttggatgtcaaggccctcagagccttccgagtgctcagacccctccggctggtgtcgggggtgcctagcctgcaggtggtcctgaactccatcttcaaggccatgctccccctctttcacatcgccctgctggtcctctttatggtcatcatctatgccatcatcgggctggagctcttcaagggcaagatgcacaagacctgctacttcattggtacagatatcgtggccacggtggagaatgaagagccatcgccctgcgccaggacgggctcagggcgccggtgcaccatcaatggcagtgagtgccggggcggctggccagggcccaaccatggcatcacccacttcgacaacttcggcttctccatgctcaccgtgtaccagtgcattaccatggagggatggactgacgtcctttactgggtcaatgatgccatcgggaatgagtggccctggatctattttgtcaccctcattttgctgggatccttcttcatcctcaacctggtgctgggtgtcctgagtggggaattcaccaaggagcgggagaaggccaagtccaggggaaccttccagaagctccgggagaagcagcaactagatgaggaccttcggggctacatgagctggatcacgcagggcgaggtcatggatgttgaggacttcagagaaggaaaactgtctttggatgaaggtggctctgacacagagagcctgtatgaaattgcaggcttgaacaaaatcatccagttcatccgacattggaggcagtggaaccgcatctttcgctggaagtgccatgacatcgtgaagtccaaggtcttctattggctggtgattctcatcgttgccctcaacaccctgtctatcgcctcagagcaccacaaccagcctctctggctgacccgtttgcaagacattgccaaccgggtgctgctgtccctcttcaccactgagatgctgatgaagatgtacgggctgggcctgcgccagtacttcatgtctatcttcaaccgcttcgactgcttcgtggtgtgtagcggtatcctggagatcctgctggtggagtcgggtgccatgacacccctgggcatctccgtgctccgctgcatccgcctcctgaggatcttcaagatcaccaaatattggacgtcgctgagcaacctggtggcatccctgctcaactccatccgctccatcgcctccctgctgctgctgctcttcctcttcatcgtcatcttcgccctcctgggcatgcagctctttggggggaggtatgactttgaagacacagaagtacggcgcagcaactttgacaactttccccaagccctcatcagcgtcttccaggtactgacaggggaagactggacctcaatgatgtacaatgggatcatggcctacggcgggccgtcctaccctggcatgcttgtgtgcatttacttcatcatccttttcgtctgtggcaactacatcctgctcaatgtcttcctggccattgccgtggacaacctggccgaggcggagagcctgacttctgcccagaaggccaaggctgaggagaaaaaacgcaggaagatgtccaagggtctcccagacaagtcagaagaggagaagtcaacgatggccaagaagctggagcagaaacccaagggtgagggcatccccaccactgccaagctgaaaatcgatgagtttgaatctaatgtcaatgaggtgaaggatccctacccctcagccgacttcccaggggatgacgaggaagatgagcctgagatcccgctgagcccccgaccacgtcccctggctgagctgcagctgaaagagaaggccgtgcccattccagaagccagctccttcttcatcttcagccccaccaataagatccgtgtcctgtgtcaccgcatcgtcaatgccacctggtttaccaacttcatcctgctcttcatcctgctcagcagcgctgcactggctgcggaagaccccatccgggctgattccatgagaaatcagatccttaaacactttgacatcgggttcacctctgtcttcactgtggagattgtcctcaagatgacgacctacggagccttcctgcacaagggttccttctgccgcaattacttcaacatgctggacctgctggtggtggccgtgtccctcatctccatgggacttgagtccagtgccatctccgtggtgaagatcctgagggtgctgagggtgctccgaccactcagagccatcaacagagccaaggggttgaagcacgtggtgcagtgcatgttcgtggccatcagcaccatcgggaacatcgtgctggtcactaccctcctacagttcatgtttgcctgcatcggcgtccagctcttcaaggggaagttcttcaggtgcaccgacttgtccaagatgacagaggaggagtgcaggggctactactacgtgtacaaggacggggaccccatgcagatagagctgcgtcaccgcgagtgggtacacagcgacttccacttcgacaatgtgctctcagccatgatgtccctcttcacggtctccaccttcgagggatggcctcagctgctgtacaaggccatagactccaatgcggaggacgtgggtcccatctacaacaaccgtgtggagatggccatcttcttcatcatctacatcatcctcattgccttcttcatgatgaacatctttgtgggcttcgtcattgtcaccttccaggagcagggagagactgagtacaagaactgtgagctggacaagaaccagcgccaatgtgtacagtatgccctgaaggcccgcccactgaggtgctacattcccaaaaacccataccagtaccaggtgtggtacattgtcacctcctcctactttgaatacctgatgtttgccctcatcatgctcaacaccatctgcctcggcatgcagcactacaaccagtcggagcagatgaaccacatctcagacatcctcaatgtggccttcactatcatcttcaccctggagatgatcctcaagctcatggccttcaaggccaggggctactttggagacccctggaatgtgtttgacttcctgattgtcattggcagcatcattgatgtcatcctcagtgagatcgacgacccagatgagagtgcccgcatctccagcgccttcttccgcctgttccgtgtcatgaggctgatcaagctgctgagccgggcagaaggagtgcgaaccctcctgtggacgttcatcaagtccttccaggccctaccctacgtggctctgctcatcgtcatgctcttcttcatctacgctgtcatcggcatgcagatgtttgggaagatcgccttggtggatgggacccaaataaaccggaacaacaacttccagaccttcccacaagctgtgctactgctcttcaggtgtgcaacaggtgaggcctggcaggagatcctactggcctgcagctatgggaagctgtgtgacccagagtcggactatgccccaggggaggagtacacatgtggcaccaactttgcatactactacttcatcagcttctacatgctctgtgccttcctggtcatcaacctctttgtggctgtcatcatggacaattttgactacctcacccgggactggtccatcctgggccctcatcacctggatgagttcaaggccatctgggcagagtatgacccagaggctaaggggagaatcaaacacctggacgtggtgaccctgctgagaaggattcagccccctctgggctttgggaagttctgcccacatcgggtagcttgtaagcggctggtgggcatgaacatgcccctgaacagcgacggcacagtcaccttcaatgccacactctttgccctggtccgcacggcactcaagatcaagacggaaggtaactttgagcaggccaacgaggagctgagggccatcatcaagaagatctggaagagaaccagcatgaagctcttggaccaggtcatccctccaataggagatgatgaggtgacagtggggaagttctacgccacattcctcatccaggagcacttccggaagttcatgaaacgccaagaggagtattatggctatcggcccaagaaggacattgtacagatccaggcagggctgcggaccattgaggaagaggcagcccccgagatctgtcgcacggtctcaggagacctggctgctgaggaggagctggagagagccatggtggaggctgcgatggaggagggaatattccggaggactggaggcctgtttggccaggtggacaacttcctggaaaggaccaactccctgccccccgtcatggccaatcagagacccctccagtttgctgagatagagatggaagagatggagtcacctgtcttcttggaggacttcccacaagatccacgcaccaaccccctggctcgtgccaataccaacaatgccaacgccaatgtcgcctatggcaacagcaaccatagcaacagccatgtgttttccagtgtccactatgaaagggagttcccagaagagacagagacgcctgctaccagaggacgagcccttggccaaccctgcagggtcctgggaccccacagcaaaccctgtgtggagatgctgaagggactgctgacccagagggcaatgcccagaggccaggcacctcctgccccctgccagtgccccagggtggagtcctccatgcctgaggacagaaagagctccacaccagggtctcttcatgaggagacaccccacagcaggagcaccagggagaatacttccaggtgctcagcaccagctacagccctgctgatccaaaaggctctggttcgagggggcctgggcaccttggcagctgatgcaaacttcatcatggcaacaggccaggccctggcagatgcctgccaaatggaaccagaggaagtggagatcatggcaacagagctactgaaaggacgagaggccccagagggcatggccagctccctgggatgcctgaacctcgggtcctccctgggcagcctcgaccaacaccagggctcccaggagacccttattcctccaaggctgtgatgcccacacagcatcagcatgggcttagagctggcatgaccaatgggggtggggaagttgctggggtggagaagggctagcccaccgcagcagcctccctccctctcagcagctagatgcatggcctgaggcagggtggtcaggaaccacctcaaaaagtgcggaggaagtagctggacaggccctgcccctcaccagcaagaggcatgattggatggagcttctaatgtcattcaaaaaggcctggtcagtgcctgtctggcctagggccactcccacctgcaggacattaaaatctccaggcctgtgacactggc

SEQ ID NO: 4199 - DNA, 9796 bp, Homo sapiens
  source 1..9796: mol_type = unassigned DNA
gcggcggcggctgcggcggtggggccgggcgaggtccgctgcggtcccggcggctccgtggctgctccgctctgagcgcctggcgcgccccgcgccctccctgccggggccgctgggccggggatgcacgcggggcccgggagccatggtccgcttcggggacgagctgggcggccgctatgggggccccggcggcggagagcgggcccggggcggcggggccggcggggcggggggcccgggtcccggggggctgcagcccggccagcgggtcctctacaagcaatcgatcgcgcagcgcgcgcggaccatggcgctgtacaaccccatcccggtcaagcagaactgcttcaccgtcaaccgctcgctcttcgtcttcagcgaggacaacgtcgtccgcaaatacgcgaagcgcatcaccgagtggcctccattcgagtatatgatcctggccaccatcatcgccaactgcatcgtgctggccctggagcagcacctccctgatggggacaaaacgcccatgtccgagcggctggacgacacggagccctatttcatcgggatcttttgcttcgaggcagggatcaaaatcatcgctctgggctttgtcttccacaagggctcttacctgcggaacggctggaacgtcatggacttcgtggtcgtcctcacagggatccttgccacggctggaactgacttcgacctgcgaacactgagggctgtgcgtgtgctgaggcccctgaagctggtgtctgggattccaagtttgcaggtggtgctcaagtccatcatgaaggccatggttccactcctgcagattgggctgcttctcttctttgccatcctcatgtttgccatcattggcctggagttctacatgggcaagttccacaaggcctgtttccccaacagcacagatgcggagcccgtgggtgacttcccctgtggcaaggaggccccagcccggctgtgcgagggcgacactgagtgccgggagtactggccaggacccaactttggcatcaccaactttgacaatatcctgtttgccatcttgacggtgttccagtgcatcaccatggagggctggactgacatcctctataatacaaacgatgcggccggcaacacctggaactggctctacttcatccctctcatcatcatcggctccttcttcatgctcaacctggtgctgggcgtgctctcgggggagtttgccaaggagcgagagagggtggagaaccgccgcgccttcctgaagctgcgccggcagcagcagatcgagcgagagctcaacgggtacctggagtggatcttcaaggcggaggaagtcatgctggccgaggaggacaggaatgcagaggagaagtcccctttggacgtgctgaagagagcggccaccaagaagagcagaaatgacctgatccacgcagaggagggagaggaccggtttgcagatctctgtgctgttggatcccccttcgcccgcgccagcctcaagagcgggaagacagagagctcgtcatacttccggaggaaggagaagatgttccggttttttatccggcgcatggtgaaggctcagagcttctactgggtggtgctgtgcgtggtggccctgaacacactgtgtgtggccatggtgcattacaaccagccgcggcggcttaccacgaccctgtattttgcagagtttgttttcctgggtctcttcctcacagagatgtccctgaagatgtatggcctggggcccagaagctacttccggtcctccttcaactgcttcgactttggggtcatcgtggggagcgtctttgaagtggtctgggcggccatcaagccgggaagctcctttgggatcagtgtgctgcgggccctccgcctgctgaggatcttcaaagtcacgaagtactggagctccctgcggaacctggtggtgtccctgctgaactccatgaagtccatcatcagcctgctcttcttgctcttcctgttcattgtggtcttcgccctgctggggatgcagctgtttgggggacagttcaacttccaggatgagactcccacaaccaacttcgacaccttccctgccgccatcctcactgtcttccagatcctgacgggagaggactggaatgcagtgatgtatcacgggatcgaatcgcaaggcggcgtcagcaaaggcatgttctcgtccttttacttcattgtcctgacactgttcggaaactacactctgctgaatgtctttctggccatcgctgtggacaacctggccaacgcccaagagctgaccaaggatgaagaggagatggaagaagcagccaatcagaagcttgctctgcaaaaggccaaagaagtggctgaagtcagccccatgtctgccgcgaacatctccatcgccgccaggcagcagaactcggccaaggcgcgctcggtgtgggagcagcgggccagccagctacggctgcagaacctgcgggccagctgcgaggcgctgtacagcgagatggaccccgaggagcggctgcgcttcgccactacgcgccacctgcggcccgacatgaagacgcacctggaccggccgctggtggtggagctgggccgcgacggcgcgcgggggcccgtgggaggcaaagcccgacctgaggctgcggaggcccccgagggcgtcgaccctccgcgcaggcaccaccggcaccgcgacaaggacaagacccccgcggcgggggaccaggaccgagcagaggccccgaaggcggagagcggggagcccggtgcccgggaggagcggccgcggccgcaccgcagccacagcaaggaggccgcggggcccccggaggcgcggagcgagcgcggccgaggcccaggccccgagggcggccggcggcaccaccggcgcggctccccggaggaggcggccgagcgggagccccgacgccaccgcgcgcaccggcaccaggatccgagcaaggagtgcgccggcgccaagggcgagcggcgcgcgcggcaccgcggcggcccccgagcggggccccgggaggcggagagcggggaggagccggcgcggcggcaccgggcccggcacaaggcgcagcctgctcacgaggctgtggagaaggagaccacggagaaggaggccacggagaaggaggctgagatagtggaagccgacaaggaaaaggagctccggaaccaccagccccgggagccacactgtgacctggagaccagtgggactgtgactgtgggtcccatgcacacactgcccagcacctgtctccagaaggtggaggaacagccagaggatgcagacaatcagcggaacgtcactcgcatgggcagtcagcccccagacccgaacactattgtacatatcccagtgatgctgacgggccctcttggggaagccacggtcgttcccagtggtaacgtggacctggaaagccaagcagaggggaagaaggaggtggaagcggatgacgtgatgaggagcggcccccggcctatcgtcccatacagctccatgttctgtttaagccccaccaacctgctccgccgcttctgccactacatcgtgaccatgaggtacttcgaggtggtcattctcgtggtcatcgccttgagcagcatcgccctggctgctgaggacccagtgcgcacagactcgcccaggaacaacgctctgaaatacctggattacattttcactggtgtctttacctttgagatggtgataaagatgatcgacttgggactgctgcttcaccctggagcctatttccgggacttgtggaacattctggacttcattgtggtcagtggcgccctggtggcgtttgctttctcgagcttcgtgggaggatccaaagggaaagacatcaataccatcaagtctctgagagtccttcgtgtcctgcggcccctcaagaccatcaaacggctgcccaagctcaaggctgtgtttgactgtgtggtgaactccctgaagaatgtcctcaacatcttgattgtctacatgctcttcatgttcatatttgccgtcattgcggtgcagctcttcaaagggaagtttttctactgcacagatgaatccaaggagctggagagggactgcaggggtcagtatttggattatgagaaggaggaagtggaagctcagcccaggcagtggaagaaatacgactttcactacgacaatgtgctctgggctctgctgacgctgttcacagtgtccacgggagaaggctggcccatggtgctgaaacactccgtggatgccacctatgaggagcagggtccaagccctgggtaccgcatggagctgtccatcttctacgtggtctactttgtggtctttcccttcttcttcgtcaacatctttgtggctttgatcatcatcaccttccaggagcagggggacaaggtgatgtctgaatgcagcctggagaagaacgagagggcttgcattgacttcgccatcagcgccaaacccctgacacggtacatgccccaaaaccggcagtcgttccagtataagacgtggacatttgtggtctccccgccctttgaatacttcatcatggccatgatagccctcaacactgtggtgctgatgatgaagttctatgatgcaccctatgagtacgagctgatgctgaaatgcctgaacatcgtgttcacatccatgttctccatggaatgcgtgctgaagatcatcgcctttggggtgctgaactatttcagagatgcctggaatgtctttgactttgtcactgtgttgggaagtattactgatattttagtaacagagattgcgaacaatttcatcaacctcagcttcctccgcctctttcgagctgcgcggctgatcaagctgctccgccagggctacaccatccgcatcctgctgtggacctttgtccagtccttcaaggccctgccctacgtgtgtctgctcattgccatgctgttcttcatctacgccatcatcggcatgcaggtgtttgggaatattgccctggatgatgacaccagcatcaaccgccacaacaacttccggacgtttttgcaagccctgatgctgctgttcaggagcgccacgggggaggcctggcacgagatcatgctgtcctgcctgagcaaccaggcctgtgatgagcaggccaatgccaccgagtgtggaagtgactttgcctacttctacttcgtctccttcatcttcctgtgctcctttctgatgttgaacctctttgtggctgtgatcatggacaattttgagtacctcacgcgggactcttccatcctaggtcctcaccacttggatgagttcatccgggtctgggctgaatacgacccggctgcgtgtgggcgcatcagttacaatgacatgtttgagatgctgaaacacatgtccccgcctctggggctggggaagaaatgccctgctcgagttgcttacaagcgcctggttcgcatgaacatgcccatctccaacgaggacatgactgttcacttcacgtccacgctgatggccctcatccggacggcactggagatcaagctggccccagctgggacaaagcagcatcagtgtgacgcggagttgaggaaggagatttccgttgtgtgggccaatctgccccagaagactttggacttgctggtaccaccccataagcctgatgagatgacagtggggaaggtttatgcagctctgatgatattcgacttctacaagcagaacaaaaccaccagagaccagatgcagcaggctcctggaggcctctcccagatgggtcctgtgtccctgttccaccctctgaaggccaccctggagcagacacagccggctgtgctccgaggagcccgggttttccttcgacagaagagttccacctccctcagcaatggcggggccatacaaaaccaagagagtggcatcaaagagtctgtctcctggggcactcaaaggacccaggatgcaccccatgaggccaggccacccctggagcgtggccactccacagagatccctgtggggcggtcaggagcactggctgtggacgttcagatgcagagcataacccggaggggccctgatggggagccccagcctgggctggagagccagggtcgagcggcctccatgccccgccttgcggccgagactcagcccgtcacagatgccagccccatgaagcgctccatctccacgctggcccagcggccccgtgggactcatctttgcagcaccaccccggaccgcccaccccctagccaggcgtcgtcgcaccaccaccaccaccgctgccaccgccgcagggacaggaagcagaggtccctggagaaggggcccagcctgtctgccgatatggatggcgcaccaagcagtgctgtggggccggggctgcccccgggagaggggcctacaggctgccggcgggaacgagagcgccggcaggagcggggccggtcccaggagcggaggcagccctcatcctcctcctcggagaagcagcgcttctactcctgcgaccgctttgggggccgtgagcccccgaagcccaagccctccctcagcagccacccaacgtcgccaacagctggccaggagccgggaccccacccacagggcagtggttccgtgaatgggagccccttgctgtcaacatctggtgctagcacccccggccgcggtgggcggaggcagctcccccagacgcccctgactccccgccccagcatcacctacaagacggccaactcctcacccatccacttcgccggggctcagaccagcctccctgccttctccccaggccggctcagccgtgggctttccgaacacaacgccctgctgcagagagaccccctcagccagcccctggcccctggctctcgaattggctctgacccttacctggggcagcgtctggacagtgaggcctctgtccacgccctgcctgaggacactctcactttcgaggaggctgtggccaccaactcgggccgctcctccaggacttcctacgtgtcctccctgacctcccagtctcaccctctccgccgcgtgcccaacggttaccactgcaccctgggactcagctcgggtggccgagcacggcacagctaccaccaccctgaccaagaccactggtgctagctgcaccgtgaccgctcagacgcctgcatgcagcaggcgtgtgttccagtggatgagttttatcatccacacggggcagccggccctcgggggaggccttgcccaccttggtgaggctcctgtggcccctccctccccctcctcccctcttttactctagacgacgaataaagccctgttagaggatgcggctctctctgtccccttcctgtcctgccttcctgggtctcgtaccacacaccagaccctaaaccgcaggctgctgtgtgtggctgagaaggacccaggagtccaaatcccgtgtcctgggactcagcatccagcatgggtgcttggagccgttgtgaggagctctgcgtcctgtggggagcacccttcacgtggccgtgcggcacagagaagcagggcccacctgaaagtgcgccgagacctcgggacggaggggatggggagggggacacagtcgtggcttgtgcagcccgccagtgtcagcgaatgctcactcaggcaagctctgtcctccctggacaccgtcagccccacaggaaccgagctgggaagtgttcttgctgtggttgtgatttttaattgcaacacctctcattcttgtcacttctatatacgtgatgtagaaaaaatggaaaaccagaaaaatggggaaggaaatgttcacataactttaaaaaatcaaacctgtgaaagaaagatgtcagctttttgccacgtgtctttgtggcttatgcgaggagactccctgtgcagccctgtccggtccaggtggacgtagacggcccctggctctgctgctcttgaccaagtgcctgaccgccaggccctcacacccaggctcctgggcactgtggtgtgaggcgaggcctcgggatccatcaccgcaggatgctgtgaaaagtactcgcgatggcagccaggtagcaagcccttgccagtggagagcactggatgtcatggtggcaaacaaggcagccatttgctgtcctcctcccacgagtggaaggggtttccaaggaagccacagggcagctgaccacgtgcttgtgtgaggcattttcagtctgttctgcatatgattctcagggcacactctgtggtatgtgaaataggtttccttccacatacagcagaagagaggcaaaggctggtaggaaggaggaagacattggctgggggcttggatgtggggccgtcagggcaggagggaggaagccccagctggaatgaaactcagagcaagtgaccgagggaggacacggctcctgccactgaggccgggcacctgatgcccagcactgtcctggcgccagacacagggagcaggcagtcaagtgaggtctgacccccatggccacgctcaggagagaaagaccatgctcaggacactgtccaaggtgcacaagatgctgggaggtcccttgtttggtgaagaaagggagcatttagagcagttgatggtggtgtgtcctccgtgttctgaaattccagatgatctgtgttggattcttggcttctaccccatgattctcctcaaagaaattgtgtgtgatgtgtgtgtgtgtgtgtgtgtgtgtgtgtctgtgtcacaggagatgcagtgcctgtacaggtgtgttcagtgtgtggatgtcattaacccatagggctatgcaacaaaagacacatttaatagaagtaaaacacacaagaccgctgcctggtctcggggttcagcatgattgtgaccaaacctttttatagaatttccttacctgaaggcacaacactctgaaactttaaagataacagagtattttattccaatagaataaaccaggaatctcggactgtgcatgtgatcactgtgctcctgttgcaaagtagaaggatgtgtattttgacactgacgttttgtctcttgttccccagcccccagcccatgttatcttgggtgtcgaatgtgtccattccatgcagaaccacagccatttccccaggcagtgttgggtcgagaatccacttttctaaacccacacagcctagctggcttgtctagactcttctaggcattggaattgatgaaaactacagggagcggggaaaggagacattatgtcttgttttcctgactttgggttttgtttctcactgtgtcttctccggctatcatatatgtcccctgaatctcatagtgagctgccaaatttgaagtgcatcacccagttgtctgcatctggaaccagtcaagcagtggctgtagtttgaacaagttatgtgtgcatgtaacatatatacatatatacatatatacaagtatgtgcatgataatgtatatcttcgtactttttgatacaatgtattcatttgttaatttttaattatatttgatataaatcaaaggtttgttgcaaaactttatatttaagaagtgttaaaaaaaaaaaaaagtcccaaccatgcaacacaactgggacctacttaaaaagaaattctgtgattgactagtttgctgcctgagtcatatttatcagccaaactttggattctgctgttgtttctacaatgacattttgtatgaagcaaagtccttgaattaaaataaaaacttagcaaaaaatcaaaaacaaaacccca

SEQ ID NO: 4200 - DNA, 303 bp, Homo sapiens
  source 1..303: mol_type = unassigned DNA
gacaacctggccaacgcccaagagctgaccaaggatgaagaggagatggaagaagcagccaatcagaagcttgctctgcaaaaggccaaagaagtggctgaagtcagccccatgtctgccgcgaacatctccatcgccgcttttgtaaagcaagctcgaggtactgtatctcgcagctcatctgtctccagcgtgaactcacccaggcagcagaactcggccaaggcgcgctcggtgtgggagcagcgggccagccagctacggctgcagaacctgcgggccagctgcgaggcgctgtacagc

SEQ ID NO: 4201 - DNA, 7158 bp, Homo sapiens
  source 1..7158: mol_type = unassigned DNA
gcggcggcggctgcggcggtggggccgggcgaggtccgctgcggtcccggcggctccgtggctgctccgctctgagcgcctggcgcgccccgcgccctccctgccggggccgctgggccggggatgcacgcggggcccgggagccatggtccgcttcggggacgagctgggcggccgctatgggggccccggcggcggagagcgggcccggggcggcggggccggcggggcggggggcccgggtcccggggggctgcagcccggccagcgggtcctctacaagcaatcgatcgcgcagcgcgcgcggaccatggcgctgtacaaccccatcccggtcaagcagaactgcttcaccgtcaaccgctcgctcttcgtcttcagcgaggacaacgtcgtccgcaaatacgcgaagcgcatcaccgagtggcctccattcgagtatatgatcctggccaccatcatcgccaactgcatcgtgctggccctggagcagcacctccctgatggggacaaaacgcccatgtccgagcggctggacgacacggagccctatttcatcgggatcttttgcttcgaggcagggatcaaaatcatcgctctgggctttgtcttccacaagggctcttacctgcggaacggctggaacgtcatggacttcgtggtcgtcctcacagggatccttgccacggctggaactgacttcgacctgcgaacactgagggctgtgcgtgtgctgaggcccctgaagctggtgtctgggattccaagtttgcaggtggtgctcaagtccatcatgaaggccatggttccactcctgcagattgggctgcttctcttctttgccatcctcatgtttgccatcattggcctggagttctacatgggcaagttccacaaggcctgtttccccaacagcacagatgcggagcccgtgggtgacttcccctgtggcaaggaggccccagcccggctgtgcgagggcgacactgagtgccgggagtactggccaggacccaactttggcatcaccaactttgacaatatcctgtttgccatcttgacggtgttccagtgcatcaccatggagggctggactgacatcctctataatacaaacgatgcggccggcaacacctggaactggctctacttcatccctctcatcatcatcggctccttcttcatgctcaacctggtgctgggcgtgctctcgggggagtttgccaaggagcgagagagggtggagaaccgccgcgccttcctgaagctgcgccggcagcagcagatcgagcgagagctcaacgggtacctggagtggatcttcaaggcggaggaagtcatgctggccgaggaggacaggaatgcagaggagaagtcccctttggacgtgctgaagagagcggccaccaagaagagcagaaatgacctgatccacgcagaggagggagaggaccggtttgcagatctctgtgctgttggatcccccttcgcccgcgccagcctcaagagcgggaagacagagagctcgtcatacttccggaggaaggagaagatgttccggttttttatccggcgcatggtgaaggctcagagcttctactgggtggtgctgtgcgtggtggccctgaacacactgtgtgtggccatggtgcattacaaccagccgcggcggcttaccacgaccctgtattttgcagagtttgttttcctgggtctcttcctcacagagatgtccctgaagatgtatggcctggggcccagaagctacttccggtcctccttcaactgcttcgactttggggtcatcgtggggagcgtctttgaagtggtctgggcggccatcaagccgggaagctcctttgggatcagtgtgctgcgggccctccgcctgctgaggatcttcaaagtcacgaagtactggagctccctgcggaacctggtggtgtccctgctgaactccatgaagtccatcatcagcctgctcttcttgctcttcctgttcattgtggtcttcgccctgctggggatgcagctgtttgggggacagttcaacttccaggatgagactcccacaaccaacttcgacaccttccctgccgccatcctcactgtcttccagatcctgacgggagaggactggaatgcagtgatgtatcacgggatcgaatcgcaaggcggcgtcagcaaaggcatgttctcgtccttttacttcattgtcctgacactgttcggaaactacactctgctgaatgtctttctggccatcgctgtggacaacctggccaacgcccaagagctgaccaaggatgaagaggagatggaagaagcagccaatcagaagcttgctctgcaaaaggccaaagaagtggctgaagtcagccccatgtctgccgcgaacatctccatcgccgccaggcagcagaactcggccaaggcgcgctcggtgtgggagcagcgggccagccagctacggctgcagaacctgcgggccagctgcgaggcgctgtacagcgagatggaccccgaggagcggctgcgcttcgccactacgcgccacctgcggcccgacatgaagacgcacctggaccggccgctggtggtggagctgggccgcgacggcgcgcgggggcccgtgggaggcaaagcccgacctgaggctgcggaggcccccgagggcgtcgaccctccgcgcaggcaccaccggcaccgcgacaaggacaagacccccgcggcgggggaccaggaccgagcagaggccccgaaggcggagagcggggagcccggtgcccgggaggagcggccgcggccgcaccgcagccacagcaaggaggccgcggggcccccggaggcgcggagcgagcgcggccgaggcccaggccccgagggcggccggcggcaccaccggcgcggctccccggaggaggcggccgagcgggagccccgacgccaccgcgcgcaccggcaccaggatccgagcaaggagtgcgccggcgccaagggcgagcggcgcgcgcggcaccgcggcggcccccgagcggggccccgggaggcggagagcggggaggagccggcgcggcggcaccgggcccggcacaaggcgcagcctgctcacgaggctgtggagaaggagaccacggagaaggaggccacggagaaggaggctgagatagtggaagccgacaaggaaaaggagctccggaaccaccagccccgggagccacactgtgacctggagaccagtgggactgtgactgtgggtcccatgcacacactgcccagcacctgtctccagaaggtggaggaacagccagaggatgcagacaatcagcggaacgtcactcgcatgggcagtcagcccccagacccgaacactattgtacatatcccagtgatgctgacgggccctcttggggaagccacggtcgttcccagtggtaacgtggacctggaaagccaagcagaggggaagaaggaggtggaagcggatgacgtgatgaggagcggcccccggcctatcgtcccatacagctccatgttctgtttaagccccaccaacctgctccgccgcttctgccactacatcgtgaccatgaggtacttcgaggtggtcattctcgtggtcatcgccttgagcagcatcgccctggctgctgaggacccagtgcgcacagactcgcccaggaacaacgctctgaaatacctggattacattttcactggtgtctttacctttgagatggtgataaagatgatcgacttgggactgctgcttcaccctggagcctatttccgggacttgtggaacattctggacttcattgtggtcagtggcgccctggtggcgtttgctttctcaggatccaaagggaaagacatcaataccatcaagtctctgagagtccttcgtgtcctgcggcccctcaagaccatcaaacggctgcccaagctcaaggctgtgtttgactgtgtggtgaactccctgaagaatgtcctcaacatcttgattgtctacatgctcttcatgttcatatttgccgtcattgcggtgcagctcttcaaagggaagtttttctactgcacagatgaatccaaggagctggagagggactgcaggggtcagtatttggattatgagaaggaggaagtggaagctcagcccaggcagtggaagaaatacgactttcactacgacaatgtgctctgggctctgctgacgctgttcacagtgtccacgggagaaggctggcccatggtgctgaaacactccgtggatgccacctatgaggagcagggtccaagccctgggtaccgcatggagctgtccatcttctacgtggtctactttgtggtctttcccttcttcttcgtcaacatctttgtggctttgatcatcatcaccttccaggagcagggggacaaggtgatgtctgaatgcagcctggagaagaacgagagggcttgcattgacttcgccatcagcgccaaacccctgacacggtacatgccccaaaaccggcagtcgttccagtataagacgtggacatttgtggtctccccgccctttgaatacttcatcatggccatgatagccctcaacactgtggtgctgatgatgaagttctatgatgcaccctatgagtacgagctgatgctgaaatgcctgaacatcgtgttcacatccatgttctccatggaatgcgtgctgaagatcatcgcctttggggtgctgaactatttcagagatgcctggaatgtctttgactttgtcactgtgttgggaagtattactgatattttagtaacagagattgcggaaacgaacaatttcatcaacctcagcttcctccgcctctttcgagctgcgcggctgatcaagctgctccgccagggctacaccatccgcatcctgctgtggacctttgtccagtccttcaaggccctgccctacgtgtgtctgctcattgccatgctgttcttcatctacgccatcatcggcatgcaggtgtttgggaatattgccctggatgatgacaccagcatcaaccgccacaacaacttccggacgtttttgcaagccctgatgctgctgttcaggagcgccacgggggaggcctggcacgagatcatgctgtcctgcctgagcaaccaggcctgtgatgagcaggccaatgccaccgagtgtggaagtgactttgcctacttctacttcgtctccttcatcttcctgtgctcctttctgatgttgaacctctttgtggctgtgatcatggacaattttgagtacctcacgcgggactcttccatcctaggtcctcaccacttggatgagttcatccgggtctgggctgaatacgacccggctgcgtgtgggcgcatcagttacaatgacatgtttgagatgctgaaacacatgtccccgcctctggggctggggaagaaatgccctgctcgagttgcttacaagcgcctggttcgcatgaacatgcccatctccaacgaggacatgactgttcacttcacgtccacgctgatggccctcatccggacggcactggagatcaagctggccccagctgggacaaagcagcatcagtgtgacgcggagttgaggaaggagatttccgttgtgtgggccaatctgccccagaagactttggacttgctggtaccaccccataagcctgatgagatgacagtggggaaggtttatgcagctctgatgatattcgacttctacaagcagaacaaaaccaccagagaccagatgcagcaggctcctggaggcctctcccagatgggtcctgtgtccctgttccaccctctgaaggccaccctggagcagacacagccggctgtgctccgaggagcccgggttttccttcgacagaagagttccacctccctcagcaatggcggggccatacaaaaccaagagagtggcatcaaagagtctgtctcctggggcactcaaaggacccaggatgcaccccatgaggccaggccacccctggagcgtggccactccacagagatccctgtggggcggtcaggagcactggctgtggacgttcagatgcagagcataacccggaggggccctgatggggagccccagcctgggctggagagccagggtcgagcggcctccatgccccgccttgcggccgagactcagcccgtcacagatgccagccccatgaagcgctccatctccacgctggcccagcggccccgtgggactcatctttgcagcaccaccccggaccgcccaccccctagccaggcgtcgtcgcaccaccaccaccaccgctgccaccgccgcagggacaggaagcagaggtccctggagaaggggcccagcctgtctgccgatatggatggcgcaccaagcagtgctgtggggccggggctgcccccgggagaggggcctacaggctgccggcgggaacgagagcgccggcaggagcggggccggtcccaggagcggaggcagccctcatcctcctcctcggagaagcagcgcttctactcctgcgaccgctttgggggccgtgagcccccgaagcccaagccctccctcagcagccacccaacgtcgccaacagctggccaggagccgggaccccacccacaggccggctcagccgtgggctttccgaacacaacgccctgctgcagagagaccccctcagccagcccctggcccctggctctcgaattggctctgacccttacctggggcagcgtctggacagtgaggcctctgtccacgccctgcctgaggacactctcactttcgaggaggctgtggccaccaactcgggccgctcctccaggacttcctacgtgtcctccctgacctcccagtctcaccctctccgccgcgtgcccaacggttaccactgcaccctgggactcagctcgggtggccgagcacggcacagctaccaccaccctgaccaagaccactggtgctagctgcaccgtgaccgctcagacgcctgcatgcagcaggcgtgtgttccagtggatgagttttatcatccacacggggcagccggccctcgggggaggccttgcccaccttggtgaggctcctgtggcccctccctccccctcctcccctcttttactctagacgacgaataaagccctgtt

SEQ ID NO: 4202 - DNA, 9648 bp, Homo sapiens
  source 1..9648: mol_type = unassigned DNA
atggtccgcttcggggacgagctgggcggccgctatgggggccccggcggcggagagcgggcccggggcggcggggccggcggggcggggggcccgggtcccggggggctgcagcccggccagcgggtcctctacaagcaatcgatcgcgcagcgcgcgcggaccatggcgctgtacaaccccatcccggtcaagcagaactgcttcaccgtcaaccgctcgctcttcgtcttcagcgaggacaacgtcgtccgcaaatacgcgaagcgcatcaccgagtggccaccattcgagtatatgatcctggccaccatcatcgccaactgcatcgtgctggccctggagcagcacctccctgatggggacaaaacgcccatgtccgagcggctggacgacacggagccctatttcatcgggatcttttgcttcgaggcagggatcaaaatcatcgctctgggctttgtcttccacaagggctcttacctgcggaacggctggaacgtcatggacttcgtggtcgtcctcacagggatccttgccacggctggaactgacttcgacctgcgaacactgagggctgtgcgtgtgctgaggcccctgaagctggtgtctgggattccaagtttgcaggtggtgctcaagtccatcatgaaggccatggttccactcctgcagattgggctgcttctcttctttgccatcctcatgtttgccatcattggcctggagttctacatgggcaagttccacaaggcctgtttccccaacagcacagatgcggagcccgtgggtgacttcccctgtggcaaggaggccccagcccggctgtgcgagggcgacactgagtgccgggagtactggccaggacccaactttggcatcaccaactttgacaatatcctgtttgccatcttgacggtgttccagtgcatcaccatggagggctggactgacatcctctataatacaaacgatgcggccggcaacacctggaactggctctacttcatccctctcatcatcatcggctccttcttcatgctcaacctggtgctgggcgtgctctcgggggagtttgccaaggagcgagagagggtggagaaccgccgcgccttcctgaagctgcgccggcagcagcagatcgagcgagagctcaacgggtacctggagtggatcttcaaggcggaggaagtcatgctggccgaggaggacaggaatgcagaggagaagtcccctttggacgcagtgctgaagagagcggccaccaagaagagcagaaatgacctgatccacgcagaggagggagaggaccggtttgcagatctctgtgctgttggatcccccttcgcccgcgccagcctcaagagcgggaagacagagagctcgtcatacttccggaggaaggagaagatgttccggttttttatccggcgcatggtgaaggctcagagcttctactgggtggtgctgtgcgtggtggccctgaacacactgtgtgtggccatggtgcattacaaccagccgcggcggcttaccacgaccctgtattttgcagagtttgttttcctgggtctcttcctcacagagatgtccctgaagatgtatggcctggggcccagaagctacttccggtcctccttcaactgcttcgactttggggtcatcgtggggagcgtctttgaagtggtctgggcggccatcaagccgggaagctcctttgggatcagtgtgctgcgggccctccgcctgctgaggatcttcaaagtcacgaagtactggagctccctgcggaacctggtggtgtccctgctgaactccatgaagtccatcatcagcctgctcttcttgctcttcctgttcattgtggtcttcgccctgctggggatgcagctgtttgggggacagttcaacttccaggatgagactcccacaaccaacttcgacaccttccctgccgccatcctcactgtcttccagatcctgacgggagaggactggaatgcagtgatgtatcacgggatcgaatcgcaaggcggcgtcagcaaaggcatgttctcgtccttttacttcattgtcctgacactgttcggaaactacactctgctgaatgtctttctggccatcgctgtggacaacctggccaacgcccaagagctgaccaaggatgaagaggagatggaagaagcagccaatcagaagcttgctctgcaaaaggccaaagaagtggctgaagtcagccccatgtctgccgcgaacatctccatcgccgccaggcagcagaactcggccaaggcgcgctcggtgtgggagcagcgggccagccagctacggctgcagaacctgcgggccagctgcgaggcgctgtacagcgagatggaccccgaggagcggctgcgcttcgccactacgcgccacctgcggcccgacatgaagacgcacctggaccggccgctggtggtggagctgggccgcgacggcgcgcgggggcccgtgggaggcaaagcccgacctgaggctgcggaggcccccgagggcgtcgaccctccgcgcaggcaccaccggcaccgcgacaaggacaagacccccgcggcgggggaccaggaccgagcagaggccccgaaggcggagagcggggagcccggtgcccgggaggagcggccgcggccgcaccgcagccacagcaaggaggccgcggggcccccggaggcgcggagcgagcgcggccgaggcccaggccccgagggcggccggcggcaccaccggcgcggctccccggaggaggcggccgagcgggagccccgacgccaccgcgcgcaccggcaccaggatccgagcaaggagtgcgccggcgccaagggcgagcggcgcgcgcggcaccgcggcggcccccgagcggggccccgggaggcggagagcggggaggagccggcgcggcggcaccgggcccggcacaaggcgcagcctgctcacgaggctgtggagaaggagaccacggagaaggaggccacggagaaggaggctgagatagtggaagccgacaaggaaaaggagctccggaaccaccagccccgggagccacactgtgacctggagaccagtgggactgtgactgtgggtcccatgcacacactgcccagcacctgtctccagaaggtggaggaacagccagaggatgcagacaatcagcggaacgtcactcgcatgggcagtcagcccccagacccgaacactattgtacatatcccagtgatgctgacgggccctcttggggaagccacggtcgttcccagtggtaacgtggacctggaaagccaagcagaggggaagaaggaggtggaagcggatgacgtgatgaggagcggcccccggcctatcgtcccatacagctccatgttctgtttaagccccaccaacctgctccgccgcttctgccactacatcgtgaccatgaggtacttcgaggtggtcattctcgtggtcatcgccttgagcagcatcgccctggctgctgaggacccagtgcgcacagactcgcccaggaacaacgctctgaaatacctggattacattttcactggtgtctttacctttgagatggtgataaagatgatcgacttgggactgctgcttcaccctggagcctatttccgggacttgtggaacattctggacttcattgtggtcagtggcgccctggtggcgtttgctttctcaggatccaaagggaaagacatcaataccatcaagtctctgagagtccttcgtgtcctgcggcccctcaagaccatcaaacggctgcccaagctcaaggctgtgtttgactgtgtggtgaactccctgaagaatgtcctcaacatcttgattgtctacatgctcttcatgttcatatttgccgtcattgcggtgcagctcttcaaagggaagtttttctactgcacagatgaatccaaggagctggagagggactgcaggggtcagtatttggattatgagaaggaggaagtggaagctcagcccaggcagtggaagaaatacgactttcactacgacaatgtgctctgggctctgctgacgctgttcacagtgtccacgggagaaggctggcccatggtgctgaaacactccgtggatgccacctatgaggagcagggtccaagccctgggtaccgcatggagctgtccatcttctacgtggtctactttgtggtctttcccttcttcttcgtcaacatctttgtggctttgatcatcatcaccttccaggagcagggggacaaggtgatgtctgaatgcagcctggagaagaacgagagggcttgcattgacttcgccatcagcgccaaacccctgacacggtacatgccccaaaaccggcagtcgttccagtataagacgtggacatttgtggtctccccgccctttgaatacttcatcatggccatgatagccctcaacactgtggtgctgatgatgaagttctatgatgcaccctatgagtacgagctgatgctgaaatgcctgaacatcgtgttcacatccatgttctccatggaatgcgtgctgaagatcatcgcctttggggtgctgaactatttcagagatgcctggaatgtctttgactttgtcactgtgttgggaagtattactgatattttagtaacagagattgcggaaacaaacaatttcatcaacctcagcttcctccgcctctttcgagctgcgcggctgatcaagctgctccgccagggctacaccatccgcatcctgctgtggacctttgtccagtccttcaaggccctgccctacgtgtgtctgctcattgccatgctgttcttcatctacgccatcatcggcatgcaggtgtttgggaatattgccctggatgatgacaccagcatcaaccgccacaacaacttccggacgtttttgcaagccctgatgctgctgttcaggagcgccacgggggaggcctggcacgagatcatgctgtcctgcctgagcaaccaggcctgtgatgagcaggccaatgccaccgagtgtggaagtgactttgcctacttctacttcgtctccttcatcttcctgtgctcctttctgatgttgaacctctttgtggctgtgatcatggacaattttgagtacctcacgcgggactcttccatcctaggtcctcaccacttggatgagttcatccgggtctgggctgaatacgacccggctgcgtgtgggcgcatcagttacaatgacatgtttgagatgctgaaacacatgtccccgcctctggggctggggaagaaatgccctgctcgagttgcttacaagcgcctggttcgcatgaacatgcccatctccaacgaggacatgactgttcacttcacgtccacgctgatggccctcatccggacggcactggagatcaagctggccccagctgggacaaagcagcatcagtgtgacgcggagttgaggaaggagatttccgttgtgtgggccaatctgccccagaagactttggacttgctggtaccaccccataagcctgatgagatgacagtggggaaggtttatgcagctctgatgatattcgacttctacaagcagaacaaaaccaccagagaccagatgcagcaggctcctggaggcctctcccagatgggtcctgtgtccctgttccaccctctgaaggccaccctggagcagacacagccggctgtgctccgaggagcccgggttttccttcgacagaagagttccacctccctcagcaatggcggggccatacaaaaccaagagagtggcatcaaagagtctgtctcctggggcactcaaaggacccaggatgcaccccatgaggccaggccacccctggagcgtggccactccacagagatccctgtggggcggtcaggagcactggctgtggacgttcagatgcagagcataacccggaggggccctgatggggagccccagcctgggctggagagccagggtcgagcggcctccatgccccgccttgcggccgagactcagcccgtcacagatgccagccccatgaagcgctccatctccacgctggcccagcggccccgtgggactcatctttgcagcaccaccccggaccgcccaccccctagccaggcgtcgtcgcaccaccaccaccaccgctgccaccgccgcagggacaggaagcagaggtccctggagaaggggcccagcctgtctgccgatatggatggcgcaccaagcagtgctgtggggccggggctgcccccgggagaggggcctacaggctgccggcgggaacgagagcgccggcaggagcggggccggtcccaggagcggaggcagccctcatcctcctcctcggagaagcagcgcttctactcctgcgaccgctttgggggccgtgagcccccgaagcccaagccctccctcagcagccacccaacgtcgccaacagctggccaggagccgggaccccacccacagggcagtggttccgtgaatgggagccccttgctgtcaacatctggtgctagcacccccggccgcggtgggcggaggcagctcccccagacgcccctgactccccgccccagcatcacctacaagacggccaactcctcacccatccacttcgccggggctcagaccagcctccctgccttctccccaggccggctcagccgtgggctttccgaacacaacgccctgctgcagagagaccccctcagccagcccctggcccctggctctcgaattggctctgacccttacctggggcagcgtctggacagtgaggcctctgtccacgccctgcctgaggacactctcactttcgaggaggctgtggccaccaactcgggccgctcctccaggacttcctacgtgtcctccctgacctcccagtctcaccctctccgccgcgtgcccaacggttaccactgcaccctgggactcagctcgggtggccgagcacggcacagctaccaccaccctgaccaagaccactggtgctagctgcaccgtgaccgctcagacgcctgcatgcagcaggcgtgtgttccagtggatgagttttatcatccacacggggcagccggccctcgggggaggccttgcccaccttggtgaggctcctgtggcccctccctccccctcctcccctcttttactctagacgacgaataaagccctgttagaggatgcggctctctctgtccccttcctgtcctgccttcctgggtctcgtaccacacaccagaccctaaaccgcaggctgctgtgtgtggctgagaaggacccaggagtccaaatcccgtgtcctgggactcagcatccagcatgggtgcttggagccgttgtgaggagctctgcgtcctgtggggagcacccttcacgtggccgtgcggcacagagaagcagggcccacctgaaagtgcgccgagacctcgggacggaggggatggggagggggacacagtcgtggcttgtgcagcccgccagtgtcagcgaatgctcactcaggcaagctctgtcctccctggacaccgtcagccccacaggaaccgagctgggaagtgttcttgctgtggttgtgatttttaattgcaacacctctcattcttgtcacttctatatacgtgatgtagaaaaaatggaaaaccagaaaaatggggaaggaaatgttcacataactttaaaaaatcaaacctgtgaaagaaagatgtcagctttttgccacgtgtctttgtggcttatgcgaggagactccctgtgcagccctgtccggtccaggtggacgtagacggcccctggctctgctgctcttgaccaagtgcctgaccgccaggccctcacacccaggctcctgggcactgtggtgtgaggcgaggcctcgggatccatcaccgcaggatgctgtgaaaagtactcgcgatggcagccaggtagcaagcccttgccagtggagagcactggatgtcatggtggcaaacaaggcagccatttgctgtcctcctcccacgagtggaaggggtttccaaggaagccacagggcagctgaccacgtgcttgtgtgaggcattttcagtctgttctgcatatgattctcagggcacactctgtggtatgtgaaataggtttccttccacatacagcagaagagaggcaaaggctggtaggaaggaggaagacattggctgggggcttggatgtggggccgtcagggcaggagggaggaagccccagctggaatgaaactcagagcaagtgaccgagggaggacacggctcctgccactgaggccgggcacctgatgcccagcactgtcctggcgccagacacagggagcaggcagtcaagtgaggtctgacccccatggccacgctcaggagagaaagaccatgctcaggacactgtccaaggtgcacaagatgctgggaggtcccttgtttggtgaagaaagggagcatttagagcagttgatggtggtgtgtcctccgtgttctgaaattccagatgatctgtgttggattcttggcttctaccccatgattctcctcaaagaaattgtgtgtgatgtgtgtgtgtgtgtgtgtgtgtgtgtgtctgtgtcacaggagatgcagtgcctgtacaggtgtgttcagtgtgtggatgtcattaacccatagggctatgcaacaaaagacacatttaatagaagtaaaacacacaagaccgctgcctggtctcggggttcagcatgattgtgaccaaacctttttatagaatttccttacctgaaggcacaacactctgaaactttaaagataacagagtattttattccaatagaataaaccaggaatctcggactgtgcatgtgatcactgtgctcctgttgcaaagtagaaggatgtgtattttgacactgacgttttgtctcttgttccccagcccccagcccatgttatcttgggtgtcgaatgtgtccattccatgcagaaccacagccatttccccaggcagtgttgggtcgagaatccacttttctaaacccacacagcctagctggcttgtctagactcttctaggcattggaattgatgaaaactacagggagcggggaaaggagacattatgtcttgttttcctgactttgggttttgtttctcactgtgtcttctccggctatcatatatgtcccctgaatctcatagtgagctgccaaatttgaagtgcatcacccagttgtctgcatctggaaccagtcaagcagtggctgtagtttgaacaagttatgtgtgcatgtaacatatatacatatatacatatatacaagtatgtgcatgataatgtatatcttcgtactttttgatacaatgtattcatttgttaatttttaattatatttgatataaatcaaaggtttgttgcaaaactttatatttaagaagtgttaaaaaaaaaaaaaagtcccaaccatgcaacacaactgggacctacttaaaaagaaattctgtgattgactagtttgctgcctgagtcatatttatcagccaaactttggattctgctgttgtttctacaatgacattttgtatgaagcaaagtccttgaattaaaataaaaacttagcaaaaaatcaaaaacaaaacccca

SEQ ID NO: 4203 - DNA, 9642 bp, Homo sapiens
  source 1..9642: mol_type = unassigned DNA
atggtccgcttcggggacgagctgggcggccgctatgggggccccggcggcggagagcgggcccggggcggcggggccggcggggcggggggcccgggtcccggggggctgcagcccggccagcgggtcctctacaagcaatcgatcgcgcagcgcgcgcggaccatggcgctgtacaaccccatcccggtcaagcagaactgcttcaccgtcaaccgctcgctcttcgtcttcagcgaggacaacgtcgtccgcaaatacgcgaagcgcatcaccgagtggcctccattcgagtatatgatcctggccaccatcatcgccaactgcatcgtgctggccctggagcagcacctccctgatggggacaaaacgcccatgtccgagcggctggacgacacggagccctatttcatcgggatcttttgcttcgaggcagggatcaaaatcatcgctctgggctttgtcttccacaagggctcttacctgcggaacggctggaacgtcatggacttcgtggtcgtcctcacagggatccttgccacggctggaactgacttcgacctgcgaacactgagggctgtgcgtgtgctgaggcccctgaagctggtgtctgggattccaagtttgcaggtggtgctcaagtccatcatgaaggccatggttccactcctgcagattgggctgcttctcttctttgccatcctcatgtttgccatcattggcctggagttctacatgggcaagttccacaaggcctgtttccccaacagcacagatgcggagcccgtgggtgacttcccctgtggcaaggaggccccagcccggctgtgcgagggcgacactgagtgccgggagtactggccaggacccaactttggcatcaccaactttgacaatatcctgtttgccatcttgacggtgttccagtgcatcaccatggagggctggactgacatcctctataatacaaacgatgcggccggcaacacctggaactggctctacttcatccctctcatcatcatcggctccttcttcatgctcaacctggtgctgggcgtgctctcgggggagtttgccaaggagcgagagagggtggagaaccgccgcgccttcctgaagctgcgccggcagcagcagatcgagcgagagctcaacgggtacctggagtggatcttcaaggcggaggaagtcatgctggccgaggaggacaggaatgcagaggagaagtcccctttggacgcagtgctgaagagagcggccaccaagaagagcagaaatgacctgatccacgcagaggagggagaggaccggtttgcagatctctgtgctgttggatcccccttcgcccgcgccagcctcaagagcgggaagacagagagctcgtcatacttccggaggaaggagaagatgttccggttttttatccggcgcatggtgaaggctcagagcttctactgggtggtgctgtgcgtggtggccctgaacacactgtgtgtggccatggtgcattacaaccagccgcggcggcttaccacgaccctgtattttgcagagtttgttttcctgggtctcttcctcacagagatgtccctgaagatgtatggcctggggcccagaagctacttccggtcctccttcaactgcttcgactttggggtcatcgtggggagcgtctttgaagtggtctgggcggccatcaagccgggaagctcctttgggatcagtgtgctgcgggccctccgcctgctgaggatcttcaaagtcacgaagtactggagctccctgcggaacctggtggtgtccctgctgaactccatgaagtccatcatcagcctgctcttcttgctcttcctgttcattgtggtcttcgccctgctggggatgcagctgtttgggggacagttcaacttccaggatgagactcccacaaccaacttcgacaccttccctgccgccatcctcactgtcttccagatcctgacgggagaggactggaatgcagtgatgtatcacgggatcgaatcgcaaggcggcgtcagcaaaggcatgttctcgtccttttacttcattgtcctgacactgttcggaaactacactctgctgaatgtctttctggccatcgctgtggacaacctggccaacgcccaagagctgaccaaggatgaagaggagatggaagaagcagccaatcagaagcttgctctgcaaaaggccaaagaagtggctgaagtcagccccatgtctgccgcgaacatctccatcgccgccaggcagcagaactcggccaaggcgcgctcggtgtgggagcagcgggccagccagctacggctgcagaacctgcgggccagctgcgaggcgctgtacagcgagatggaccccgaggagcggctgcgcttcgccactacgcgccacctgcggcccgacatgaagacgcacctggaccggccgctggtggtggagctgggccgcgacggcgcgcgggggcccgtgggaggcaaagcccgacctgaggctgcggaggcccccgagggcgtcgaccctccgcgcaggcaccaccggcaccgcgacaaggacaagacccccgcggcgggggaccaggaccgagcagaggccccgaaggcggagagcggggagcccggtgcccgggaggagcggccgcggccgcaccgcagccacagcaaggaggccgcggggcccccggaggcgcggagcgagcgcggccgaggcccaggccccgagggcggccggcggcaccaccggcgcggctccccggaggaggcggccgagcgggagccccgacgccaccgcgcgcaccggcaccaggatccgagcaaggagtgcgccggcgccaagggcgagcggcgcgcgcggcaccgcggcggcccccgagcggggccccgggaggcggagagcggggaggagccggcgcggcggcaccgggcccggcacaaggcgcagcctgctcacgaggctgtggagaaggagaccacggagaaggaggccacggagaaggaggctgagatagtggaagccgacaaggaaaaggagctccggaaccaccagccccgggagccacactgtgacctggagaccagtgggactgtgactgtgggtcccatgcacacactgcccagcacctgtctccagaaggtggaggaacagccagaggatgcagacaatcagcggaacgtcactcgcatgggcagtcagcccccagacccgaacactattgtacatatcccagtgatgctgacgggccctcttggggaagccacggtcgttcccagtggtaacgtggacctggaaagccaagcagaggggaagaaggaggtggaagcggatgacgtgatgaggagcggcccccggcctatcgtcccatacagctccatgttctgtttaagccccaccaacctgctccgccgcttctgccactacatcgtgaccatgaggtacttcgaggtggtcattctcgtggtcatcgccttgagcagcatcgccctggctgctgaggacccagtgcgcacagactcgcccaggaacaacgctctgaaatacctggattacattttcactggtgtctttacctttgagatggtgataaagatgatcgacttgggactgctgcttcaccctggagcctatttccgggacttgtggaacattctggacttcattgtggtcagtggcgccctggtggcgtttgctttctcaggatccaaagggaaagacatcaataccatcaagtctctgagagtccttcgtgtcctgcggcccctcaagaccatcaaacggctgcccaagctcaaggctgtgtttgactgtgtggtgaactccctgaagaatgtcctcaacatcttgattgtctacatgctcttcatgttcatatttgccgtcattgcggtgcagctcttcaaagggaagtttttctactgcacagatgaatccaaggagctggagagggactgcaggggtcagtatttggattatgagaaggaggaagtggaagctcagcccaggcagtggaagaaatacgactttcactacgacaatgtgctctgggctctgctgacgctgttcacagtgtccacgggagaaggctggcccatggtgctgaaacactccgtggatgccacctatgaggagcagggtccaagccctgggtaccgcatggagctgtccatcttctacgtggtctactttgtggtctttcccttcttcttcgtcaacatctttgtggctttgatcatcatcaccttccaggagcagggggacaaggtgatgtctgaatgcagcctggagaagaacgagagggcttgcattgacttcgccatcagcgccaaacccctgacacggtacatgccccaaaaccggcagtcgttccagtataagacgtggacatttgtggtctccccgccctttgaatacttcatcatggccatgatagccctcaacactgtggtgctgatgatgaagttctatgatgcaccctatgagtacgagctgatgctgaaatgcctgaacatcgtgttcacatccatgttctccatggaatgcgtgctgaagatcatcgcctttggggtgctgaactatttcagagatgcctggaatgtctttgactttgtcactgtgttgggaagtattactgatattttagtaacagagattgcgaacaatttcatcaacctcagcttcctccgcctctttcgagctgcgcggctgatcaagctgctccgccagggctacaccatccgcatcctgctgtggacctttgtccagtccttcaaggccctgccctacgtgtgtctgctcattgccatgctgttcttcatctacgccatcatcggcatgcaggtgtttgggaatattgccctggatgatgacaccagcatcaaccgccacaacaacttccggacgtttttgcaagccctgatgctgctgttcaggagcgccacgggggaggcctggcacgagatcatgctgtcctgcctgagcaaccaggcctgtgatgagcaggccaatgccaccgagtgtggaagtgactttgcctacttctacttcgtctccttcatcttcctgtgctcctttctgatgttgaacctctttgtggctgtgatcatggacaattttgagtacctcacgcgggactcttccatcctaggtcctcaccacttggatgagttcatccgggtctgggctgaatacgacccggctgcgtgtgggcgcatcagttacaatgacatgtttgagatgctgaaacacatgtccccgcctctggggctggggaagaaatgccctgctcgagttgcttacaagcgcctggttcgcatgaacatgcccatctccaacgaggacatgactgttcacttcacgtccacgctgatggccctcatccggacggcactggagatcaagctggccccagctgggacaaagcagcatcagtgtgacgcggagttgaggaaggagatttccgttgtgtgggccaatctgccccagaagactttggacttgctggtaccaccccataagcctgatgagatgacagtggggaaggtttatgcagctctgatgatattcgacttctacaagcagaacaaaaccaccagagaccagatgcagcaggctcctggaggcctctcccagatgggtcctgtgtccctgttccaccctctgaaggccaccctggagcagacacagccggctgtgctccgaggagcccgggttttccttcgacagaagagttccacctccctcagcaatggcggggccatacaaaaccaagagagtggcatcaaagagtctgtctcctggggcactcaaaggacccaggatgcaccccatgaggccaggccacccctggagcgtggccactccacagagatccctgtggggcggtcaggagcactggctgtggacgttcagatgcagagcataacccggaggggccctgatggggagccccagcctgggctggagagccagggtcgagcggcctccatgccccgccttgcggccgagactcagcccgtcacagatgccagccccatgaagcgctccatctccacgctggcccagcggccccgtgggactcatctttgcagcaccaccccggaccgcccaccccctagccaggcgtcgtcgcaccaccaccaccaccgctgccaccgccgcagggacaggaagcagaggtccctggagaaggggcccagcctgtctgccgatatggatggcgcaccaagcagtgctgtggggccggggctgcccccgggagaggggcctacaggctgccggcgggaacgagagcgccggcaggagcggggccggtcccaggagcggaggcagccctcatcctcctcctcggagaagcagcgcttctactcctgcgaccgctttgggggccgtgagcccccgaagcccaagccctccctcagcagccacccaacgtcgccaacagctggccaggagccgggaccccacccacagggcagtggttccgtgaatgggagccccttgctgtcaacatctggtgctagcacccccggccgcggtgggcggaggcagctcccccagacgcccctgactccccgccccagcatcacctacaagacggccaactcctcacccatccacttcgccggggctcagaccagcctccctgccttctccccaggccggctcagccgtgggctttccgaacacaacgccctgctgcagagagaccccctcagccagcccctggcccctggctctcgaattggctctgacccttacctggggcagcgtctggacagtgaggcctctgtccacgccctgcctgaggacactctcactttcgaggaggctgtggccaccaactcgggccgctcctccaggacttcctacgtgtcctccctgacctcccagtctcaccctctccgccgcgtgcccaacggttaccactgcaccctgggactcagctcgggtggccgagcacggcacagctaccaccaccctgaccaagaccactggtgctagctgcaccgtgaccgctcagacgcctgcatgcagcaggcgtgtgttccagtggatgagttttatcatccacacggggcagccggccctcgggggaggccttgcccaccttggtgaggctcctgtggcccctccctccccctcctcccctcttttactctagacgacgaataaagccctgttagaggatgcggctctctctgtccccttcctgtcctgccttcctgggtctcgtaccacacaccagaccctaaaccgcaggctgctgtgtgtggctgagaaggacccaggagtccaaatcccgtgtcctgggactcagcatccagcatgggtgcttggagccgttgtgaggagctctgcgtcctgtggggagcacccttcacgtggccgtgcggcacagagaagcagggcccacctgaaagtgcgccgagacctcgggacggaggggatggggagggggacacagtcgtggcttgtgcagcccgccagtgtcagcgaatgctcactcaggcaagctctgtcctccctggacaccgtcagccccacaggaaccgagctgggaagtgttcttgctgtggttgtgatttttaattgcaacacctctcattcttgtcacttctatatacgtgatgtagaaaaaatggaaaaccagaaaaatggggaaggaaatgttcacataactttaaaaaatcaaacctgtgaaagaaagatgtcagctttttgccacgtgtctttgtggcttatgcgaggagactccctgtgcagccctgtccggtccaggtggacgtagacggcccctggctctgctgctcttgaccaagtgcctgaccgccaggccctcacacccaggctcctgggcactgtggtgtgaggcgaggcctcgggatccatcaccgcaggatgctgtgaaaagtactcgcgatggcagccaggtagcaagcccttgccagtggagagcactggatgtcatggtggcaaacaaggcagccatttgctgtcctcctcccacgagtggaaggggtttccaaggaagccacagggcagctgaccacgtgcttgtgtgaggcattttcagtctgttctgcatatgattctcagggcacactctgtggtatgtgaaataggtttccttccacatacagcagaagagaggcaaaggctggtaggaaggaggaagacattggctgggggcttggatgtggggccgtcagggcaggagggaggaagccccagctggaatgaaactcagagcaagtgaccgagggaggacacggctcctgccactgaggccgggcacctgatgcccagcactgtcctggcgccagacacagggagcaggcagtcaagtgaggtctgacccccatggccacgctcaggagagaaagaccatgctcaggacactgtccaaggtgcacaagatgctgggaggtcccttgtttggtgaagaaagggagcatttagagcagttgatggtggtgtgtcctccgtgttctgaaattccagatgatctgtgttggattcttggcttctaccccatgattctcctcaaagaaattgtgtgtgatgtgtgtgtgtgtgtgtgtgtgtgtgtgtctgtgtcacaggagatgcagtgcctgtacaggtgtgttcagtgtgtggatgtcattaacccatagggctatgcaacaaaagacacatttaatagaagtaaaacacacaagaccgctgcctggtctcggggttcagcatgattgtgaccaaacctttttatagaatttccttacctgaaggcacaacactctgaaactttaaagataacagagtattttattccaatagaataaaccaggaatctcggactgtgcatgtgatcactgtgctcctgttgcaaagtagaaggatgtgtattttgacactgacgttttgtctcttgttccccagcccccagcccatgttatcttgggtgtcgaatgtgtccattccatgcagaaccacagccatttccccaggcagtgttgggtcgagaatccacttttctaaacccacacagcctagctggcttgtctagactcttctaggcattggaattgatgaaaactacagggagcggggaaaggagacattatgtcttgttttcctgactttgggttttgtttctcactgtgtcttctccggctatcatatatgtcccctgaatctcatagtgagctgccaaatttgaagtgcatcacccagttgtctgcatctggaaccagtcaagcagtggctgtagtttgaacaagttatgtgtgcatgtaacatatatacatatatacatatatacaagtatgtgcatgataatgtatatcttcgtactttttgatacaatgtattcatttgttaatttttaattatatttgatataaatcaaaggtttgttgcaaaactttatatttaagaagtgttaaaaaaaaaaaaaagtcccaaccatgcaacacaactgggacctacttaaaaagaaattctgtgattgactagtttgctgcctgagtcatatttatcagccaaactttggattctgctgttgtttctacaatgacattttgtatgaagcaaagtccttgaattaaaataaaaacttagcaaaaaatcaaaaacaaaacccca

SEQ ID NO: 4204 - DNA, 9758 bp, Homo sapiens
  source 1..9758: mol_type = unassigned DNA
gggcgaggtccgctgcggtcccggcggctccgtggctgctccgctctgagcgcctggcgcgccccgcgccctccctgccggggccgctgggccggggatgcacgcggggcccgggagccatggtccgcttcggggacgagctgggcggccgctatgggggccccggcggcggagagcgggcccggggcggcggggccggcggggcggggggcccgggtcccggggggctgcagcccggccagcgggtcctctacaagcaatcgatcgcgcagcgcgcgcggaccatggcgctgtacaaccccatcccggtcaagcagaactgcttcaccgtcaaccgctcgctcttcgtcttcagcgaggacaacgtcgtccgcaaatacgcgaagcgcatcaccgagtggcctccattcgagtatatgatcctggccaccatcatcgccaactgcatcgtgctggccctggagcagcacctccctgatggggacaaaacgcccatgtccgagcggctggacgacacggagccctatttcatcgggatcttttgcttcgaggcagggatcaaaatcatcgctctgggctttgtcttccacaagggctcttacctgcggaacggctggaacgtcatggacttcgtggtcgtcctcacagggatccttgccacggctggaactgacttcgacctgcgaacactgagggctgtgcgtgtgctgaggcccctgaagctggtgtctgggattccaagtttgcaggtggtgctcaagtccatcatgaaggccatggttccactcctgcagattgggctgcttctcttctttgccatcctcatgtttgccatcattggcctggagttctacatgggcaagttccacaaggcctgtttccccaacagcacagatgcggagcccgtgggtgacttcccctgtggcaaggaggccccagcccggctgtgcgagggcgacactgagtgccgggagtactggccaggacccaactttggcatcaccaactttgacaatatcctgtttgccatcttgacggtgttccagtgcatcaccatggagggctggactgacatcctctataatacaaacgatgcggccggcaacacctggaactggctctacttcatccctctcatcatcatcggctccttcttcatgctcaacctggtgctgggcgtgctctcgggggagtttgccaaggagcgagagagggtggagaaccgccgcgccttcctgaagctgcgccggcagcagcagatcgagcgagagctcaacgggtacctggagtggatcttcaaggcggaggaagtcatgctggccgaggaggacaggaatgcagaggagaagtcccctttggacgtgctgaagagagcggccaccaagaagagcagaaatgacctgatccacgcagaggagggagaggaccggtttgcagatctctgtgctgttggatcccccttcgcccgcgccagcctcaagagcgggaagacagagagctcgtcatacttccggaggaaggagaagatgttccggttttttatccggcgcatggtgaaggctcagagcttctactgggtggtgctgtgcgtggtggccctgaacacactgtgtgtggccatggtgcattacaaccagccgcggcggcttaccacgaccctgtattttgcagagtttgttttcctgggtctcttcctcacagagatgtccctgaagatgtatggcctggggcccagaagctacttccggtcctccttcaactgcttcgactttggggtcatcgtggggagcgtctttgaagtggtctgggcggccatcaagccgggaagctcctttgggatcagtgtgctgcgggccctccgcctgctgaggatcttcaaagtcacgaagtactggagctccctgcggaacctggtggtgtccctgctgaactccatgaagtccatcatcagcctgctcttcttgctcttcctgttcattgtggtcttcgccctgctggggatgcagctgtttgggggacagttcaacttccaggatgagactcccacaaccaacttcgacaccttccctgccgccatcctcactgtcttccagatcctgacgggagaggactggaatgcagtgatgtatcacgggatcgaatcgcaaggcggcgtcagcaaaggcatgttctcgtccttttacttcattgtcctgacactgttcggaaactacactctgctgaatgtctttctggccatcgctgtggacaacctggccaacgcccaagagctgaccaaggatgaagaggagatggaagaagcagccaatcagaagcttgctctgcaaaaggccaaagaagtggctgaagtcagccccatgtctgccgcgaacatctccatcgccgccaggcagcagaactcggccaaggcgcgctcggtgtgggagcagcgggccagccagctacggctgcagaacctgcgggccagctgcgaggcgctgtacagcgagatggaccccgaggagcggctgcgcttcgccactacgcgccacctgcggcccgacatgaagacgcacctggaccggccgctggtggtggagctgggccgcgacggcgcgcgggggcccgtgggaggcaaagcccgacctgaggctgcggaggcccccgagggcgtcgaccctccgcgcaggcaccaccggcaccgcgacaaggacaagacccccgcggcgggggaccaggaccgagcagaggccccgaaggcggagagcggggagcccggtgcccgggaggagcggccgcggccgcaccgcagccacagcaaggaggccgcggggcccccggaggcgcggagcgagcgcggccgaggcccaggccccgagggcggccggcggcaccaccggcgcggctccccggaggaggcggccgagcgggagccccgacgccaccgcgcgcaccggcaccaggatccgagcaaggagtgcgccggcgccaagggcgagcggcgcgcgcggcaccgcggcggcccccgagcggggccccgggaggcggagagcggggaggagccggcgcggcggcaccgggcccggcacaaggcgcagcctgctcacgaggctgtggagaaggagaccacggagaaggaggccacggagaaggaggctgagatagtggaagccgacaaggaaaaggagctccggaaccaccagccccgggagccacactgtgacctggagaccagtgggactgtgactgtgggtcccatgcacacactgcccagcacctgtctccagaaggtggaggaacagccagaggatgcagacaatcagcggaacgtcactcgcatgggcagtcagcccccagacccgaacactattgtacatatcccagtgatgctgacgggccctcttggggaagccacggtcgttcccagtggtaacgtggacctggaaagccaagcagaggggaagaaggaggtggaagcggatgacgtgatgaggagcggcccccggcctatcgtcccatacagctccatgttctgtttaagccccaccaacctgctccgccgcttctgccactacatcgtgaccatgaggtacttcgaggtggtcattctcgtggtcatcgccttgagcagcatcgccctggctgctgaggacccagtgcgcacagactcgcccaggaacaacgctctgaaatacctggattacattttcactggtgtctttacctttgagatggtgataaagatgatcgacttgggactgctgcttcaccctggagcctatttccgggacttgtggaacattctggacttcattgtggtcagtggcgccctggtggcgtttgctttctcaggatccaaagggaaagacatcaataccatcaagtctctgagagtccttcgtgtcctgcggcccctcaagaccatcaaacggctgcccaagctcaaggctgtgtttgactgtgtggtgaactccctgaagaatgtcctcaacatcttgattgtctacatgctcttcatgttcatatttgccgtcattgcggtgcagctcttcaaagggaagtttttctactgcacagatgaatccaaggagctggagagggactgcaggggtcagtatttggattatgagaaggaggaagtggaagctcagcccaggcagtggaagaaatacgactttcactacgacaatgtgctctgggctctgctgacgctgttcacagtgtccacgggagaaggctggcccatggtgctgaaacactccgtggatgccacctatgaggagcagggtccaagccctgggtaccgcatggagctgtccatcttctacgtggtctactttgtggtctttcccttcttcttcgtcaacatctttgtggctttgatcatcatcaccttccaggagcagggggacaaggtgatgtctgaatgcagcctggagaagaacgagagggcttgcattgacttcgccatcagcgccaaacccctgacacggtacatgccccaaaaccggcagtcgttccagtataagacgtggacatttgtggtctccccgccctttgaatacttcatcatggccatgatagccctcaacactgtggtgctgatgatgaagttctatgatgcaccctatgagtacgagctgatgctgaaatgcctgaacatcgtgttcacatccatgttctccatggaatgcgtgctgaagatcatcgcctttggggtgctgaactatttcagagatgcctggaatgtctttgactttgtcactgtgttgggaagtattactgatattttagtaacagagattgcgaacaatttcatcaacctcagcttcctccgcctctttcgagctgcgcggctgatcaagctgctccgccagggctacaccatccgcatcctgctgtggacctttgtccagtccttcaaggccctgccctacgtgtgtctgctcattgccatgctgttcttcatctacgccatcatcggcatgcaggtgtttgggaatattgccctggatgatgacaccagcatcaaccgccacaacaacttccggacgtttttgcaagccctgatgctgctgttcaggagcgccacgggggaggcctggcacgagatcatgctgtcctgcctgagcaaccaggcctgtgatgagcaggccaatgccaccgagtgtggaagtgactttgcctacttctacttcgtctccttcatcttcctgtgctcctttctgatgttgaacctctttgtggctgtgatcatggacaattttgagtacctcacgcgggactcttccatcctaggtcctcaccacttggatgagttcatccgggtctgggctgaatacgacccggctgcgtgtgggcgcatcagttacaatgacatgtttgagatgctgaaacacatgtccccgcctctggggctggggaagaaatgccctgctcgagttgcttacaagcgcctggttcgcatgaacatgcccatctccaacgaggacatgactgttcacttcacgtccacgctgatggccctcatccggacggcactggagatcaagctggccccagctgggacaaagcagcatcagtgtgacgcggagttgaggaaggagatttccgttgtgtgggccaatctgccccagaagactttggacttgctggtaccaccccataagcctgatgagatgacagtggggaaggtttatgcagctctgatgatattcgacttctacaagcagaacaaaaccaccagagaccagatgcagcaggctcctggaggcctctcccagatgggtcctgtgtccctgttccaccctctgaaggccaccctggagcagacacagccggctgtgctccgaggagcccgggttttccttcgacagaagagttccacctccctcagcaatggcggggccatacaaaaccaagagagtggcatcaaagagtctgtctcctggggcactcaaaggacccaggatgcaccccatgaggccaggccacccctggagcgtggccactccacagagatccctgtggggcggtcaggagcactggctgtggacgttcagatgcagagcataacccggaggggccctgatggggagccccagcctgggctggagagccagggtcgagcggcctccatgccccgccttgcggccgagactcagcccgtcacagatgccagccccatgaagcgctccatctccacgctggcccagcggccccgtgggactcatctttgcagcaccaccccggaccgcccaccccctagccaggcgtcgtcgcaccaccaccaccaccgctgccaccgccgcagggacaggaagcagaggtccctggagaaggggcccagcctgtctgccgatatggatggcgcaccaagcagtgctgtggggccggggctgcccccgggagaggggcctacaggctgccggcgggaacgagagcgccggcaggagcggggccggtcccaggagcggaggcagccctcatcctcctcctcggagaagcagcgcttctactcctgcgaccgctttgggggccgtgagcccccgaagcccaagccctccctcagcagccacccaacgtcgccaacagctggccaggagccgggaccccacccacagggcagtggttccgtgaatgggagccccttgctgtcaacatctggtgctagcacccccggccgcggtgggcggaggcagctcccccagacgcccctgactccccgccccagcatcacctacaagacggccaactcctcacccatccacttcgccggggctcagaccagcctccctgccttctccccaggccggctcagccgtgggctttccgaacacaacgccctgctgcagagagaccccctcagccagcccctggcccctggctctcgaattggctctgacccttacctggggcagcgtctggacagtgaggcctctgtccacgccctgcctgaggacactctcactttcgaggaggctgtggccaccaactcgggccgctcctccaggacttcctacgtgtcctccctgacctcccagtctcaccctctccgccgcgtgcccaacggttaccactgcaccctgggactcagctcgggtggccgagcacggcacagctaccaccaccctgaccaagaccactggtgctagctgcaccgtgaccgctcagacgcctgcatgcagcaggcgtgtgttccagtggatgagttttatcatccacacggggcagccggccctcgggggaggccttgcccaccttggtgaggctcctgtggcccctccctccccctcctcccctcttttactctagacgacgaataaagccctgttagaggatgcggctctctctgtccccttcctgtcctgccttcctgggtctcgtaccacacaccagaccctaaaccgcaggctgctgtgtgtggctgagaaggacccaggagtccaaatcccgtgtcctgggactcagcatccagcatgggtgcttggagccgttgtgaggagctctgcgtcctgtggggagcacccttcacgtggccgtgcggcacagagaagcagggcccacctgaaagtgcgccgagacctcgggacggaggggatggggagggggacacagtcgtggcttgtgcagcccgccagtgtcagcgaatgctcactcaggcaagctctgtcctccctggacaccgtcagccccacaggaaccgagctgggaagtgttcttgctgtggttgtgatttttaattgcaacacctctcattcttgtcacttctatatacgtgatgtagaaaaaatggaaaaccagaaaaatggggaaggaaatgttcacataactttaaaaaatcaaacctgtgaaagaaagatgtcagctttttgccacgtgtctttgtggcttatgcgaggagactccctgtgcagccctgtccggtccaggtggacgtagacggcccctggctctgctgctcttgaccaagtgcctgaccgccaggccctcacacccaggctcctgggcactgtggtgtgaggcgaggcctcgggatccatcaccgcaggatgctgtgaaaagtactcgcgatggcagccaggtagcaagcccttgccagtggagagcactggatgtcatggtggcaaacaaggcagccatttgctgtcctcctcccacgagtggaaggggtttccaaggaagccacagggcagctgaccacgtgcttgtgtgaggcattttcagtctgttctgcatatgattctcagggcacactctgtggtatgtgaaataggtttccttccacatacagcagaagagaggcaaaggctggtaggaaggaggaagacattggctgggggcttggatgtggggccgtcagggcaggagggaggaagccccagctggaatgaaactcagagcaagtgaccgagggaggacacggctcctgccactgaggccgggcacctgatgcccagcactgtcctggcgccagacacagggagcaggcagtcaagtgaggtctgacccccatggccacgctcaggagagaaagaccatgctcaggacactgtccaaggtgcacaagatgctgggaggtcccttgtttggtgaagaaagggagcatttagagcagttgatggtggtgtgtcctccgtgttctgaaattccagatgatctgtgttggattcttggcttctaccccatgattctcctcaaagaaattgtgtgtgatgtgtgtgtgtgtgtgtgtgtgtgtgtgtctgtgtcacaggagatgcagtgcctgtacaggtgtgttcagtgtgtggatgtcattaacccatagggctatgcaacaaaagacacatttaatagaagtaaaacacacaagaccgctgcctggtctcggggttcagcatgattgtgaccaaacctttttatagaatttccttacctgaaggcacaacactctgaaactttaaagataacagagtattttattccaatagaataaaccaggaatctcggactgtgcatgtgatcactgtgctcctgttgcaaagtagaaggatgtgtattttgacactgacgttttgtctcttgttccccagcccccagcccatgttatcttgggtgtcgaatgtgtccattccatgcagaaccacagccatttccccaggcagtgttgggtcgagaatccacttttctaaacccacacagcctagctggcttgtctagactcttctaggcattggaattgatgaaaactacagggagcggggaaaggagacattatgtcttgttttcctgactttgggttttgtttctcactgtgtcttctccggctatcatatatgtcccctgaatctcatagtgagctgccaaatttgaagtgcatcacccagttgtctgcatctggaaccagtcaagcagtggctgtagtttgaacaagttatgtgtgcatgtaacatatatacatatatacatatatacaagtatgtgcatgataatgtatatcttcgtactttttgatacaatgtattcatttgttaatttttaattatatttgatataaatcaaaggtttgttgcaaaactttatatttaagaagtgttaaaaaaaaaaaaaagtcccaaccatgcaacacaactgggacctacttaaaaagaaattctgtgattgactagtttgctgcctgagtcatatttatcagccaaactttggattctgctgttgtttctacaatgacattttgtatgaagcaaagtccttgaattaaaataaaaacttagcaaaaaatcaaaaacaaaacccca

SEQ ID NO: 4205 - DNA, 683 bp, Homo sapiens
  source 1..683: mol_type = unassigned DNA
gggaatattgccctggatgatgacaccagcatcaaccgccacaacaacttccggacgtttttgcaagccctgatgctgctgttcaggagcgccacgggggaggcctggcacgagatcatgctgtcctgcctgagcaaccaggcctgtgatgagcaggccaatgccaccgagtgtggaagtgactttgcctacttctacttcgtctccttcatcttcctgtgctcctttctgatgttgaacctctttgtggctgtgatcatggacaattttgagtacctcacgcgggactcttccatcctaggtcctcaccacttggatgagttcatccgggtctgggctgaatacgacccggctgcgtgttgccggattcattataaggatatgtacagtttgttgcgttgtattgcgccacccgttggcttagggaagaactgccctcgtaggttggcctacaagcgcctggttcgcatgaacatgcccatctccaacgaggacatgactgttcacttcacgtccacgctgatggccctcatccggacggcactggagatcaagctggccccagctgggacaaagcagcatcagtgtgacgcggagttgaggaaggagatttccgttgtgtgggccaatctgccccagaagactttggacttgctggtaccaccccataagcgtaagtgtga

SEQ ID NO: 4206 - DNA, 448 bp, Homo sapiens
  source 1..448: mol_type = unassigned DNA
gcggcggcaccgggcccggcacaaggcgcagcctgctcacgaggctgtggagaaggagaccacggagaaggaggccacggagaaggaggctgagatagtggaagccgacaaggaaaaggagctccggaaccaccagccccgggagccacactgtgacctggagaccagtgggactgtgactgtgggtcccatgcacacactgcccagcacctgtctccagaaggtggaggaacagccagaggatgcagacaatcagcggaacgtcactcgcatgggcagtcagcccccagacccgaacactattgtacatatcccagtgatgctgacgggccctcttggggaagccacggtcgttcccacacttgaaaaaaacgtgtgcctcttccttctgacctccatggtttctgatgagaaatccactgtcattcgaattgttttcttcctatag

SEQ ID NO: 4207 - DNA, 9790 bp, Homo sapiens
  source 1..9790: mol_type = unassigned DNA
gcggcggcggctgcggcggtggggccgggcgaggtccgctgcggtcccggcggctccgtggctgctccgctctgagcgcctggcgcgccccgcgccctccctgccggggccgctgggccggggatgcacgcggggcccgggagccatggtccgcttcggggacgagctgggcggccgctatgggggccccggcggcggagagcgggcccggggcggcggggccggcggggcggggggcccgggtcccggggggctgcagcccggccagcgggtcctctacaagcaatcgatcgcgcagcgcgcgcggaccatggcgctgtacaaccccatcccggtcaagcagaactgcttcaccgtcaaccgctcgctcttcgtcttcagcgaggacaacgtcgtccgcaaatacgcgaagcgcatcaccgagtggcctccattcgagtatatgatcctggccaccatcatcgccaactgcatcgtgctggccctggagcagcacctccctgatggggacaaaacgcccatgtccgagcggctggacgacacggagccctatttcatcgggatcttttgcttcgaggcagggatcaaaatcatcgctctgggctttgtcttccacaagggctcttacctgcggaacggctggaacgtcatggacttcgtggtcgtcctcacagggatccttgccacggctggaactgacttcgacctgcgaacactgagggctgtgcgtgtgctgaggcccctgaagctggtgtctgggattccaagtttgcaggtggtgctcaagtccatcatgaaggccatggttccactcctgcagattgggctgcttctcttctttgccatcctcatgtttgccatcattggcctggagttctacatgggcaagttccacaaggcctgtttccccaacagcacagatgcggagcccgtgggtgacttcccctgtggcaaggaggccccagcccggctgtgcgagggcgacactgagtgccgggagtactggccaggacccaactttggcatcaccaactttgacaatatcctgtttgccatcttgacggtgttccagtgcatcaccatggagggctggactgacatcctctataatacaaacgatgcggccggcaacacctggaactggctctacttcatccctctcatcatcatcggctccttcttcatgctcaacctggtgctgggcgtgctctcgggggagtttgccaaggagcgagagagggtggagaaccgccgcgccttcctgaagctgcgccggcagcagcagatcgagcgagagctcaacgggtacctggagtggatcttcaaggcggaggaagtcatgctggccgaggaggacaggaatgcagaggagaagtcccctttggacgtgctgaagagagcggccaccaagaagagcagaaatgacctgatccacgcagaggagggagaggaccggtttgcagatctctgtgctgttggatcccccttcgcccgcgccagcctcaagagcgggaagacagagagctcgtcatacttccggaggaaggagaagatgttccggttttttatccggcgcatggtgaaggctcagagcttctactgggtggtgctgtgcgtggtggccctgaacacactgtgtgtggccatggtgcattacaaccagccgcggcggcttaccacgaccctgtattttgcagagtttgttttcctgggtctcttcctcacagagatgtccctgaagatgtatggcctggggcccagaagctacttccggtcctccttcaactgcttcgactttggggtcatcgtggggagcgtctttgaagtggtctgggcggccatcaagccgggaagctcctttgggatcagtgtgctgcgggccctccgcctgctgaggatcttcaaagtcacgaagtactggagctccctgcggaacctggtggtgtccctgctgaactccatgaagtccatcatcagcctgctcttcttgctcttcctgttcattgtggtcttcgccctgctggggatgcagctgtttgggggacagttcaacttccaggatgagactcccacaaccaacttcgacaccttccctgccgccatcctcactgtcttccagatcctgacgggagaggactggaatgcagtgatgtatcacgggatcgaatcgcaaggcggcgtcagcaaaggcatgttctcgtccttttacttcattgtcctgacactgttcggaaactacactctgctgaatgtctttctggccatcgctgtggacaacctggccaacgcccaagagctgaccaaggatgaagaggagatggaagaagcagccaatcagaagcttgctctgcaaaaggccaaagaagtggctgaagtcagccccatgtctgccgcgaacatctccatcgccgccaggcagcagaactcggccaaggcgcgctcggtgtgggagcagcgggccagccagctacggctgcagaacctgcgggccagctgcgaggcgctgtacagcgagatggaccccgaggagcggctgcgcttcgccactacgcgccacctgcggcccgacatgaagacgcacctggaccggccgctggtggtggagctgggccgcgacggcgcgcgggggcccgtgggaggcaaagcccgacctgaggctgcggaggcccccgagggcgtcgaccctccgcgcaggcaccaccggcaccgcgacaaggacaagacccccgcggcgggggaccaggaccgagcagaggccccgaaggcggagagcggggagcccggtgcccgggaggagcggccgcggccgcaccgcagccacagcaaggaggccgcggggcccccggaggcgcggagcgagcgcggccgaggcccaggccccgagggcggccggcggcaccaccggcgcggctccccggaggaggcggccgagcgggagccccgacgccaccgcgcgcaccggcaccaggatccgagcaaggagtgcgccggcgccaagggcgagcggcgcgcgcggcaccgcggcggcccccgagcggggccccgggaggcggagagcggggaggagccggcgcggcggcaccgggcccggcacaaggcgcagcctgctcacgaggctgtggagaaggagaccacggagaaggaggccacggagaaggaggctgagatagtggaagccgacaaggaaaaggagctccggaaccaccagccccgggagccacactgtgacctggagaccagtgggactgtgactgtgggtcccatgcacacactgcccagcacctgtctccagaaggtggaggaacagccagaggatgcagacaatcagcggaacgtcactcgcatgggcagtcagcccccagacccgaacactattgtacatatcccagtgatgctgacgggccctcttggggaagccacggtcgttcccagtggtaacgtggacctggaaagccaagcagaggggaagaaggaggtggaagcggatgacgtgatgaggagcggcccccggcctatcgtcccatacagctccatgttctgtttaagccccaccaacctgctccgccgcttctgccactacatcgtgaccatgaggtacttcgaggtggtcattctcgtggtcatcgccttgagcagcatcgccctggctgctgaggacccagtgcgcacagactcgcccaggaacaacgctctgaaatacctggattacattttcactggtgtctttacctttgagatggtgataaagatgatcgacttgggactgctgcttcaccctggagcctatttccgggacttgtggaacattctggacttcattgtggtcagtggcgccctggtggcgtttgctttctcaggatccaaagggaaagacatcaataccatcaagtctctgagagtccttcgtgtcctgcggcccctcaagaccatcaaacggctgcccaagctcaaggctgtgtttgactgtgtggtgaactccctgaagaatgtcctcaacatcttgattgtctacatgctcttcatgttcatatttgccgtcattgcggtgcagctcttcaaagggaagtttttctactgcacagatgaatccaaggagctggagagggactgcaggggtcagtatttggattatgagaaggaggaagtggaagctcagcccaggcagtggaagaaatacgactttcactacgacaatgtgctctgggctctgctgacgctgttcacagtgtccacgggagaaggctggcccatggtgctgaaacactccgtggatgccacctatgaggagcagggtccaagccctgggtaccgcatggagctgtccatcttctacgtggtctactttgtggtctttcccttcttcttcgtcaacatctttgtggctttgatcatcatcaccttccaggagcagggggacaaggtgatgtctgaatgcagcctggagaagaacgagagggcttgcattgacttcgccatcagcgccaaacccctgacacggtacatgccccaaaaccggcagtcgttccagtataagacgtggacatttgtggtctccccgccctttgaatacttcatcatggccatgatagccctcaacactgtggtgctgatgatgaagttctatgatgcaccctatgagtacgagctgatgctgaaatgcctgaacatcgtgttcacatccatgttctccatggaatgcgtgctgaagatcatcgcctttggggtgctgaactatttcagagatgcctggaatgtctttgactttgtcactgtgttgggaagtattactgatattttagtaacagagattgcggaaacgaacaatttcatcaacctcagcttcctccgcctctttcgagctgcgcggctgatcaagctgctccgccagggctacaccatccgcatcctgctgtggacctttgtccagtccttcaaggccctgccctacgtgtgtctgctcattgccatgctgttcttcatctacgccatcatcggcatgcaggtgtttgggaatattgccctggatgatgacaccagcatcaaccgccacaacaacttccggacgtttttgcaagccctgatgctgctgttcaggagcgccacgggggaggcctggcacgagatcatgctgtcctgcctgagcaaccaggcctgtgatgagcaggccaatgccaccgagtgtggaagtgactttgcctacttctacttcgtctccttcatcttcctgtgctcctttctgatgttgaacctctttgtggctgtgatcatggacaattttgagtacctcacgcgggactcttccatcctaggtcctcaccacttggatgagttcatccgggtctgggctgaatacgacccggctgcgtgtgggcgcatcagttacaatgacatgtttgagatgctgaaacacatgtccccgcctctggggctggggaagaaatgccctgctcgagttgcttacaagcgcctggttcgcatgaacatgcccatctccaacgaggacatgactgttcacttcacgtccacgctgatggccctcatccggacggcactggagatcaagctggccccagctgggacaaagcagcatcagtgtgacgcggagttgaggaaggagatttccgttgtgtgggccaatctgccccagaagactttggacttgctggtaccaccccataagcctgatgagatgacagtggggaaggtttatgcagctctgatgatattcgacttctacaagcagaacaaaaccaccagagaccagatgcagcaggctcctggaggcctctcccagatgggtcctgtgtccctgttccaccctctgaaggccaccctggagcagacacagccggctgtgctccgaggagcccgggttttccttcgacagaagagttccacctccctcagcaatggcggggccatacaaaaccaagagagtggcatcaaagagtctgtctcctggggcactcaaaggacccaggatgcaccccatgaggccaggccacccctggagcgtggccactccacagagatccctgtggggcggtcaggagcactggctgtggacgttcagatgcagagcataacccggaggggccctgatggggagccccagcctgggctggagagccagggtcgagcggcctccatgccccgccttgcggccgagactcagcccgtcacagatgccagccccatgaagcgctccatctccacgctggcccagcggccccgtgggactcatctttgcagcaccaccccggaccgcccaccccctagccaggcgtcgtcgcaccaccaccaccaccgctgccaccgccgcagggacaggaagcagaggtccctggagaaggggcccagcctgtctgccgatatggatggcgcaccaagcagtgctgtggggccggggctgcccccgggagaggggcctacaggctgccggcgggaacgagagcgccggcaggagcggggccggtcccaggagcggaggcagccctcatcctcctcctcggagaagcagcgcttctactcctgcgaccgctttgggggccgtgagcccccgaagcccaagccctccctcagcagccacccaacgtcgccaacagctggccaggagccgggaccccacccacagggcagtggttccgtgaatgggagccccttgctgtcaacatctggtgctagcacccccggccgcggtgggcggaggcagctcccccagacgcccctgactccccgccccagcatcacctacaagacggccaactcctcacccatccacttcgccggggctcagaccagcctccctgccttctccccaggccggctcagccgtgggctttccgaacacaacgccctgctgcagagagaccccctcagccagcccctggcccctggctctcgaattggctctgacccttacctggggcagcgtctggacagtgaggcctctgtccacgccctgcctgaggacactctcactttcgaggaggctgtggccaccaactcgggccgctcctccaggacttcctacgtgtcctccctgacctcccagtctcaccctctccgccgcgtgcccaacggttaccactgcaccctgggactcagctcgggtggccgagcacggcacagctaccaccaccctgaccaagaccactggtgctagctgcaccgtgaccgctcagacgcctgcatgcagcaggcgtgtgttccagtggatgagttttatcatccacacggggcagccggccctcgggggaggccttgcccaccttggtgaggctcctgtggcccctccctccccctcctcccctcttttactctagacgacgaataaagccctgttagaggatgcggctctctctgtccccttcctgtcctgccttcctgggtctcgtaccacacaccagaccctaaaccgcaggctgctgtgtgtggctgagaaggacccaggagtccaaatcccgtgtcctgggactcagcatccagcatgggtgcttggagccgttgtgaggagctctgcgtcctgtggggagcacccttcacgtggccgtgcggcacagagaagcagggcccacctgaaagtgcgccgagacctcgggacggaggggatggggagggggacacagtcgtggcttgtgcagcccgccagtgtcagcgaatgctcactcaggcaagctctgtcctccctggacaccgtcagccccacaggaaccgagctgggaagtgttcttgctgtggttgtgatttttaattgcaacacctctcattcttgtcacttctatatacgtgatgtagaaaaaatggaaaaccagaaaaatggggaaggaaatgttcacataactttaaaaaatcaaacctgtgaaagaaagatgtcagctttttgccacgtgtctttgtggcttatgcgaggagactccctgtgcagccctgtccggtccaggtggacgtagacggcccctggctctgctgctcttgaccaagtgcctgaccgccaggccctcacacccaggctcctgggcactgtggtgtgaggcgaggcctcgggatccatcaccgcaggatgctgtgaaaagtactcgcgatggcagccaggtagcaagcccttgccagtggagagcactggatgtcatggtggcaaacaaggcagccatttgctgtcctcctcccacgagtggaaggggtttccaaggaagccacagggcagctgaccacgtgcttgtgtgaggcattttcagtctgttctgcatatgattctcagggcacactctgtggtatgtgaaataggtttccttccacatacagcagaagagaggcaaaggctggtaggaaggaggaagacattggctgggggcttggatgtggggccgtcagggcaggagggaggaagccccagctggaatgaaactcagagcaagtgaccgagggaggacacggctcctgccactgaggccgggcacctgatgcccagcactgtcctggcgccagacacagggagcaggcagtcaagtgaggtctgacccccatggccacgctcaggagagaaagaccatgctcaggacactgtccaaggtgcacaagatgctgggaggtcccttgtttggtgaagaaagggagcatttagagcagttgatggtggtgtgtcctccgtgttctgaaattccagatgatctgtgttggattcttggcttctaccccatgattctcctcaaagaaattgtgtgtgatgtgtgtgtgtgtgtgtgtgtgtgtgtgtctgtgtcacaggagatgcagtgcctgtacaggtgtgttcagtgtgtggatgtcattaacccatagggctatgcaacaaaagacacatttaatagaagtaaaacacacaagaccgctgcctggtctcggggttcagcatgattgtgaccaaacctttttatagaatttccttacctgaaggcacaacactctgaaactttaaagataacagagtattttattccaatagaataaaccaggaatctcggactgtgcatgtgatcactgtgctcctgttgcaaagtagaaggatgtgtattttgacactgacgttttgtctcttgttccccagcccccagcccatgttatcttgggtgtcgaatgtgtccattccatgcagaaccacagccatttccccaggcagtgttgggtcgagaatccacttttctaaacccacacagcctagctggcttgtctagactcttctaggcattggaattgatgaaaactacagggagcggggaaaggagacattatgtcttgttttcctgactttgggttttgtttctcactgtgtcttctccggctatcatatatgtcccctgaatctcatagtgagctgccaaatttgaagtgcatcacccagttgtctgcatctggaaccagtcaagcagtggctgtagtttgaacaagttatgtgtgcatgtaacatatatacatatatacatatatacaagtatgtgcatgataatgtatatcttcgtactttttgatacaatgtattcatttgttaatttttaattatatttgatataaatcaaaggtttgttgcaaaactttatatttaagaagtgttaaaaaaaaaaaaaagtcccaaccatgcaacacaactgggacctacttaaaaagaaattctgtgattgactagtttgctgcctgagtcatatttatcagccaaactttggattctgctgttgtttctacaatgacattttgtatgaagcaaagtccttgaattaaaataaaaacttagcaaaaaatcaaaaacaaaacccca

SEQ ID NO: 4208 - DNA, 492 bp, Homo sapiens
  source 1..492: mol_type = unassigned DNA
caacttccggacgtttttgcaagccctgatgctgctgttcaggagcgccacgggggaggcctggcacgagatcatgctgtcctgcctgagcaaccaggcctgtgatgagcaggccaatgccaccgagtgtggaagtgactttgcctacttctacttcgtctccttcatcttcctgtgctcctttctgatgttgaacctctttgtggctgtgatcatggacaattttgagtacctcacgcgggactcttccatcctaggtcctcaccacttggatgagttcatccgggtctgggctgaatacgacccggctgcgtgttgccggattcattataaggatatgtacagtttgttgcgttgtattgcgccacccgttggcttagggaagaactgccctcgtaggttggcctacaagcgcctggttcgcatgaacatgcccatctccaacgaggacatgactgttcacttcacgtccacgctgatggccctcatccg

SEQ ID NO: 4209 - DNA, 770 bp, Homo sapiens
  source 1..770: mol_type = unassigned DNA
ctccggaaccaccagccccgggagccacactgtgacctggagaccagtgggactgtgactgtgggtcccatgcacacactgcccagcacctgtctccagaaggtggaggaacagccagaggatgcagacaatcagcggaacgtcactcgcatgggcagtcagcccccagacccgaacactattgtacatatcccagtgatgctgacgggccctcttggggaagccacggtcgttcccagtcccacaataggccgtctgcaagctgaggagcaaggagagccagcccgagtctcaaagctgaacttggagtccgatgttcgagggcaggaagcgtccagcacgggagaaagatataggctgggaggtggtaacgtggacctggaaagccaagcagaggggaagaaggaggtggaagcggatgacgtgatgaggagcggcccccggcctatcgtcccatacagctccatgttctgtttaagccccaccaacctgctccgccgcttctgccactacatcgtgaccatgaggtacttcgaggtggtcattctcgtggtcatcgccttgagcagcatcgccctggctgctgaggacccagtgcgcacagactcgcccaggaacaacgctctgaaatacctggattacattttcactggtgtctttacctttgagatggtgataaagatgatcgacttgggactgctgcttcaccctggagcctatttccgggacttgtggaacattctggacttcattgtggtcagtggcgccct

SEQ ID NO: 4210 - DNA, 8626 bp, Homo sapiens
  source 1..8626: mol_type = unassigned DNA
gatgtcccgagctgctatccccggctcggcccgggcagccgccttctgagcccccgacccgaggcgccgagccgccgccgcccgatgggctgggccgtggagcgtctccgcagtcgtagctccagccgccgcgctcccagccccggcagcctcagcatcagcggcggcggcggcggcggcggcgtcttccgcatcgttcgccgcagcgtaacccggagccctttgctctttgcagaatggcccgcttcggagacgagatgccggcccgctacgggggaggaggctccggggcagccgccggggtggtcgtgggcagcggaggcgggcgaggagccgggggcagccggcagggcgggcagcccggggcgcaaaggatgtacaagcagtcaatggcgcagagagcgcggaccatggcactctacaaccccatccccgtccgacagaactgcctcacggttaaccggtctctcttcctcttcagcgaagacaacgtggtgagaaaatacgccaaaaagatcaccgaatggcctccctttgaatatatgattttagccaccatcatagcgaattgcatcgtcctcgcactggagcagcatctgcctgatgatgacaagaccccgatgtctgaacggctggatgacacagaaccatacttcattggaattttttgtttcgaggctggaattaaaatcattgcccttgggtttgccttccacaaaggctcctacttgaggaatggctggaatgtcatggactttgtggtggtgctaacgggcatcttggcgacagttgggacggagtttgacctacggacgctgagggcagttcgagtgctgcggccgctcaagctggtgtctggaatcccaagtttacaagtcgtcctgaagtcgatcatgaaggcgatgatccctttgctgcagatcggcctcctcctattttttgcaatccttatttttgcaatcatagggttagaattttatatgggaaaatttcataccacctgctttgaagaggggacagatgacattcagggtgagtctccggctccatgtgggacagaagagcccgcccgcacctgccccaatgggaccaaatgtcagccctactgggaagggcccaacaacgggatcactcagttcgacaacatcctgtttgcagtgctgactgttttccagtgcataaccatggaagggtggactgatctcctctacaatagcaacgatgcctcagggaacacttggaactggttgtacttcatccccctcatcatcatcggctccttttttatgctgaaccttgtgctgggtgtgctgtcaggggagtttgccaaagaaagggaacgggtggagaaccggcgggcttttctgaagctgaggcggcaacaacagattgaacgtgagctcaatgggtacatggagtggatctcaaaagcagaagaggtgatcctcgccgaggatgaaactgacggggagcagaggcatccctttgatggagctctgcggagaaccaccataaagaaaagcaagacagatttgctcaaccccgaagaggctgaggatcagctggctgatatagcctctgtgggttctcccttcgcccgagccagcattaaaagtgccaagctggagaactcgaccttttttcacaaaaaggagaggaggatgcgtttctacatccgccgcatggtcaaaactcaggccttctactggactgtactcagtttggtagctctcaacacgctgtgtgttgctattgttcactacaaccagcccgagtggctctccgacttcctttactatgcagaattcattttcttaggactctttatgtccgaaatgtttataaaaatgtacgggcttgggacgcggccttacttccactcttccttcaactgctttgactgtggggttatcattgggagcatcttcgaggtcatctgggctgtcataaaacctggcacatcctttggaatcagcgtgttacgagccctcaggttattgcgtattttcaaagtcacaaagtactgggcatctctcagaaacctggtcgtctctctcctcaactccatgaagtccatcatcagcctgttgtttctccttttcctgttcattgtcgtcttcgcccttttgggaatgcaactcttcggcggccagtttaatttcgatgaagggactcctcccaccaacttcgatacttttccagcagcaataatgacggtgtttcagatcctgacgggcgaagactggaacgaggtcatgtacgacgggatcaagtctcaggggggcgtgcagggcggcatggtgttctccatctatttcattgtactgacgctctttgggaactacaccctcctgaatgtgttcttggccatcgctgtggacaatctggccaacgcccaggagctcaccaaggacgagcaagaggaagaagaagcagcgaaccagaaacttgccctacagaaagccaaggaggtggcagaagtgagtcctctgtccgcggccaacatgtctatagctgtgaaagagcaacagaagaatcaaaagccagccaagtccgtgtgggagcagcggaccagtgagatgcgaaagcagaacttgctggccagccgggaggccctgtataacgaaatggacccggacgagcgctggaaggctgcctacacgcggcacctgcggccagacatgaagacgcacttggaccggccgctggtggtggacccgcaggagaaccgcaacaacaacaccaacaagagccgggcggccgagcccaccgtggaccagcgcctcggccagcagcgcgccgaggacttcctcaggaaacaggcccgctaccacgatcgggcccgggaccccagcggctcggcgggcctggacgcacggaggccctgggcgggaagccaggaggccgagctgagccgggagggaccctacggccgcgagtcggaccaccacgcccgggagggcagcctggagcaacccgggttctgggagggcgaggccgagcgaggcaaggccggggacccccaccggaggcacgtgcaccggcaggggggcagcagggagagccgcagcgggtccccgcgcacgggcgcggacggggagcatcgacgtcatcgcgcgcaccgcaggcccggggaggagggtccggaggacaaggcggagcggagggcgcggcaccgcgagggcagccggccggcccggggcggcgagggcgagggcgagggccccgacgggggcgagcgcaggagaaggcaccggcatggcgctccagccacgtacgagggggacgcgcggagggaggacaaggagcggaggcatcggaggaggaaagagaaccagggctccggggtccctgtgtcgggccccaacctgtcaaccacccggccaatccagcaggacctgggccgccaagacccacccctggcagaggatattgacaacatgaagaacaacaagctggccaccgcggagtcggccgctccccacggcagccttggccacgccggcctgccccagagcccagccaagatgggaaacagcaccgaccccggccccatgctggccatccctgccatggccaccaacccccagaacgccgccagccgccggacgcccaacaacccggggaacccatccaatcccggcccccccaagacccccgagaatagccttatcgtcaccaaccccagcggcacccagaccaattcagctaagactgccaggaaacccgaccacaccacagtggacatccccccagcctgcccaccccccctcaaccacaccgtcgtacaagtgaacaaaaacgccaacccagacccactgccaaaaaaagaggaagagaagaaggaggaggaggaagacgaccgtggggaagacggccctaagccaatgcctccctatagctccatgttcatcctgtccacgaccaacccccttcgccgcctgtgccattacatcctgaacctgcgctactttgagatgtgcatcctcatggtcattgccatgagcagcatcgccctggccgccgaggaccctgtgcagcccaacgcacctcggaacaacgtgctgcgatactttgactacgtttttacaggcgtctttacctttgagatggtgatcaagatgattgacctggggctcgtcctgcatcagggtgcctacttccgtgacctctggaatattctcgacttcatagtggtcagtggggccctggtagcctttgccttcactggcaatagcaaaggaaaagacatcaacacgattaaatccctccgagtcctccgggtgctacgacctcttaaaaccatcaagcggctgccaaagctcaaggctgtgtttgactgtgtggtgaactcacttaaaaacgtcttcaacatcctcatcgtctacatgctattcatgttcatcttcgccgtggtggctgtgcagctcttcaaggggaaattcttccactgcactgacgagtccaaagagtttgagaaagattgtcgaggcaaatacctcctctacgagaagaatgaggtgaaggcgcgagaccgggagtggaagaagtatgaattccattacgacaatgtgctgtgggctctgctgaccctcttcaccgtgtccacgggagaaggctggccacaggtcctcaagcattcggtggacgccacctttgagaaccagggccccagccccgggtaccgcatggagatgtccattttctacgtcgtctactttgtggtgttccccttcttctttgtcaatatctttgtggccttgatcatcatcaccttccaggagcaaggggacaagatgatggaggaatacagcctggagaaaaatgagagggcctgcattgatttcgccatcagcgccaagccgctgacccgacacatgccgcagaacaagcagagcttccagtaccgcatgtggcagttcgtggtgtctccgcctttcgagtacacgatcatggccatgatcgccctcaacaccatcgtgcttatgatgaagttctatggggcttctgttgcttatgaaaatgccctgcgggtgttcaacatcgtcttcacctccctcttctctctggaatgtgtgctgaaagtcatggcttttgggattctgaattatttccgcgatgcctggaacatcttcgactttgtgactgttctgggcagcatcaccgatatcctcgtgactgagtttgggaataacttcatcaacctgagctttctccgcctcttccgagctgcccggctcatcaaacttctccgtcagggttacaccatccgcattcttctctggacctttgtgcagtccttcaaggccctgccttatgtctgtctgctgatcgccatgctcttcttcatctatgccatcattgggatgcaggtgtttggtaacattggcatcgacgtggaggacgaggacagtgatgaagatgagttccaaatcactgagcacaataacttccggaccttcttccaggccctcatgcttctcttccggagtgccaccggggaagcttggcacaacatcatgctttcctgcctcagcgggaaaccgtgtgataagaactctggcatcctgactcgagagtgtggcaatgaatttgcttatttttactttgtttccttcatcttcctctgctcgtttctgatgctgaatctctttgtcgccgtcatcatggacaactttgagtacctcacccgagactcctccatcctgggcccccaccacctggatgagtacgtgcgtgtctgggccgagtatgaccccgcagcttgcggtcggattcattataaggatatgtacagtttattacgagtaatatctccccctctcggcttaggcaagaaatgtcctcatagggttgcttgcaagcggcttctgcggatggacctgcccgtcgcagatgacaacaccgtccacttcaattccaccctcatggctctgatccgcacagccctggacatcaagattgccaagggaggagccgacaaacagcagatggacgctgagctgcggaaggagatgatggcgatttggcccaatctgtcccagaagacgctagacctgctggtcacacctcacaagtccacggacctcaccgtggggaagatctacgcagccatgatgatcatggagtactaccggcagagcaaggccaagaagctgcaggccatgcgcgaggagcaggaccggacacccctcatgttccagcgcatggagcccccgtccccaacgcaggaagggggacctggccagaacgccctcccctccacccagctggacccaggaggagccctgatggctcacgaaagcggcctcaaggagagcccgtcctgggtgacccagcgtgcccaggagatgttccagaagacgggcacatggagtccggaacaaggcccccctaccgacatgcccaacagccagcctaactctcagtccgtggagatgcgagagatgggcagagatggctactccgacagcgagcactacctccccatggaaggccagggccgggctgcctccatgccccgcctccctgcagagaaccagaggagaaggggccggccacgtgggaataacctcagtaccatctcagacaccagccccatgaagcgttcagcctccgtgctgggccccaaggcccgacgcctggacgattactcgctggagcgggtcccgcccgaggagaaccagcggcaccaccagcggcgccgcgaccgcagccaccgcgcctctgagcgctccctgggccgctacaccgatgtggacacaggcttggggacagacctgagcatgaccacccaatccggggacctgccgtcgaaggagcgggaccaggagcggggccggcccaaggatcggaagcatcgacagcaccaccaccaccaccaccaccaccaccatcccccgccccccgacaaggaccgctatgcccaggaacggccggaccacggccgggcacgggctcgggaccagcgctggtcccgctcgcccagcgagggccgagagcacatggcgcaccggcagtagttccgtaagtggaagcccagccccctcaacatctggtaccagcactccgcggcggggccgccgccagctcccccagaccccctccaccccccggccacacgtgtcctattcccctgtgatccgtaaggccggcggctcggggcccccgcagcagcagcagcagcagcagcagcagcagcagcagcaggcggtggccaggccgggccgggcggccaccagcggccctcggaggtacccaggccccacggccgagcctctggccggagatcggccgcccacggggggccacagcagcggccgctcgcccaggatggagaggcgggtcccaggcccggcccggagcgagtcccccagggcctgtcgacacggcggggcccggtggccggcatctggcccgcacgtgtccgaggggcccccgggtccccggcaccatggctactaccggggctccgactacgacgaggccgatggcccgggcagcgggggcggcgaggaggccatggccggggcctacgacgcgccaccccccgtacgacacgcgtcctcgggcgccaccgggcgctcgcccaggactccccgggcctcgggcccggcctgcgcctcgccttctcggcacggccggcgactccccaacggctactacccggcgcacggactggccaggccccgcgggccgggctccaggaagggcctgcacgaaccctacagcgagagtgacgatgattggtgctaagcccgggcgaggtggcgcccgcccggccccccacgcaccccacgcacacaccccacccgaggagccgcgcagaggccgcgggggcccagcacagagggcccgggagagggccagccgggagaccccagactctggagaggccagggctgggccacaagggtgtcccgcagagaccctcggccaaaagagaccctcctgggcagccacggcgccccccaaccagccccgatccccccacccacgacaggggctctcgggtgggaggcagggagcagacaaaccacacagccaagggatttgaattaactcagccatttttggagaactttggggaacatgaaaaaaaaaaaaaaaaaaaaaaaaaaaaacatttttaaaagaaaaaacggggagaaaaaaatagcttctattgatgagttttatcatctcaattgaatctttcctttccctgatgaagacagctggtggccgagtgcggcaaagaagccagaaggaaccagaatcccagtgccctacacccaccaccagacacactcacacccacacacgttctcagacacacacaagagtgcttgccggttataccaaaccctactattactgcctgcagaaatcaatttaaaaaaataataataacaataaacaattttaaaaaggacaaaaaaattaatgattgagaaaagaggcatttttttctgacatttggtcctgcttgaaacaacaaaagaagaagaaaaacccaccatcaccaccgattcctttgcttcttttttccttttttcctaccttgtttgaaaaccgtgggcttgggactgtgaattattgcatgacattcaaaaagaaaaaaaaaataaaaaaaagttgaatcaaa

SEQ ID NO: 4211 - DNA, 8359 bp, Homo sapiens
  source 1..8359: mol_type = unassigned DNA
atggcccgcttcggagacgagatgccggcccgctacgggggaggaggctccggggcagccgccggggtggtcgtgggcagcggaggcgggcgaggagccgggggcagccggcagggcgggcagcccggggcgcaaaggatgtacaagcagtcaatggcgcagagagcgcggaccatggcactctacaaccccatccccgtccgacagaactgcctcacggttaaccggtctctcttcctcttcagcgaagacaacgtggtgagaaaatacgccaaaaagatcaccgaatggccaccctttgaatatatgattttagccaccatcatagcgaattgcatcgtcctcgcactggagcagcatctgcctgatgatgacaagaccccgatgtctgaacggctggatgacacagaaccatacttcattggaattttttgtttcgaggctggaattaaaatcattgcccttgggtttgccttccacaaaggctcctacttgaggaatggctggaatgtcatggactttgtggtggtgctaacgggcatcttggcgacagttgggacggagtttgacctacggacgctgagggcagttcgagtgctgcggccgctcaagctggtgtctggaatcccaagtttacaagtcgtcctgaagtcgatcatgaaggcgatgatccctttgctgcagatcggcctcctcctattttttgcaatccttatttttgcaatcatagggttagaattttatatgggaaaatttcataccacctgctttgaagaggggacagatgacattcagggtgagtctccggctccatgtgggacagaagagcccgcccgcacctgccccaatgggaccaaatgtcagccctactgggaagggcccaacaacgggatcactcagttcgacaacatcctgtttgcagtgctgactgttttccagtgcataaccatggaagggtggactgatctcctctacaatagcaacgatgcctcagggaacacttggaactggttgtacttcatccccctcatcatcatcggctccttttttatgctgaaccttgtgctgggtgtgctgtcaggggagtttgccaaagaaagggaacgggtggagaaccggcgggcttttctgaagctgaggcggcaacaacagattgaacgtgagctcaatgggtacatggagtggatctcaaaagcagaagaggtgatcctcgccgaggatgaaactgacggggagcagaggcatccctttgatggagctctgcggagaaccaccataaagaaaagcaagacagatttgctcaaccccgaagaggctgaggatcagctggctgatatagcctctgtgggttctcccttcgcccgagccagcattaaaagtgccaagctggagaactcgaccttttttcacaaaaaggagaggaggatgcgtttctacatccgccgcatggtcaaaactcaggccttctactggactgtactcagtttggtagctctcaacacgctgtgtgttgctattgttcactacaaccagcccgagtggctctccgacttcctttactatgcagaattcattttcttaggactctttatgtccgaaatgtttataaaaatgtacgggcttgggacgcggccttacttccactcttccttcaactgctttgactgtggggttatcattgggagcatcttcgaggtcatctgggctgtcataaaacctggcacatcctttggaatcagcgtgttacgagccctcaggttattgcgtattttcaaagtcacaaagtactgggcatctctcagaaacctggtcgtctctctcctcaactccatgaagtccatcatcagcctgttgtttctccttttcctgttcattgtcgtcttcgcccttttgggaatgcaactcttcggcggccagtttaatttcgatgaagggactcctcccaccaacttcgatacttttccagcagcaataatgacggtgtttcagatcctgacgggcgaagactggaacgaggtcatgtacgacgggatcaagtctcaggggggcgtgcagggcggcatggtgttctccatctatttcattgtactgacgctctttgggaactacaccctcctgaatgtgttcttggccatcgctgtggacaatctggccaacgcccaggagctcaccaaggacgagcaagaggaagaagaagcagcgaaccagaaacttgccctacagaaagccaaggaggtggcagaagtgagtcctctgtccgcggccaacatgtctatagctgtgaaagagcaacagaagaatcaaaagccagccaagtccgtgtgggagcagcggaccagtgagatgcgaaagcagaacttgctggccagccgggaggccctgtataacgaaatggacccggacgagcgctggaaggctgcctacacgcggcacctgcggccagacatgaagacgcacttggaccggccgctggtggtggacccgcaggagaaccgcaacaacaacaccaacaagagccgggcggccgagcccaccgtggaccagcgcctcggccagcagcgcgccgaggacttcctcaggaaacaggcccgctaccacgatcgggcccgggaccccagcggctcggcgggcctggacgcacggaggccctgggcgggaagccaggaggccgagctgagccgggagggaccctacggccgcgagtcggaccaccacgcccgggagggcagcctggagcaacccgggttctgggagggcgaggccgagcgaggcaaggccggggacccccaccggaggcacgtgcaccggcaggggggcagcagggagagccgcagcgggtccccgcgcacgggcgcggacggggagcatcgacgtcatcgcgcgcaccgcaggcccggggaggagggtccggaggacaaggcggagcggagggcgcggcaccgcgagggcagccggccggcccggggcggcgagggcgagggcgagggccccgacgggggcgagcgcaggagaaggcaccggcatggcgctccagccacgtacgagggggacgcgcggagggaggacaaggagcggaggcatcggaggaggaaagagaaccagggctccggggtccctgtgtcgggccccaacctgtcaaccacccggccaatccagcaggacctgggccgccaagacccacccctggcagaggatattgacaacatgaagaacaacaagctggccaccgcggagtcggccgctccccacggcagccttggccacgccggcctgccccagagcccagccaagatgggaaacagcaccgaccccggccccatgctggccatccctgccatggccaccaacccccagaacgccgccagccgccggacgcccaacaacccggggaacccatccaatcccggcccccccaagacccccgagaatagccttatcgtcaccaaccccagcggcacccagaccaattcagctaagactgccaggaaacccgaccacaccacagtggacatccccccagcctgcccaccccccctcaaccacaccgtcgtacaagtgaacaaaaacgccaacccagacccactgccaaaaaaagaggaagagaagaaggaggaggaggaagacgaccgtggggaagacggccctaagccaatgcctccctatagctccatgttcatcctgtccacgaccaacccccttcgccgcctgtgccattacatcctgaacctgcgctactttgagatgtgcatcctcatggtcattgccatgagcagcatcgccctggccgccgaggaccctgtgcagcccaacgcacctcggaacaacgtgctgcgatactttgactacgtttttacaggcgtctttacctttgagatggtgatcaagatgattgacctggggctcgtcctgcatcagggtgcctacttccgtgacctctggaatattctcgacttcatagtggtcagtggggccctggtagcctttgccttcactggcaatagcaaaggaaaagacatcaacacgattaaatccctccgagtcctccgggtgctacgacctcttaaaaccatcaagcggctgccaaagctcaaggctgtgtttgactgtgtggtgaactcacttaaaaacgtcttcaacatcctcatcgtctacatgctattcatgttcatcttcgccgtggtggctgtgcagctcttcaaggggaaattcttccactgcactgacgagtccaaagagtttgagaaagattgtcgaggcaaatacctcctctacgagaagaatgaggtgaaggcgcgagaccgggagtggaagaagtatgaattccattacgacaatgtgctgtgggctctgctgaccctcttcaccgtgtccacgggagaaggctggccacaggtcctcaagcattcggtggacgccacctttgagaaccagggccccagccccgggtaccgcatggagatgtccattttctacgtcgtctactttgtggtgttccccttcttctttgtcaatatctttgtggccttgatcatcatcaccttccaggagcaaggggacaagatgatggaggaatacagcctggagaaaaatgagagggcctgcattgatttcgccatcagcgccaagccgctgacccgacacatgccgcagaacaagcagagcttccagtaccgcatgtggcagttcgtggtgtctccgcctttcgagtacacgatcatggccatgatcgccctcaacaccatcgtgcttatgatgaagttctatggggcttctgttgcttatgaaaatgccctgcgggtgttcaacatcgtcttcacctccctcttctctctggaatgtgtgctgaaagtcatggcttttgggattctgaattatttccgcgatgcctggaacatcttcgactttgtgactgttctgggcagcatcaccgatatcctcgtgactgagtttgggaataacttcatcaacctgagctttctccgcctcttccgagctgcccggctcatcaaacttctccgtcagggttacaccatccgcattcttctctggacctttgtgcagtccttcaaggccctgccttatgtctgtctgctgatcgccatgctcttcttcatctatgccatcattgggatgcaggtgtttggtaacattggcatcgacgtggaggacgaggacagtgatgaagatgagttccaaatcactgagcacaataacttccggaccttcttccaggccctcatgcttctcttccggagtgccaccggggaagcttggcacaacatcatgctttcctgcctcagcgggaaaccgtgtgataagaactctggcatcctgactcgagagtgtggcaatgaatttgcttatttttactttgtttccttcatcttcctctgctcgtttctgatgctgaatctctttgtcgccgtcatcatggacaactttgagtacctcacccgagactcctccatcctgggcccccaccacctggatgagtacgtgcgtgtctgggccgagtatgaccccgcagcttggggccgcatgccttacctggacatgtatcagatgctgagacacatgtctccgcccctgggtctggggaagaagtgtccggccagagtggcttacaagcggcttctgcggatggacctgcccgtcgcagatgacaacaccgtccacttcaattccaccctcatggctctgatccgcacagccctggacatcaagattgccaagggaggagccgacaaacagcagatggacgctgagctgcggaaggagatgatggcgatttggcccaatctgtcccagaagacgctagacctgctggtcacacctcacaagtccacggacctcaccgtggggaagatctacgcagccatgatgatcatggagtactaccggcagagcaaggccaagaagctgcaggccatgcgcgaggagcaggaccggacacccctcatgttccagcgcatggagcccccgtccccaacgcaggaagggggacctggccagaacgccctcccctccacccagctggacccaggaggagccctgatggctcacgaaagcggcctcaaggagagcccgtcctgggtgacccagcgtgcccaggagatgttccagaagacgggcacatggagtccggaacaaggcccccctaccgacatgcccaacagccagcctaactctcagtccgtggagatgcgagagatgggcagagatggctactccgacagcgagcactacctccccatggaaggccagggccgggctgcctccatgccccgcctccctgcagagaaccagaccatctcagacaccagccccatgaagcgttcagcctccgtgctgggccccaaggcccgacgcctggacgattactcgctggagcgggtcccgcccgaggagaaccagcggcaccaccagcggcgccgcgaccgcagccaccgcgcctctgagcgctccctgggccgctacaccgatgtggacacaggcttggggacagacctgagcatgaccacccaatccggggacctgccgtcgaaggagcgggaccaggagcggggccggcccaaggatcggaagcatcgacagcaccaccaccaccaccaccaccaccaccatcccccgccccccgacaaggaccgctatgcccaggaacggccggaccacggccgggcacgggctcgggaccagcgctggtcccgctcgcccagcgagggccgagagcacatggcgcaccggcagggcagtagttccgtaagtggaagcccagccccctcaacatctggtaccagcactccgcggcggggccgccgccagctcccccagaccccctccaccccccggccacacgtgtcctattcccctgtgatccgtaaggccggcggctcggggcccccgcagcagcagcagcagcagcagcagcagcagcagcagcaggcggtggccaggccgggccgggcggccaccagcggccctcggaggtacccaggccccacggccgagcctctggccggagatcggccgcccacggggggccacagcagcggccgctcgcccaggatggagaggcgggtcccaggcccggcccggagcgagtcccccagggcctgtcgacacggcggggcccggtggccggcatctggcccgcacgtgtccgaggggcccccgggtccccggcaccatggctactaccggggctccgactacgacgaggccgatggcccgggcagcgggggcggcgaggaggccatggccggggcctacgacgcgccaccccccgtacgacacgcgtcctcgggcgccaccgggcgctcgcccaggactccccgggcctcgggcccggcctgcgcctcgccttctcggcacggccggcgactccccaacggctactacccggcgcacggactggccaggccccgcgggccgggctccaggaagggcctgcacgaaccctacagcgagagtgacgatgattggtgctaagcccgggcgaggtggcgcccgcccggccccccacgcaccccacgcacacaccccacccgaggagccgcgcagaggccgcgggggcccagcacagagggcccgggagagggccagccgggagaccccagactctggagaggccagggctgggccacaagggtgtcccgcagagaccctcggccaaaagagaccctcctgggcagccacggcgccccccaaccagccccgatccccccacccacgacaggggctctcgggtgggaggcagggagcagacaaaccacacagccaagggatttgaattaactcagccatttttggagaactttggggaacatgaaaaaaaaaaaaaaaaaaaaaaaaaaaaacatttttaaaagaaaaaacggggagaaaaaaatagcttctattgatgagttttatcatctcaattgaatctttcctttccctgatgaagacagctggtggccgagtgcggcaaagaagccagaaggaaccagaatcccagtgccctacacccaccaccagacacactcacacccacacacgttctcagacacacacaagagtgcttgccggttataccaaaccctactattactgcctgcagaaatcaatttaaaaaaataataataacaataaacaattttaaaaaggacaaaaaaattaatgattgagaaaagaggcatttttttctgacatttggtcctgcttgaaacaacaaaagaagaagaaaaacccaccatcaccaccgattcctttgcttcttttttccttttttcctaccttgtttgaaaaccgtgggcttgggactgtgaattattgcatgacattcaaaaagaaaaaaaaaataaaaaaaagttgaatcaaa

SEQ ID NO: 4212 - DNA, 8628 bp, Homo sapiens
  source 1..8628: mol_type = unassigned DNA
gatgtcccgagctgctatccccggctcggcccgggcagccgccttctgagcccccgacccgaggcgccgagccgccgccgcccgatgggctgggccgtggagcgtctccgcagtcgtagctccagccgccgcgctcccagccccggcagcctcagcatcagcggcggcggcggcggcggcggcgtcttccgcatcgttcgccgcagcgtaacccggagccctttgctctttgcagaatggcccgcttcggagacgagatgccggcccgctacgggggaggaggctccggggcagccgccggggtggtcgtgggcagcggaggcgggcgaggagccgggggcagccggcagggcgggcagcccggggcgcaaaggatgtacaagcagtcaatggcgcagagagcgcggaccatggcactctacaaccccatccccgtccgacagaactgcctcacggttaaccggtctctcttcctcttcagcgaagacaacgtggtgagaaaatacgccaaaaagatcaccgaatggcctccctttgaatatatgattttagccaccatcatagcgaattgcatcgtcctcgcactggagcagcatctgcctgatgatgacaagaccccgatgtctgaacggctggatgacacagaaccatacttcattggaattttttgtttcgaggctggaattaaaatcattgcccttgggtttgccttccacaaaggctcctacttgaggaatggctggaatgtcatggactttgtggtggtgctaacgggcatcttggcgacagttgggacggagtttgacctacggacgctgagggcagttcgagtgctgcggccgctcaagctggtgtctggaatcccaagtttacaagtcgtcctgaagtcgatcatgaaggcgatgatccctttgctgcagatcggcctcctcctattttttgcaatccttatttttgcaatcatagggttagaattttatatgggaaaatttcataccacctgctttgaagaggggacagatgacattcagggtgagtctccggctccatgtgggacagaagagcccgcccgcacctgccccaatgggaccaaatgtcagccctactgggaagggcccaacaacgggatcactcagttcgacaacatcctgtttgcagtgctgactgttttccagtgcataaccatggaagggtggactgatctcctctacaatagcaacgatgcctcagggaacacttggaactggttgtacttcatccccctcatcatcatcggctccttttttatgctgaaccttgtgctgggtgtgctgtcaggggagtttgccaaagaaagggaacgggtggagaaccggcgggcttttctgaagctgaggcggcaacaacagattgaacgtgagctcaatgggtacatggagtggatctcaaaagcagaagaggtgatcctcgccgaggatgaaactgacggggagcagaggcatccctttgatgctctgcggagaaccaccataaagaaaagcaagacagatttgctcaaccccgaagaggctgaggatcagctggctgatatagcctctgtgggttctcccttcgcccgagccagcattaaaagtgccaagctggagaactcgaccttttttcacaaaaaggagaggaggatgcgtttctacatccgccgcatggtcaaaactcaggccttctactggactgtactcagtttggtagctctcaacacgctgtgtgttgctattgttcactacaaccagcccgagtggctctccgacttcctttactatgcagaattcattttcttaggactctttatgtccgaaatgtttataaaaatgtacgggcttgggacgcggccttacttccactcttccttcaactgctttgactgtggggttatcattgggagcatcttcgaggtcatctgggctgtcataaaacctggcacatcctttggaatcagcgtgttacgagccctcaggttattgcgtattttcaaagtcacaaagtactgggcatctctcagaaacctggtcgtctctctcctcaactccatgaagtccatcatcagcctgttgtttctccttttcctgttcattgtcgtcttcgcccttttgggaatgcaactcttcggcggccagtttaatttcgatgaagggactcctcccaccaacttcgatacttttccagcagcaataatgacggtgtttcagatcctgacgggcgaagactggaacgaggtcatgtacgacgggatcaagtctcaggggggcgtgcagggcggcatggtgttctccatctatttcattgtactgacgctctttgggaactacaccctcctgaatgtgttcttggccatcgctgtggacaatctggccaacgcccaggagctcaccaaggacgagcaagaggaagaagaagcagcgaaccagaaacttgccctacagaaagccaaggaggtggcagaagtgagtcctctgtccgcggccaacatgtctatagctgtgaaagagcaacagaagaatcaaaagccagccaagtccgtgtgggagcagcggaccagtgagatgcgaaagcagaacttgctggccagccgggaggccctgtataacgaaatggacccggacgagcgctggaaggctgcctacacgcggcacctgcggccagacatgaagacgcacttggaccggccgctggtggtggacccgcaggagaaccgcaacaacaacaccaacaagagccgggcggccgagcccaccgtggaccagcgcctcggccagcagcgcgccgaggacttcctcaggaaacaggcccgctaccacgatcgggcccgggaccccagcggctcggcgggcctggacgcacggaggccctgggcgggaagccaggaggccgagctgagccgggagggaccctacggccgcgagtcggaccaccacgcccgggagggcagcctggagcaacccgggttctgggagggcgaggccgagcgaggcaaggccggggacccccaccggaggcacgtgcaccggcaggggggcagcagggagagccgcagcgggtccccgcgcacgggcgcggacggggagcatcgacgtcatcgcgcgcaccgcaggcccggggaggagggtccggaggacaaggcggagcggagggcgcggcaccgcgagggcagccggccggcccggggcggcgagggcgagggcgagggccccgacgggggcgagcgcaggagaaggcaccggcatggcgctccagccacgtacgagggggacgcgcggagggaggacaaggagcggaggcatcggaggaggaaagagaaccagggctccggggtccctgtgtcgggccccaacctgtcaaccacccggccaatccagcaggacctgggccgccaagacccacccctggcagaggatattgacaacatgaagaacaacaagctggccaccgcggagtcggccgctccccacggcagccttggccacgccggcctgccccagagcccagccaagatgggaaacagcaccgaccccggccccatgctggccatccctgccatggccaccaacccccagaacgccgccagccgccggacgcccaacaacccggggaacccatccaatcccggcccccccaagacccccgagaatagccttatcgtcaccaaccccagcggcacccagaccaattcagctaagactgccaggaaacccgaccacaccacagtggacatccccccagcctgcccaccccccctcaaccacaccgtcgtacaagtgaacaaaaacgccaacccagacccactgccaaaaaaagaggaagagaagaaggaggaggaggaagacgaccgtggggaagacggccctaagccaatgcctccctatagctccatgttcatcctgtccacgaccaacccccttcgccgcctgtgccattacatcctgaacctgcgctactttgagatgtgcatcctcatggtcattgccatgagcagcatcgccctggccgccgaggaccctgtgcagcccaacgcacctcggaacaacgtgctgcgatactttgactacgtttttacaggcgtctttacctttgagatggtgatcaagatgattgacctggggctcgtcctgcatcagggtgcctacttccgtgacctctggaatattctcgacttcatagtggtcagtggggccctggtagcctttgccttcactggcaatagcaaaggaaaagacatcaacacgattaaatccctccgagtcctccgggtgctacgacctcttaaaaccatcaagcggctgccaaagctcaaggctgtgtttgactgtgtggtgaactcacttaaaaacgtcttcaacatcctcatcgtctacatgctattcatgttcatcttcgccgtggtggctgtgcagctcttcaaggggaaattcttccactgcactgacgagtccaaagagtttgagaaagattgtcgaggcaaatacctcctctacgagaagaatgaggtgaaggcgcgagaccgggagtggaagaagtatgaattccattacgacaatgtgctgtgggctctgctgaccctcttcaccgtgtccacgggagaaggctggccacaggtcctcaagcattcggtggacgccacctttgagaaccagggccccagccccgggtaccgcatggagatgtccattttctacgtcgtctactttgtggtgttccccttcttctttgtcaatatctttgtggccttgatcatcatcaccttccaggagcaaggggacaagatgatggaggaatacagcctggagaaaaatgagagggcctgcattgatttcgccatcagcgccaagccgctgacccgacacatgccgcagaacaagcagagcttccagtaccgcatgtggcagttcgtggtgtctccgcctttcgagtacacgatcatggccatgatcgccctcaacaccatcgtgcttatgatgaagttctatggggcttctgttgcttatgaaaatgccctgcgggtgttcaacatcgtcttcacctccctcttctctctggaatgtgtgctgaaagtcatggcttttgggattctgaattatttccgcgatgcctggaacatcttcgactttgtgactgttctgggcagcatcaccgatatcctcgtgactgagtttgggaataacttcatcaacctgagctttctccgcctcttccgagctgcccggctcatcaaacttctccgtcagggttacaccatccgcattcttctctggacctttgtgcagtccttcaaggccctgccttatgtctgtctgctgatcgccatgctcttcttcatctatgccatcattgggatgcaggtgtttggtaacattggcatcgacgtggaggacgaggacagtgatgaagatgagttccaaatcactgagcacaataacttccggaccttcttccaggccctcatgcttctcttccggagtgccaccggggaagcttggcacaacatcatgctttcctgcctcagcgggaaaccgtgtgataagaactctggcatcctgactcgagagtgtggcaatgaatttgcttatttttactttgtttccttcatcttcctctgctcgtttctgatgctgaatctctttgtcgccgtcatcatggacaactttgagtacctcacccgagactcctccatcctgggcccccaccacctggatgagtacgtgcgtgtctgggccgagtatgaccccgcagcttggggccgcatgccttacctggacatgtatcagatgctgagacacatgtctccgcccctgggtctggggaagaagtgtccggccagagtggcttacaagcggcttctgcggatggacctgcccgtcgcagatgacaacaccgtccacttcaattccaccctcatggctctgatccgcacagccctggacatcaagattgccaagggaggagccgacaaacagcagatggacgctgagctgcggaaggagatgatggcgatttggcccaatctgtcccagaagacgctagacctgctggtcacacctcacaagtccacggacctcaccgtggggaagatctacgcagccatgatgatcatggagtactaccggcagagcaaggccaagaagctgcaggccatgcgcgaggagcaggaccggacacccctcatgttccagcgcatggagcccccgtccccaacgcaggaagggggacctggccagaacgccctcccctccacccagctggacccaggaggagccctgatggctcacgaaagcggcctcaaggagagcccgtcctgggtgacccagcgtgcccaggagatgttccagaagacgggcacatggagtccggaacaaggcccccctaccgacatgcccaacagccagcctaactctcagtccgtggagatgcgagagatgggcagagatggctactccgacagcgagcactacctccccatggaaggccagggccgggctgcctccatgccccgcctccctgcagagaaccagaggagaaggggccggccacgtgggaataacctcagtaccatctcagacaccagccccatgaagcgttcagcctccgtgctgggccccaaggcccgacgcctggacgattactcgctggagcgggtcccgcccgaggagaaccagcggcaccaccagcggcgccgcgaccgcagccaccgcgcctctgagcgctccctgggccgctacaccgatgtggacacaggcttggggacagacctgagcatgaccacccaatccggggacctgccgtcgaaggagcgggaccaggagcggggccggcccaaggatcggaagcatcgacagcaccaccaccaccaccaccaccaccaccatcccccgccccccgacaaggaccgctatgcccaggaacggccggaccacggccgggcacgggctcgggaccagcgctggtcccgctcgcccagcgagggccgagagcacatggcgcaccggcagggcagtagttccgtaagtggaagcccagccccctcaacatctggtaccagcactccgcggcggggccgccgccagctcccccagaccccctccaccccccggccacacgtgtcctattcccctgtgatccgtaaggccggcggctcggggcccccgcagcagcagcagcagcagcagcagcagcagcagcagcaggcggtggccaggccgggccgggcggccaccagcggccctcggaggtacccaggccccacggccgagcctctggccggagatcggccgcccacggggggccacagcagcggccgctcgcccaggatggagaggcgggtcccaggcccggcccggagcgagtcccccagggcctgtcgacacggcggggcccggtggccggcatctggcccgcacgtgtccgaggggcccccgggtccccggcaccatggctactaccggggctccgactacgacgaggccgatggcccgggcagcgggggcggcgaggaggccatggccggggcctacgacgcgccaccccccgtacgacacgcgtcctcgggcgccaccgggcgctcgcccaggactccccgggcctcgggcccggcctgcgcctcgccttctcggcacggccggcgactccccaacggctactacccggcgcacggactggccaggccccgcgggccgggctccaggaagggcctgcacgaaccctacagcgagagtgacgatgattggtgctaagcccgggcgaggtggcgcccgcccggccccccacgcaccccacgcacacaccccacccgaggagccgcgcagaggccgcgggggcccagcacagagggcccgggagagggccagccgggagaccccagactctggagaggccagggctgggccacaagggtgtcccgcagagaccctcggccaaaagagaccctcctgggcagccacggcgccccccaaccagccccgatccccccacccacgacaggggctctcgggtgggaggcagggagcagacaaaccacacagccaagggatttgaattaactcagccatttttggagaactttggggaacatgaaaaaaaaaaaaaaaaaaaaaaaaaaaaacatttttaaaagaaaaaacggggagaaaaaaatagcttctattgatgagttttatcatctcaattgaatctttcctttccctgatgaagacagctggtggccgagtgcggcaaagaagccagaaggaaccagaatcccagtgccctacacccaccaccagacacactcacacccacacacgttctcagacacacacaagagtgcttgccggttataccaaaccctactattactgcctgcagaaatcaatttaaaaaaataataataacaataaacaattttaaaaaggacaaaaaaattaatgattgagaaaagaggcatttttttctgacatttggtcctgcttgaaacaacaaaagaagaagaaaaacccaccatcaccaccgattcctttgcttcttttttccttttttcctaccttgtttgaaaaccgtgggcttgggactgtgaattattgcatgacattcaaaaagaaaaaaaaaataaaaaaaagttgaatcaaa

SEQ ID NO: 4213 - DNA, 8410 bp, Homo sapiens
  source 1..8410: mol_type = unassigned DNA
atggcccgcttcggagacgagatgccggcccgctacgggggaggaggctccggggcagccgccggggtggtcgtgggcagcggaggcgggcgaggagccgggggcagccggcagggcgggcagcccggggcgcaaaggatgtacaagcagtcaatggcgcagagagcgcggaccatggcactctacaaccccatccccgtccgacagaactgcctcacggttaaccggtctctcttcctcttcagcgaagacaacgtggtgagaaaatacgccaaaaagatcaccgaatggccaccctttgaatatatgattttagccaccatcatagcgaattgcatcgtcctcgcactggagcagcatctgcctgatgatgacaagaccccgatgtctgaacggctggatgacacagaaccatacttcattggaattttttgtttcgaggctggaattaaaatcattgcccttgggtttgccttccacaaaggctcctacttgaggaatggctggaatgtcatggactttgtggtggtgctaacgggcatcttggcgacagttgggacggagtttgacctacggacgctgagggcagttcgagtgctgcggccgctcaagctggtgtctggaatcccaagtttacaagtcgtcctgaagtcgatcatgaaggcgatgatccctttgctgcagatcggcctcctcctattttttgcaatccttatttttgcaatcatagggttagaattttatatgggaaaatttcataccacctgctttgaagaggggacagatgacattcagggtgagtctccggctccatgtgggacagaagagcccgcccgcacctgccccaatgggaccaaatgtcagccctactgggaagggcccaacaacgggatcactcagttcgacaacatcctgtttgcagtgctgactgttttccagtgcataaccatggaagggtggactgatctcctctacaatagcaacgatgcctcagggaacacttggaactggttgtacttcatccccctcatcatcatcggctccttttttatgctgaaccttgtgctgggtgtgctgtcaggggagtttgccaaagaaagggaacgggtggagaaccggcgggcttttctgaagctgaggcggcaacaacagattgaacgtgagctcaatgggtacatggagtggatctcaaaagcagaagaggtgatcctcgccgaggatgaaactgacggggagcagaggcatccctttgatggagctctgcggagaaccaccataaagaaaagcaagacagatttgctcaaccccgaagaggctgaggatcagctggctgatatagcctctgtgggttctcccttcgcccgagccagcattaaaagtgccaagctggagaactcgaccttttttcacaaaaaggagaggaggatgcgtttctacatccgccgcatggtcaaaactcaggccttctactggactgtactcagtttggtagctctcaacacgctgtgtgttgctattgttcactacaaccagcccgagtggctctccgacttcctttactatgcagaattcattttcttaggactctttatgtccgaaatgtttataaaaatgtacgggcttgggacgcggccttacttccactcttccttcaactgctttgactgtggggttatcattgggagcatcttcgaggtcatctgggctgtcataaaacctggcacatcctttggaatcagcgtgttacgagccctcaggttattgcgtattttcaaagtcacaaagtactgggcatctctcagaaacctggtcgtctctctcctcaactccatgaagtccatcatcagcctgttgtttctccttttcctgttcattgtcgtcttcgcccttttgggaatgcaactcttcggcggccagtttaatttcgatgaagggactcctcccaccaacttcgatacttttccagcagcaataatgacggtgtttcagatcctgacgggcgaagactggaacgaggtcatgtacgacgggatcaagtctcaggggggcgtgcagggcggcatggtgttctccatctatttcattgtactgacgctctttgggaactacaccctcctgaatgtgttcttggccatcgctgtggacaatctggccaacgcccaggagctcaccaaggtggaggcggacgagcaagaggaagaagaagcagcgaaccagaaacttgccctacagaaagccaaggaggtggcagaagtgagtcctctgtccgcggccaacatgtctatagctgtgaaagagcaacagaagaatcaaaagccagccaagtccgtgtgggagcagcggaccagtgagatgcgaaagcagaacttgctggccagccgggaggccctgtataacgaaatggacccggacgagcgctggaaggctgcctacacgcggcacctgcggccagacatgaagacgcacttggaccggccgctggtggtggacccgcaggagaaccgcaacaacaacaccaacaagagccgggcggccgagcccaccgtggaccagcgcctcggccagcagcgcgccgaggacttcctcaggaaacaggcccgctaccacgatcgggcccgggaccccagcggctcggcgggcctggacgcacggaggccctgggcgggaagccaggaggccgagctgagccgggagggaccctacggccgcgagtcggaccaccacgcccgggagggcagcctggagcaacccgggttctgggagggcgaggccgagcgaggcaaggccggggacccccaccggaggcacgtgcaccggcaggggggcagcagggagagccgcagcgggtccccgcgcacgggcgcggacggggagcatcgacgtcatcgcgcgcaccgcaggcccggggaggagggtccggaggacaaggcggagcggagggcgcggcaccgcgagggcagccggccggcccggggcggcgagggcgagggcgagggccccgacgggggcgagcgcaggagaaggcaccggcatggcgctccagccacgtacgagggggacgcgcggagggaggacaaggagcggaggcatcggaggaggaaagagaaccagggctccggggtccctgtgtcgggccccaacctgtcaaccacccggccaatccagcaggacctgggccgccaagacccacccctggcagaggatattgacaacatgaagaacaacaagctggccaccgcggagtcggccgctccccacggcagccttggccacgccggcctgccccagagcccagccaagatgggaaacagcaccgaccccggccccatgctggccatccctgccatggccaccaacccccagaacgccgccagccgccggacgcccaacaacccggggaacccatccaatcccggcccccccaagacccccgagaatagccttatcgtcaccaaccccagcggcacccagaccaattcagctaagactgccaggaaacccgaccacaccacagtggacatccccccagcctgcccaccccccctcaaccacaccgtcgtacaagtgaacaaaaacgccaacccagacccactgccaaaaaaagaggaagagaagaaggaggaggaggaagacgaccgtggggaagacggccctaagccaatgcctccctatagctccatgttcatcctgtccacgaccaacccccttcgccgcctgtgccattacatcctgaacctgcgctactttgagatgtgcatcctcatggtcattgccatgagcagcatcgccctggccgccgaggaccctgtgcagcccaacgcacctcggaacaacgtgctgcgatactttgactacgtttttacaggcgtctttacctttgagatggtgatcaagatgattgacctggggctcgtcctgcatcagggtgcctacttccgtgacctctggaatattctcgacttcatagtggtcagtggggccctggtagcctttgccttcactggcaatagcaaaggaaaagacatcaacacgattaaatccctccgagtcctccgggtgctacgacctcttaaaaccatcaagcggctgccaaagctcaaggctgtgtttgactgtgtggtgaactcacttaaaaacgtcttcaacatcctcatcgtctacatgctattcatgttcatcttcgccgtggtggctgtgcagctcttcaaggggaaattcttccactgcactgacgagtccaaagagtttgagaaagattgtcgaggcaaatacctcctctacgagaagaatgaggtgaaggcgcgagaccgggagtggaagaagtatgaattccattacgacaatgtgctgtgggctctgctgaccctcttcaccgtgtccacgggagaaggctggccacaggtcctcaagcattcggtggacgccacctttgagaaccagggccccagccccgggtaccgcatggagatgtccattttctacgtcgtctactttgtggtgttccccttcttctttgtcaatatctttgtggccttgatcatcatcaccttccaggagcaaggggacaagatgatggaggaatacagcctggagaaaaatgagagggcctgcattgatttcgccatcagcgccaagccgctgacccgacacatgccgcagaacaagcagagcttccagtaccgcatgtggcagttcgtggtgtctccgcctttcgagtacacgatcatggccatgatcgccctcaacaccatcgtgcttatgatgaagttctatggggcttctgttgcttatgaaaatgccctgcgggtgttcaacatcgtcttcacctccctcttctctctggaatgtgtgctgaaagtcatggcttttgggattctgaattatttccgcgatgcctggaacatcttcgactttgtgactgttctgggcagcatcaccgatatcctcgtgactgagtttgggaatccgaataacttcatcaacctgagctttctccgcctcttccgagctgcccggctcatcaaacttctccgtcagggttacaccatccgcattcttctctggacctttgtgcagtccttcaaggccctgccttatgtctgtctgctgatcgccatgctcttcttcatctatgccatcattgggatgcaggtgtttggtaacattggcatcgacgtggaggacgaggacagtgatgaagatgagttccaaatcactgagcacaataacttccggaccttcttccaggccctcatgcttctcttccggagtgccaccggggaagcttggcacaacatcatgctttcctgcctcagcgggaaaccgtgtgataagaactctggcatcctgactcgagagtgtggcaatgaatttgcttatttttactttgtttccttcatcttcctctgctcgtttctgatgctgaatctctttgtcgccgtcatcatggacaactttgagtacctcacccgagactcctccatcctgggcccccaccacctggatgagtacgtgcgtgtctgggccgagtatgaccccgcagcttggggccgcatgccttacctggacatgtatcagatgctgagacacatgtctccgcccctgggtctggggaagaagtgtccggccagagtggcttacaagcggcttctgcggatggacctgcccgtcgcagatgacaacaccgtccacttcaattccaccctcatggctctgatccgcacagccctggacatcaagattgccaagggaggagccgacaaacagcagatggacgctgagctgcggaaggagatgatggcgatttggcccaatctgtcccagaagacgctagacctgctggtcacacctcacaagtccacggacctcaccgtggggaagatctacgcagccatgatgatcatggagtactaccggcagagcaaggccaagaagctgcaggccatgcgcgaggagcaggaccggacacccctcatgttccagcgcatggagcccccgtccccaacgcaggaagggggacctggccagaacgccctcccctccacccagctggacccaggaggagccctgatggctcacgaaagcggcctcaaggagagcccgtcctgggtgacccagcgtgcccaggagatgttccagaagacgggcacatggagtccggaacaaggcccccctaccgacatgcccaacagccagcctaactctcagtccgtggagatgcgagagatgggcagagatggctactccgacagcgagcactacctccccatggaaggccagggccgggctgcctccatgccccgcctccctgcagagaaccagaggagaaggggccggccacgtgggaataacctcagtaccatctcagacaccagccccatgaagcgttcagcctccgtgctgggccccaaggcccgacgcctggacgattactcgctggagcgggtcccgcccgaggagaaccagcggcaccaccagcggcgccgcgaccgcagccaccgcgcctctgagcgctccctgggccgctacaccgatgtggacacaggcttggggacagacctgagcatgaccacccaatccggggacctgccgtcgaaggagcgggaccaggagcggggccggcccaaggatcggaagcatcgacagcaccaccaccaccaccaccaccaccaccatcccccgccccccgacaaggaccgctatgcccaggaacggccggaccacggccgggcacgggctcgggaccagcgctggtcccgctcgcccagcgagggccgagagcacatggcgcaccggcagggcagtagttccgtaagtggaagcccagccccctcaacatctggtaccagcactccgcggcggggccgccgccagctcccccagaccccctccaccccccggccacacgtgtcctattcccctgtgatccgtaaggccggcggctcggggcccccgcagcagcagcagcagcagcagcagcagcagcagcagcaggcggtggccaggccgggccgggcggccaccagcggccctcggaggtacccaggccccacggccgagcctctggccggagatcggccgcccacggggggccacagcagcggccgctcgcccaggatggagaggcgggtcccaggcccggcccggagcgagtcccccagggcctgtcgacacggcggggcccggtggccggcatctggcccgcacgtgtccgaggggcccccgggtccccggcaccatggctactaccggggctccgactacgacgaggccgatggcccgggcagcgggggcggcgaggaggccatggccggggcctacgacgcgccaccccccgtacgacacgcgtcctcgggcgccaccgggcgctcgcccaggactccccgggcctcgggcccggcctgcgcctcgccttctcggcacggccggcgactccccaacggctactacccggcgcacggactggccaggccccgcgggccgggctccaggaagggcctgcacgaaccctacagcgagagtgacgatgattggtgctaagcccgggcgaggtggcgcccgcccggccccccacgcaccccacgcacacaccccacccgaggagccgcgcagaggccgcgggggcccagcacagagggcccgggagagggccagccgggagaccccagactctggagaggccagggctgggccacaagggtgtcccgcagagaccctcggccaaaagagaccctcctgggcagccacggcgccccccaaccagccccgatccccccacccacgacaggggctctcgggtgggaggcagggagcagacaaaccacacagccaagggatttgaattaactcagccatttttggagaactttggggaacatgaaaaaaaaaaaaaaaaaaaaaaaaaaaaacatttttaaaagaaaaaacggggagaaaaaaatagcttctattgatgagttttatcatctcaattgaatctttcctttccctgatgaagacagctggtggccgagtgcggcaaagaagccagaaggaaccagaatcccagtgccctacacccaccaccagacacactcacacccacacacgttctcagacacacacaagagtgcttgccggttataccaaaccctactattactgcctgcagaaatcaatttaaaaaaataataataacaataaacaattttaaaaaggacaaaaaaattaatgattgagaaaagaggcatttttttctgacatttggtcctgcttgaaacaacaaaagaagaagaaaaacccaccatcaccaccgattcctttgcttcttttttccttttttcctaccttgtttgaaaaccgtgggcttgggactgtgaattattgcatgacattcaaaaagaaaaaaaaaataaaaaaaagttgaatcaaa

SEQ ID NO: 4214 - DNA, 1006 bp, Homo sapiens
  source 1..1006: mol_type = unassigned DNA
cgacttcatagtggtcagtggggccctggtagcctttgccttcactggcaatagcaaaggaaaagacatcaacacgattaaatccctccgagtcctccgggtgctacgacctcttaaaaccatcaagcggctgccaaagctcaaggctgtgtttgactgtgtggtgaactcacttaaaaacgtcttcaacatcctcatcgtctacatgctattcatgttcatcttcgccgtggtggctgtgcagctcttcaaggggaaattcttccactgcactgacgagtccaaagagtttgagaaagattgtcgaggcaaatacctcctctacgagaagaatgaggtgaaggcgcgagaccgggagtggaagaagtatgaattccattacgacaatgtgctgtgggctctgctgaccctcttcaccgtgtccacgggagaaggctggccacaggtcctcaagcattcggtggacgccacctttgagaaccagggccccagccccgggtaccgcatggagatgtccattttctacgtcgtctactttgtggtgttccccttcttctttgtcaatatctttgtggccttgatcatcatcaccttccaggagcaaggggacaagatgatggaggaatacagcctggagaaaaatgagagggcctgcattgatttcgccatcagcgccaagccgctgacccgacacatgccgcagaacaagcagagcttccagtaccgcatgtggcagttcgtggtgtctccgcctttcgagtacacgatcatggccatgatcgccctcaacaccatcgtgcttatgatgaagttctatggggcttctgttgcttatgaaaatgccctgcgggtgttcaacatcgtcttcacctccctcttctctctggaatgtgtgctgaaagtcatggcttttgggattctgaattatttccgcgatgcctggaacatcttcgactttgtgactgttctgggcagcatcaccgatatcctcgtgactgagtttggg

SEQ ID NO: 4215 - DNA, 9848 bp, Homo sapiens
  source 1..9848: mol_type = unassigned DNA
gctgctgctgcctctccgaagagctcgcggagctccccagaggcggtggtccccgtgcttgtctggatgcggctctgagtctccgtgtgtctttctgcttgttgctgtgtgcgggtgttcggccgcgatcacctttgtgtgtcttctgtctgtttaaacctcaggatggctcgcttcggggaggcggtggtcgccaggccagggtccggcgatggagactcggaccagagcaggaaccggcaaggaacccccgtgccggcctcggggcaggcggccgcctacaagcagacgaaagcacagagggcgcggactatggctttgtacaaccccattcccgtccggcagaactgtttcaccgtcaacagatccctgttcatcttcggagaagataacattgtcaggaaatatgccaagaagctcatcgattggccgccatttgagtacatgatcctggccaccatcattgccaactgcatcgtcctggccctggagcagcatcttcctgaggatgacaagacccccatgtcccgaagactggagaagacagaaccttatttcattgggatcttttgctttgaagctgggatcaaaattgtggccctggggttcatcttccataagggctcttacctccgcaatggctggaatgtcatggacttcatcgtggtcctcagtggcatcctggccactgcaggaacccacttcaatactcacgtggacctgaggaccctccgggctgtgcgtgtcctgcggcctttgaagctcgtgtcagggatacctagcctgcagattgtgttgaagtccatcatgaaggccatggtacctcttctgcagattggccttctgctcttctttgccatcctgatgtttgctatcattggtttggagttctacagtggcaagttacatcgagcatgcttcatgaacaattcaggtattctagaaggatttgacccccctcacccatgtggtgtgcagggctgcccagctggttatgaatgcaaggactggatcggccccaatgatgggatcacccagtttgataacatcctttttgctgtgctgactgtcttccagtgcatcaccatggaagggtggaccactgtgctgtacaataccaatgatgccttaggagccacctggaattggctgtacttcatccccctcatcatcattggatccttctttgttctcaacctagtcctgggagtgctttccggggaatttgccaaagagagagagagagtggagaaccgaagggctttcatgaagctgcggcgccagcagcagattgagcgtgagctgaatggctaccgtgcctggatagacaaagcagaggaagtcatgctcgctgaagaaaataaaaatgctggaacatccgccttagaagtgcttcgaagggcaaccatcaagaggagccggacagaggccatgactcgagactccagtgatgagcactgtgttgatatctcctctgtgggcacacctctggcccgagccagtatcaaaagtgcaaaggtagacggggtctcttatttccggcacaaggaaaggcttctgcgcatctccattcgccacatggttaaatcccaggtgttttactggattgtgctgagccttgtggcactcaacactgcctgtgtggccattgtccatcacaaccagccccagtggctcacccacctcctctactatgcagaatttctgtttctgggactcttcctcttggagatgtccctgaagatgtatggcatggggcctcgcctttattttcactcttcattcaactgctttgattttggggtcacagtgggcagtatctttgaagtggtctgggcaatcttcagacctggtacgtcttttggaatcagtgtcttgcgagccctccggcttctaagaatatttaaaataaccaagtattgggcttccctacggaatttggtggtctccttgatgagctcaatgaagtctatcatcagtttgcttttcctcctcttcctcttcatcgttgtctttgctctcctaggaatgcagttatttggaggcaggtttaactttaatgatgggactccttcggcaaattttgataccttccctgcagccatcatgactgtgttccagatcctgacgggtgaggactggaatgaggtgatgtacaatgggatccgctcccagggtggggtcagctcaggcatgtggtctgccatctacttcattgtgctcaccttgtttggcaactacacgctactgaatgtgttcttggctatcgctgtggataatctcgccaacgcccaggaactgaccaaggatgaacaggaggaagaagaggccttcaaccagaaacatgcactgcagaaggccaaggaggtcagcccgatgtctgcacccaacatgccttcgatcgaaagagacagaaggagaagacaccacatgtcgatgtgggagccacgcagcagccacctgagggagcggaggcgccggcaccacatgtccgtgtgggagcagcgtaccagccagctgaggaagcacatgcagatgtccagccaggaggccctcaacagagaggaggcgccgaccatgaacccgctcaaccccctcaacccgctcagctccctcaacccgctcaatgcccaccccagcctttatcggcgacccagggccattgagggcctggccctgggcctggccctggagaagttcgaggaggagcgcatcagccgtggggggtccctcaagggggatggaggggaccgatccagtgccctggacaaccagaggacccctttgtccctgggccagcgggagccaccatggctggccaggccctgtcatggaaactgtgacccgactcagcaggaggcagggggaggagaggctgtggtgacctttgaggaccgggccaggcacaggcagagccaacggcgcagccggcatcgccgcgtcaggacagaaggcaaggagtcctcttcagcctcccggagcaggtctgccagccaggaacgcagtctggatgaagccatgcccactgaaggggagaaggaccatgagctcaggggcaaccatggtgccaaggagccaacgatccaagaagagagagcccaggatttaaggaggaccaacagtctgatggtgtccagaggctccgggctggcaggaggccttgatgaggctgacacccccctagtcctgccccatcctgagctggaagtggggaagcacgtggtgctgacggagcaggagccagaaggcagcagtgagcaggccctgctggggaatgtgcagctagacatgggccgggtcatcagccagagcgagcctgacctctcctgcatcacggccaacacggacaaggccaccaccgagagcaccagcgtcaccgtcgccatccccgacgtggaccccttggtggactcaaccgtggtgcacattagcaacaagacggatggggaagccagtcccttgaaggaggcagagatcagagaggatgaggaggaggtggagaagaagaagcagaagaaggagaagcgtgagacaggcaaagccatggtgccccacagctcaatgttcatcttcagcaccaccaacccgatccggagggcctgccactacatcgtgaacctgcgctactttgagatgtgcatcctcctggtgattgcagccagcagcatcgccctggcggcagaggaccccgtcctgaccaactcggagcgcaacaaagtcctgaggtattttgactatgtgttcacgggcgtgttcacctttgagatggttataaagatgatagaccaaggcttgatcctgcaggatgggtcctacttccgagacttgtggaacatcctggactttgtggtggtcgttggcgcattggtggcctttgctctggctaacagcatgaaaaccaacaaaggacgggacatcaagaccatcaagtctctgcgggtgctccgagttctaaggccactgaaaaccatcaagcgcttgcccaagctcaaggccgtcttcgactgcgtagtgacctccttgaagaatgtcttcaacatactcattgtgtacaagctcttcatgttcatctttgctgtcatcgcagttcagctcttcaagggaaagttcttttattgcacggacagttccaaggacacagagaaggagtgcataggcaactatgtagatcatgagaaaaacaagatggaggtgaagggccgggaatggaagcgccatgaattccactacgacaacattatctgggccctgctgaccctcttcaccgtctccacaggggaaggatggcctcaagttctgcagcactctgtagatgtgacagaggaagaccgaggcccaagccgcagcaaccgcatggagatgtctatcttttatgtagtctactttgtggtcttccccttcttctttgtcaatatctttgtggctctcatcatcatcaccttccaggagcaaggggataagatgatggaggagtgcagcctggagaagaatgagagggcgtgcatcgacttcgccatcagcgccaaacctctcacccgctacatgccgcagaacagacacaccttccagtaccgcgtgtggcactttgtggtgtctccgtcctttgagtacaccattatggccatgatcgccttgaatactgttgtgctgatgatgaagtattattctgctccctgtacctatgagctggccctgaagtacctgaatatcgccttcaccatggtgttttccctggaatgtgtcctgaaggtcatcgcttttggctttttgaactatttccgagacacctggaatatctttgacttcatcaccgtgattggcagtatcacagaaattatcctgacagacagcaagctggtgaacaccagtggcttcaatatgagctttctgaagctcttccgagctgcccgcctcataaagctcctgcgtcagggctataccatacgcattttgctgtggacctttgtgcagtcctttaaggccctcccttatgtctgccttttaattgccatgcttttcttcatttatgccatcattgggatgcaggtatttggaaacataaaattagacgaggagagtcacatcaaccggcacaacaacttccggagtttctttgggtccctaatgctactcttcaggagtgccacaggtgaggcctggcaggagattatgctgtcatgccttggggagaagggctgtgagcctgacaccaccgcaccatcagggcagaacgagaacgaacgctgcggcaccgatctggcctacgtgtactttgtctccttcatcttcttctgctccttcttgatgctcaacctgtttgtggccgtcatcatggacaactttgagtacctgactcgggactcctccatcctggggcctcaccacttggacgagtttgtccgcgtctgggcagaatatgaccgagcagcatgtggccgcatccattacactgagatgtatgaaatgctgactctcatgtcacctccgctaggcctcggcaagagatgtccctccaaagtggcatataagaggttggtcctgatgaacatgccagtagctgaggacatgacggtccacttcacctccacacttatggctctgatccggacagctctggacattaaaattgccaaaggtggtgcagacaggcagcagctagactcagagctacaaaaggagaccctagccatctggcctcacctatcccagaagatgctggatctgcttgtgcccatgcccaaagcctctgacctgactgtgggcaaaatctatgcagcaatgatgatcatggactactataagcagagtaaggtgaagaagcagaggcagcagctggaggaacagaaaaatgcccccatgttccagcgcatggagccttcatctctgcctcaggagatcattgctaatgccaaagccctgccttacctccagcaggaccccgtttcaggcctgagtggccggagtggatacccttcgatgagtccactctctccccaggatatattccagttggcttgtatggaccccgccgatgacggacagttccaagaacggcagtctctggagccagaggttagtgaattaaaaagcgtgcagccctctaaccatggcatctaccttccttcggacacccaggagcatgcgggatctgggagggcatcttctatgccacgtctgactgtggatccccaggtggtgacagaccctagctccatgagacgttcattttccactattcgggataagcgttcaaattcctcgtggttggaggaattctccatggagcgaagcagtgaaaatacctacaagtcccgtcgccggagttaccactcctccttgcggctgtcagcccaccgcctgaactctgattcaggccacaagtctgacactcaccgctcagggggcagggagcggggacgatcaaaagagcgaaagcatcttctctctcctgatgtctcccgctgcaattcagaagagcgagggacccaggctgactgggagtccccagagcgccgtcaatccaggtcacccagtgagggcaggtcacagacgcccaacagacagggcacaggttccctaagtgagagctccatcccctctgtctctgacaccagcaccccaagaagaagtcgtcggcagctcccacccgtcccgccaaagccccggcccctcctttcctacagctccctgattcgacacgcgggcagcatctctccacctgctgatggaagcgaggagggctccccgctgacctcccaagctctggagagcaacaatgcttgcctgaccgagtcttccaactctccgcacccccagcagagccaacatgcctccccacagcgctacatctccgagccctacttggccctgcacgaagactcccacgcctcagactgtggtgaggaggagacgctcactttcgaagcagccgtggctactagcctgggccgttccaacaccatcggctcagccccacccctgcggcatagctggcagatgcccaacgggcactatcggcggcggaggcgcggggggcctgggccaggcatgatgtgtggggctgtcaacaacctgctaagtgacacggaagaagatgacaaatgctagaggctgctcccccctccgatgcatgctcttctctcacatggagaaaaccaagacagaattgggaagccagtgcggcccgggggggaggaagagggaaaaggaagatggaaggacaccatgcattatcagagaagaggaagtaaaggacaatcagaacaccagtcaaacccaccaaattgctttattcccctttgcaagatgggcactgccatagttctgcctctttgctggggaaagaaaccaggaacgtggagggttattactgcgggagaagggacacgaggatggctttgcttccccttgccccttcccacttttctaaaagctgtggagggatctagctggcctatgtctacactcagtgccctgagaagcctggaagactttctggctcttaactggggagtagtggagaccataggagaggactctcctccctcaccagctcttacgcctcagccagcaccactgccaccagggcaactgcagcagcatctcatgcataaccctgtggcttgcttcccccagggcagcacaggctaagtcaggaacatcggatgccagggagggaggagaaagccgaagcgaaaggggtcagggtgctgaggcaacagcagcaagggctggtctggacaagaaaagccatagcccggcagcccctaccatgagggagacagagaaacagaactggtggtgctggggggtatagccccccatccttgaggcctgtcacccacacagtaggtgctgagagttaggacaggtcaggaagtcccccagggtccacaaaggtgcctgaggctctggtaagggtgaagataaaagtatttaacaaccgctatggcatcaatgtaagtggagtttggtcctagtgccggagcccatgctattccaggcattggctctttagatgccagtcatgggggaaccctgagggtgtgggtagagtagcaggggccacctaagagattaaaaacagtctgttttccaaccagtgtggaagcaattaaatatgcgtaacagtgctacggccacaccagcacctcctggctgaaggtcagcccacactctggtccatgaggcagcaaggccagtgctgtgccaagcccggtaaggccaagtgccgaggcccagccttccctgccactcctctgagagggcagaacacacatatccaagtaggctacccaccactgggtagggatttctgtaaagatgggaaaggctgatagattgaaataagcttctgtgaaagtctggatttactgaggacctcccctgaggagggaccgttgggaccgcagattctgcagctggtgtggggttcaggtcagtttgtcaggatgctttaaggtgattagtaaatatacctcagcttagacttgggctgctccttctagcaaagcaggctccagtggggcctcatcatacaggatgacaagactggggccctgttcaccttgaacatgcccctgggccaagatggggcttcacccctccccagagtaagagctggggctgacagtcccaccctgtcattcctaatagcccaaacgcagaagcactgagcaagagagccctttcttgccaagccagtgctcttttggtatatggcatacagctccattggaggggacacatcactggctttatctggtggaaatgtacctttcccttaagttcctccttagtgccatcacagcaggtgaatgggtgccctacggggccctccttcccccaccaggaacagatggaacctgccacccaggatcctgatctgccctgcactgagcactcagtggataaacactcctccagcccagacacactcctcctcttgggcaggagcaatccagagttgttatttttcttagaaggagcctcttttccctctattttttaaattgaaatataatagctgcatcagccctgaaaagccaaattcaaccacatggctggagaatcatttgtcatggccccgccttctcttctgatactaatggagcttcatgacccacggtcagcccccaaaccaaagttgtcccaacagaggaggccagtgaggcagagacagagctctcccactctcagaccctcttttgtcttcattttcctctcccacttagcacatgtgtgcttgagggtggctgggaatgtgatatacagcaccctgatcctaacaggtgtgattgttacgtaagacgctgatactgggccttgtattgcttttaaagtttcctctgctcagcatcatttcatgccaaagtgctgctatgggctgctttgtgtgcacaaaattgctttttccacctcggaaatgcagctttccctagggggaggcctacaacaggacgaccattctgagccagtgagtctattgcatggtgttttgagaaagggaattttagtgacaccttatgccatttcaagaggagaaatgcaggctggcagagcaatttccagaaatggaatttgcctgcaaatagtataaacaacactaaatttactgtgccaggaaatcttcctgaactccttgaactcatacacacaggtatttgagtcctgaataaagtgttggaaagcactgcagatgcggtcacctgactgaccacctgggttttctattaccagtgaatttcttttattcaccttcccttgaccaagaaattgggtttcttttccctcagcctgcacttactcttctattaagaccagaaaataaaataattttccgttgagtc

SEQ ID NO: 4216 - DNA, 9662 bp, Homo sapiens
  source 1..9662: mol_type = unassigned DNA
gctgctgctgcctctccgaagagctcgcggagctccccagaggcggtggtccccgtgcttgtctggatgcggctctgagtctccgtgtgtctttctgcttgttgctgtgtgcgggtgttcggccgcgatcacctttgtgtgtcttctgtctgtttaaacctcaggatggctcgcttcggggaggcggtggtcgccaggccagggtccggcgatggagactcggaccagagcaggaaccggcaaggaacccccgtgccggcctcggggcaggcggccgcctacaagcagacgaaagcacagagggcgcggactatggctttgtacaaccccattcccgtccggcagaactgtttcaccgtcaacagatccctgttcatcttcggagaagataacattgtcaggaaatatgccaagaagctcatcgattggccgccatttgagtacatgatcctggccaccatcattgccaactgcatcgtcctggccctggagcagcatcttcctgaggatgacaagacccccatgtcccgaagactggagaagacagaaccttatttcattgggatcttttgctttgaagctgggatcaaaattgtggccctggggttcatcttccataagggctcttacctccgcaatggctggaatgtcatggacttcatcgtggtcctcagtggcatcctggccactgcaggaacccacttcaatactcacgtggacctgaggaccctccgggctgtgcgtgtcctgcggcctttgaagctcgtgtcagggatacctagcctgcagattgtgttgaagtccatcatgaaggccatggtacctcttctgcagattggccttctgctcttctttgccatcctgatgtttgctatcattggtttggagttctacagtggcaagttacatcgagcatgcttcatgaacaattcaggtattctagaaggatttgacccccctcacccatgtggtgtgcagggctgcccagctggttatgaatgcaaggactggatcggccccaatgatgggatcacccagtttgataacatcctttttgctgtgctgactgtcttccagtgcatcaccatggaagggtggaccactgtgctgtacaataccaatgatgccttaggagccacctggaattggctgtacttcatccccctcatcatcattggatccttctttgttctcaacctagtcctgggagtgctttccggggaatttgccaaagagagagagagagtggagaaccgaagggctttcatgaagctgcggcgccagcagcagattgagcgtgagctgaatggctaccgtgcctggatagacaaagcagaggaagtcatgctcgctgaagaaaataaaaatgctggaacatccgccttagaagtgcttcgaagggcaaccatcaagaggagccggacagaggccatgactcgagactccagtgatgagcactgtgttgatatctcctctgtgggcacacctctggcccgagccagtatcaaaagtgcaaaggtagacggggtctcttatttccggcacaaggaaaggcttctgcgcatctccattcgccacatggttaaatcccaggtgttttactggattgtgctgagccttgtggcactcaacactgcctgtgtggccattgtccatcacaaccagccccagtggctcacccacctcctctactatgcagaatttctgtttctgggactcttcctcttggagatgtccctgaagatgtatggcatggggcctcgcctttattttcactcttcattcaactgctttgattttggggtcacagtgggcagtatctttgaagtggtctgggcaatcttcagacctggtacgtcttttggaatcagtgtcttgcgagccctccggcttctaagaatatttaaaataaccaagtattgggcttccctacggaatttggtggtctccttgatgagctcaatgaagtctatcatcagtttgcttttcctcctcttcctcttcatcgttgtctttgctctcctaggaatgcagttatttggaggcaggtttaactttaatgatgggactccttcggcaaattttgataccttccctgcagccatcatgactgtgttccagatcctgacgggtgaggactggaatgaggtgatgtacaatgggatccgctcccagggtggggtcagctcaggcatgtggtctgccatctacttcattgtgctcaccttgtttggcaactacacgctactgaatgtgttcttggctatcgctgtggataatctcgccaacgcccaggaactgaccaaggatgaacaggaggaagaagaggccttcaaccagaaacatgcactgcagaaggccaaggaggtcagcccgatgtctgcacccaacatgccttcgatcgagagggagcggaggcgccggcaccacatgtccgtgtgggagcagcgtaccagccagctgaggaagcacatgcagatgtccagccaggaggccctcaacagagaggaggcgccgaccatgaacccgctcaaccccctcaacccgctcagctccctcaacccgctcaatgcccaccccagcctttatcggcgacccagggccattgagggcctggccctgggcctggccctggagaagttcgaggaggagcgcatcagccgtggggggtccctcaagggggatggaggggaccgatccagtgccctggacaaccagaggacccctttgtccctgggccagcgggagccaccatggctggccaggccctgtcatggaaactgtgacccgactcagcaggaggcagggggaggagaggctgtggtgacctttgaggaccgggccaggcacaggcagagccaacggcgcagccggcatcgccgcgtcaggacagaaggcaaggagtcctcttcagcctcccggagcaggtctgccagccaggaacgcagtctggatgaagccatgcccactgaaggggagaaggaccatgagctcaggggcaaccatggtgccaaggagccaacgatccaagaagagagagcccaggatttaaggaggaccaacagtctgatggtgtccagaggctccgggctggcaggaggccttgatgaggctgacacccccctagtcctgccccatcctgagctggaagtggggaagcacgtggtgctgacggagcaggagccagaaggcagcagtgagcaggccctgctggggaatgtgcagctagacatgggccgggtcatcagccagagcgagcctgacctctcctgcatcacggccaacacggacaaggccaccaccgagagcaccagcgtcaccgtcgccatccccgacgtggaccccttggtggactcaaccgtggtgcacattagcaacaagacggatggggaagccagtcccttgaaggaggcagagatcagagaggatgaggaggaggtggagaagaagaagcagaagaaggagaagcgtgagacaggcaaagccatggtgccccacagctcaatgttcatcttcagcaccaccaacccgatccggagggcctgccactacatcgtgaacctgcgctactttgagatgtgcatcctcctggtgattgcagccagcagcatcgccctggcggcagaggaccccgtcctgaccaactcggagcgcaacaaagtcctgaggtattttgactatgtgttcacgggcgtgttcacctttgagatggttataaagatgatagaccaaggcttgatcctgcaggatgggtcctacttccgagacttgtggaacatcctggactttgtggtggtcgttggcgcattggtggcctttgctctggctaacagcatgaaaaccaacaaaggacgggacatcaagaccatcaagtctctgcgggtgctccgagttctaaggccactgaaaaccatcaagcgcttgcccaagctcaaggccgtcttcgactgcgtagtgacctccttgaagaatgtcttcaacatactcattgtgtacaagctcttcatgttcatctttgctgtcatcgcagttcagctcttcaagggaaagttcttttattgcacggacagttccaaggacacagagaaggagtgcataggcaactatgtagatcatgagaaaaacaagatggaggtgaagggccgggaatggaagcgccatgaattccactacgacaacattatctgggccctgctgaccctcttcaccgtctccacaggggaaggatggcctcaagttctgcagcactctgtagatgtgacagaggaagaccgaggcccaagccgcagcaaccgcatggagatgtctatcttttatgtagtctactttgtggtcttccccttcttctttgtcaatatctttgtggctctcatcatcatcaccttccaggagcaaggggataagatgatggaggagtgcagcctggagaagaatgagagggcgtgcatcgacttcgccatcagcgccaaacctctcacccgctacatgccgcagaacagacacaccttccagtaccgcgtgtggcactttgtggtgtctccgtcctttgagtacaccattatggccatgatcgccttgaatactgttgtgctgatgatgaagtattattctgctccctgtacctatgagctggccctgaagtacctgaatatcgccttcaccatggtgttttccctggaatgtgtcctgaaggtcatcgcttttggctttttgaactatttccgagacacctggaatatctttgacttcatcaccgtgattggcagtatcacagaaattatcctgacagacagcaagctggtgaacaccagtggcttcaatatgagctttctgaagctcttccgagctgcccgcctcataaagctcctgcgtcagggctataccatacgcattttgctgtggacctttgtgcagtcctttaaggccctcccttatgtctgccttttaattgccatgcttttcttcatttatgccatcattgggatgcaggtatttggaaacataaaattagacgaggagagtcacatcaaccggcacaacaacttccggagtttctttgggtccctaatgctactcttcaggagtgccacaggtgaggcctggcaggagattatgctgtcatgccttggggagaagggctgtgagcctgacaccaccgcaccatcagggcagaacgagaacgaacgctgcggcaccgatctggcctacgtgtactttgtctccttcatcttcttctgctccttcttgatgctcaacctgtttgtggccgtcatcatggacaactttgagtacctgactcgggactcctccatcctggggcctcaccacttggacgagtttgtccgcgtctgggcagaatatgaccgagcagcatgcggcaggatcccgtataaggatatgtacaaattagtgcgggtgatctcgcctcctctgggcctgggagagaactgcccctacagggtggcttgcaagaggttggtcctgatgaacatgccagtagctgaggacatgacggtccacttcacctccacacttatggctctgatccggacagctctggacattaaaattgccaaaggtggtgcagacaggcagcagctagactcagagctacaaaaggagaccctagccatctggcctcacctatcccagaagatgctggatctgcttgtgcccatgcccaaagcctctgacctgactgtgggcaaaatctatgcagcaatgatgatcatggactactataagcagagtaaggtgaagaagcagaggcagcagctggaggaacagaaaaatgcccccatgttccagcgcatggagccttcatctctgcctcaggagatcattgctaatgccaaagccctgccttacctccagcaggaccccgtttcaggcctgagtggccggagtggatacccttcgatgagtccactctctccccaggatatattccagttggcttgtatggaccccgccgatgacggacagttccaagaacggcagtctctggtggtgacagaccctagctccatgagacgttcattttccactattcgggataagcgttcaaattcctcgtggttggaggaattctccatggagcgaagcagtgaaaatacctacaagtcccgtcgccggagttaccactcctccttgcggctgtcagcccaccgcctgaactctgattcaggccacaagtctgacactcaccgctcagggggcagggagcggggacgatcaaaagagcgaaagcatcttctctctcctgatgtctcccgctgcaattcagaagagcgagggacccaggctgactgggagtccccagagcgccgtcaatccaggtcacccagtgagggcaggtcacagacgcccaacagacagggcacaggttccctaagtgagagctccatcccctctgtctctgacaccagcaccccaagaagaagtcgtcggcagctcccacccgtcccgccaaagccccggcccctcctttcctacagctccctgattcgacacgcgggcagcatctctccacctgctgatggaagcgaggagggctccccgctgacctcccaagctctggagagcaacaatgcttgcctgaccgagtcttccaactctccgcacccccagcagagccaacatgcctccccacagcgctacatctccgagccctacttggccctgcacgaagactcccacgcctcagactgtggtgaggaggagacgctcactttcgaagcagccgtggctactagcctgggccgttccaacaccatcggctcagccccacccctgcggcatagctggcagatgcccaacgggcactatcggcggcggaggcgcggggggcctgggccaggcatgatgtgtggggctgtcaacaacctgctaagtgacacggaagaagatgacaaatgctagaggctgctcccccctccgatgcatgctcttctctcacatggagaaaaccaagacagaattgggaagccagtgcggcccgggggggaggaagagggaaaaggaagatggaaggacaccatgcattatcagagaagaggaagtaaaggacaatcagaacaccagtcaaacccaccaaattgctttattcccctttgcaagatgggcactgccatagttctgcctctttgctggggaaagaaaccaggaacgtggagggttattactgcgggagaagggacacgaggatggctttgcttccccttgccccttcccacttttctaaaagctgtggagggatctagctggcctatgtctacactcagtgccctgagaagcctggaagactttctggctcttaactggggagtagtggagaccataggagaggactctcctccctcaccagctcttacgcctcagccagcaccactgccaccagggcaactgcagcagcatctcatgcataaccctgtggcttgcttcccccagggcagcacaggctaagtcaggaacatcggatgccagggagggaggagaaagccgaagcgaaaggggtcagggtgctgaggcaacagcagcaagggctggtctggacaagaaaagccatagcccggcagcccctaccatgagggagacagagaaacagaactggtggtgctggggggtatagccccccatccttgaggcctgtcacccacacagtaggtgctgagagttaggacaggtcaggaagtcccccagggtccacaaaggtgcctgaggctctggtaagggtgaagataaaagtatttaacaaccgctatggcatcaatgtaagtggagtttggtcctagtgccggagcccatgctattccaggcattggctctttagatgccagtcatgggggaaccctgagggtgtgggtagagtagcaggggccacctaagagattaaaaacagtctgttttccaaccagtgtggaagcaattaaatatgcgtaacagtgctacggccacaccagcacctcctggctgaaggtcagcccacactctggtccatgaggcagcaaggccagtgctgtgccaagcccggtaaggccaagtgccgaggcccagccttccctgccactcctctgagagggcagaacacacatatccaagtaggctacccaccactgggtagggatttctgtaaagatgggaaaggctgatagattgaaataagcttctgtgaaagtctggatttactgaggacctcccctgaggagggaccgttgggaccgcagattctgcagctggtgtggggttcaggtcagtttgtcaggatgctttaaggtgattagtaaatatacctcagcttagacttgggctgctccttctagcaaagcaggctccagtggggcctcatcatacaggatgacaagactggggccctgttcaccttgaacatgcccctgggccaagatggggcttcacccctccccagagtaagagctggggctgacagtcccaccctgtcattcctaatagcccaaacgcagaagcactgagcaagagagccctttcttgccaagccagtgctcttttggtatatggcatacagctccattggaggggacacatcactggctttatctggtggaaatgtacctttcccttaagttcctccttagtgccatcacagcaggtgaatgggtgccctacggggccctccttcccccaccaggaacagatggaacctgccacccaggatcctgatctgccctgcactgagcactcagtggataaacactcctccagcccagacacactcctcctcttgggcaggagcaatccagagttgttatttttcttagaaggagcctcttttccctctattttttaaattgaaatataatagctgcatcagccctgaaaagccaaattcaaccacatggctggagaatcatttgtcatggccccgccttctcttctgatactaatggagcttcatgacccacggtcagcccccaaaccaaagttgtcccaacagaggaggccagtgaggcagagacagagctctcccactctcagaccctcttttgtcttcattttcctctcccacttagcacatgtgtgcttgagggtggctgggaatgtgatatacagcaccctgatcctaacaggtgtgattgttacgtaagacgctgatactgggccttgtattgcttttaaagtttcctctgctcagcatcatttcatgccaaagtgctgctatgggctgctttgtgtgcacaaaattgctttttccacctcggaaatgcagctttccctagggggaggcctacaacaggacgaccattctgagccagtgagtctattgcatggtgttttgagaaagggaattttagtgacaccttatgccatttcaagaggagaaatgcaggctggcagagcaatttccagaaatggaatttgcctgcaaatagtataaacaacactaaatttactgtgccaggaaatcttcctgaactccttgaactcatacacacaggtatttgagtcctgaataaagtgttggaaagcactgcagatgcggtcacctgactgaccacctgggttttctattaccagtgaatttcttttattcaccttcccttgaccaagaaattgggtttcttttccctcagcctgcacttactcttctattaagaccagaaaataaaataattttccgttgagtc

SEQ ID NO: 4217 - DNA, 6970 bp, Homo sapiens
  source 1..6970: mol_type = unassigned DNA
cctcaggatggctcgcttcggggaggcggtggtcgccaggccagggtccggcgatggagactcggaccagagcaggaaccggcaaggaacccccgtgccggcctcggggcaggcggccgcctacaagcagacgaaagcacagagggcgcggactatggctttgtacaaccccattcccgtccggcagaactgtttcaccgtcaacagatccctgttcatcttcggagaagataacattgtcaggaaatatgccaagaagctcatcgattggccgccatttgagtacatgatcctggccaccatcattgccaactgcatcgtcctggccctggagcagcatcttcctgaggatgacaagacccccatgtcccgaagactggagaagacagaaccttatttcattgggatcttttgctttgaagctgggatcaaaattgtggccctggggttcatcttccataagggctcttacctccgcaatggctggaatgtcatggacttcatcgtggtcctcagtggcatcctggccactgcaggaacccacttcaatactcacgtggacctgaggaccctccgggctgtgcgtgtcctgcggcctttgaagctcgtgtcagggatacctagcctgcagattgtgttgaagtccatcatgaaggccatggtacctcttctgcagattggccttctgctcttctttgccatcctgatgtttgctatcattggtttggagttctacagtggcaagttacatcgagcatgcttcatgaacaattcaggtattctagaaggatttgacccccctcacccatgtggtgtgcagggctgcccagctggttatgaatgcaaggactggatcggccccaatgatgggatcacccagtttgataacatcctttttgctgtgctgactgtcttccagtgcatcaccatggaagggtggaccactgtgctgtacaataccaatgatgccttaggagccacctggaattggctgtacttcatccccctcatcatcattggatccttctttgttctcaacctagtcctgggagtgctttccggggaatttgccaaagagagagagagagtggagaaccgaagggctttcatgaagctgcggcgccagcagcagattgagcgtgagctgaatggctaccgtgcctggatagacaaagcagaggaagtcatgctcgctgaagaaaataaaaatgctggaacatccgccttagaagtgcttcgaagggcaaccatcaagaggagccggacagaggccatgactcgagactccagtgatgagcactgtgttgatatctcctctgtgggcacacctctggcccgagccagtatcaaaagtgcaaaggtagacggggtctcttatttccggcacaaggaaaggcttctgcgcatctccattcgccacatggttaaatcccaggtgttttactggattgtgctgagccttgtggcactcaacactgcctgtgtggccattgtccatcacaaccagccccagtggctcacccacctcctctactatgcagaatttctgtttctgggactcttcctcttggagatgtccctgaagatgtatggcatggggcctcgcctttattttcactcttcattcaactgctttgattttggggtcacagtgggcagtatctttgaagtggtctgggcaatcttcagacctggtacgtcttttggaatcagtgtcttgcgagccctccggcttctaagaatatttaaaataaccaagtattgggcttccctacggaatttggtggtctccttgatgagctcaatgaagtctatcatcagtttgcttttcctcctcttcctcttcatcgttgtctttgctctcctaggaatgcagttatttggaggcaggtttaactttaatgatgggactccttcggcaaattttgataccttccctgcagccatcatgactgtgttccagatcctgacgggtgaggactggaatgaggtgatgtacaatgggatccgctcccagggtggggtcagctcaggcatgtggtctgccatctacttcattgtgctcaccttgtttggcaactacacgctactgaatgtgttcttggctatcgctgtggataatctcgccaacgcccaggaactgaccaaggatgaacaggaggaagaagaggccttcaaccagaaacatgcactgcagaaggccaaggaggtcagcccgatgtctgcacccaacatgccttcgatcgagagggagcggaggcgccggcaccacatgtccgtgtgggagcagcgtaccagccagctgaggaagcacatgcagatgtccagccaggaggccctcaacagagaggaggcgccgaccatgaacccgctcaaccccctcaacccgctcagctccctcaacccgctcaatgcccaccccagcctttatcggcgacccagggccattgagggcctggccctgggcctggccctggagaagttcgaggaggagcgcatcagccgtggggggtccctcaagggggatggaggggaccgatccagtgccctggacaaccagaggacccctttgtccctgggccagcgggagccaccatggctggccaggccctgtcatggaaactgtgacccgactcagcaggaggcagggggaggagaggctgtggtgacctttgaggaccgggccaggcacaggcagagccaacggcgcagccggcatcgccgcgtcaggacagaaggcaaggagtcctcttcagcctcccggagcaggtctgccagccaggaacgcagtctggatgaagccatgcccactgaaggggagaaggaccatgagctcaggggcaaccatggtgccaaggagccaacgatccaagaagagagagcccaggatttaaggaggaccaacagtctgatggtgtccagaggctccgggctggcaggaggccttgatgaggctgacacccccctagtcctgccccatcctgagctggaagtggggaagcacgtggtgctgacggagcaggagccagaaggcagcagtgagcaggccctgctggggaatgtgcagctagacatgggccgggtcatcagccagagcgagcctgacctctcctgcatcacggccaacacggacaaggccaccaccgagagcaccagcgtcaccgtcgccatccccgacgtggaccccttggtggactcaaccgtggtgcacattagcaacaagacggatggggaagccagtcccttgaaggaggcagagatcagagaggatgaggaggaggtggagaagaagaagcagaagaaggagaagcgtgagacaggcaaagccatggtgccccacagctcaatgttcatcttcagcaccaccaacccgatccggagggcctgccactacatcgtgaacctgcgctactttgagatgtgcatcctcctggtgattgcagccagcagcatcgccctggcggcagaggaccccgtcctgaccaactcggagcgcaacaaagtcctgaggtattttgactatgtgttcacgggcgtgttcacctttgagatggttataaagatgatagaccaaggcttgatcctgcaggatgggtcctacttccgagacttgtggaacatcctggactttgtggtggtcgttggcgcattggtggcctttgctctggcgaacgctttgggaaccaacaaaggacgggacatcaagaccatcaagtctctgcgggtgctccgagttctaaggccactgaaaaccatcaagcgcttgcccaagctcaaggccgtcttcgactgcgtagtgacctccttgaagaatgtcttcaacatactcattgtgtacaagctcttcatgttcatctttgctgtcatcgcagttcagctcttcaagggaaagttcttttattgcacggacagttccaaggacacagagaaggagtgcataggcaactatgtagatcatgagaaaaacaagatggaggtgaagggccgggaatggaagcgccatgaattccactacgacaacattatctgggccctgctgaccctcttcaccgtctccacaggggaaggatggcctcaagttctgcagcactctgtagatgtgacagaggaagaccgaggcccaagccgcagcaaccgcatggagatgtctatcttttatgtagtctactttgtggtcttccccttcttctttgtcaatatctttgtggctctcatcatcatcaccttccaggagcaaggggataagatgatggaggagtgcagcctggagaagaatgagagggcgtgcatcgacttcgccatcagcgccaaacctctcacccgctacatgccgcagaacagacacaccttccagtaccgcgtgtggcactttgtggtgtctccgtcctttgagtacaccattatggccatgatcgccttgaatactgttgtgctgatgatgaagtattattctgctccctgtacctatgagctggccctgaagtacctgaatatcgccttcaccatggtgttttccctggaatgtgtcctgaaggtcatcgcttttggctttttgaactatttccgagacacctggaatatctttgacttcatcaccgtgattggcagtatcacagaaattatcctgacagacagcaagctggtgaacaccagtggcttcaatatgagctttctgaagctcttccgagctgcccgcctcataaagctcctgcgtcagggctataccatacgcattttgctgtggacctttgtgcagtcctttaaggccctcccttatgtctgccttttaattgccatgcttttcttcatttatgccatcattgggatgcaggtatttggaaacataaaattagacgaggagagtcacatcaaccggcacaacaacttccggagtttctttgggtccctaatgctactcttcaggagtgccacaggtgaggcctggcaggagattatgctgtcatgccttggggagaagggctgtgagcctgacaccaccgcaccatcagggcagaacgagaacgaacgctgcggcaccgatctggcctacgtgtactttgtctccttcatcttcttctgctccttcttgatgctcaacctgtttgtggccgtcatcatggacaactttgagtacctgactcgggactcctccatcctggggcctcaccacttggacgagtttgtccgcgtctgggcagaatatgaccgagcagcatgtggccgcatccattacactgagatgtatgaaatgctgactctcatgtcacctccgctaggcctcggcaagagatgtccctccaaagtggcatataagaggttggtcctgatgaacatgccagtagctgaggacatgacggtccacttcacctccacacttatggctctgatccggacagctctggacattaaaattgccaaaggtggtgcagacaggcagcagctagactcagagctacaaaaggagaccctagccatctggcctcacctatcccagaagatgctggatctgcttgtgcccatgcccaaagcctctgacctgactgtgggcaaaatctatgcagcaatgatgatcatggactactataagcagagtaaggtgaagaagcagaggcagcagctggaggaacagaaaaatgcccccatgttccagcgcatggagccttcatctctgcctcaggagatcattgctaatgccaaagccctgccttacctccagcaggaccccgtttcaggcctgagtggccggagtggatacccttcgatgagtccactctctccccaggatatattccagttggcttgtatggaccccgccgatgacggacagttccaagaacggcagtctctggagccagaggttagtgaattaaaaagcgtgcagccctctaaccatggcatctaccttccttcggacacccaggagcatgcgggatctgggagggcatcttctatgccacgtctgactgtggatccccaggtggtgacagaccctagctccatgagacgttcattttccactattcgggataagcgttcaaattcctcgtggttggaggaattctccatggagcgaagcagtgaaaatacctacaagtcccgtcgccggagttaccactcctccttgcggctgtcagcccaccgcctgaactctgattcaggccacaagtctgacactcaccgctcagggggcagggagcggggacgatcaaaagagcgaaagcatcttctctctcctgatgtctcccgctgcaattcagaagagcgagggacccaggctgactgggagtccccagagcgccgtcaatccaggtcacccagtgagggcaggtcacagacgcccaacagacagggcacaggttccctaagtgagagctccatcccctctgtctctgacaccagcaccccaagaagaagtcgtcggcagctcccacccgtcccgccaaagccccggcccctcctttcctacagctccctgattcgacacgcgggcagcatctctccacctgctgatggaagcgaggagggctccccgctgacctcccaagctctggagagcaacaatgcttgcctgaccgagtcttccaactctccgcacccccagcagagccaacatgcctccccacagcgctacatctccgagccctacttggccctgcacgaagactcccacgcctcagactgtggtgaggaggagacgctcactttcgaagcagccgtggctactagcctgggccgttccaacaccatcggctcagccccacccctgcggcatagctggcagatgcccaacgggcactatcggcggcggaggcgcggggggcctgggccaggcatgatgtgtggggctgtcaacaacctgctaagtgacacggaagaagatgacaaatgctagaggctgctcccccctccgatgcatgctcttctctcacatggagaaaaccaagacagaattgggaagccagtgcggccc

SEQ ID NO: 4218 - DNA, 9719 bp, Homo sapiens
  source 1..9719: mol_type = unassigned DNA
gctgctgctgcctctccgaagagctcgcggagctccccagaggcggtggtccccgtgcttgtctggatgcggctctgagtctccgtgtgtctttctgcttgttgctgtgtgcgggtgttcggccgcgatcacctttgtgtgtcttctgtctgtttaaacctcaggatggctcgcttcggggaggcggtggtcgccaggccagggtccggcgatggagactcggaccagagcaggaaccggcaaggaacccccgtgccggcctcggggcaggcggccgcctacaagcagacgaaagcacagagggcgcggactatggctttgtacaaccccattcccgtccggcagaactgtttcaccgtcaacagatccctgttcatcttcggagaagataacattgtcaggaaatatgccaagaagctcatcgattggccgccatttgagtacatgatcctggccaccatcattgccaactgcatcgtcctggccctggagcagcatcttcctgaggatgacaagacccccatgtcccgaagactggagaagacagaaccttatttcattgggatcttttgctttgaagctgggatcaaaattgtggccctggggttcatcttccataagggctcttacctccgcaatggctggaatgtcatggacttcatcgtggtcctcagtggcatcctggccactgcaggaacccacttcaatactcacgtggacctgaggaccctccgggctgtgcgtgtcctgcggcctttgaagctcgtgtcagggatacctagcctgcagattgtgttgaagtccatcatgaaggccatggtacctcttctgcagattggccttctgctcttctttgccatcctgatgtttgctatcattggtttggagttctacagtggcaagttacatcgagcatgcttcatgaacaattcaggtattctagaaggatttgacccccctcacccatgtggtgtgcagggctgcccagctggttatgaatgcaaggactggatcggccccaatgatgggatcacccagtttgataacatcctttttgctgtgctgactgtcttccagtgcatcaccatggaagggtggaccactgtgctgtacaataccaatgatgccttaggagccacctggaattggctgtacttcatccccctcatcatcattggatccttctttgttctcaacctagtcctgggagtgctttccggggaatttgccaaagagagagagagagtggagaaccgaagggctttcatgaagctgcggcgccagcagcagattgagcgtgagctgaatggctaccgtgcctggatagacaaagcagaggaagtcatgctcgctgaagaaaataaaaatgctggaacatccgccttagaagtgcttcgaagggcaaccatcaagaggagccggacagaggccatgactcgagactccagtgatgagcactgtgttgatatctcctctgtgggcacacctctggcccgagccagtatcaaaagtgcaaaggtagacggggtctcttatttccggcacaaggaaaggcttctgcgcatctccattcgccacatggttaaatcccaggtgttttactggattgtgctgagccttgtggcactcaacactgcctgtgtggccattgtccatcacaaccagccccagtggctcacccacctcctctactatgcagaatttctgtttctgggactcttcctcttggagatgtccctgaagatgtatggcatggggcctcgcctttattttcactcttcattcaactgctttgattttggggtcacagtgggcagtatctttgaagtggtctgggcaatcttcagacctggtacgtcttttggaatcagtgtcttgcgagccctccggcttctaagaatatttaaaataaccaagtattgggcttccctacggaatttggtggtctccttgatgagctcaatgaagtctatcatcagtttgcttttcctcctcttcctcttcatcgttgtctttgctctcctaggaatgcagttatttggaggcaggtttaactttaatgatgggactccttcggcaaattttgataccttccctgcagccatcatgactgtgttccagatcctgacgggtgaggactggaatgaggtgatgtacaatgggatccgctcccagggtggggtcagctcaggcatgtggtctgccatctacttcattgtgctcaccttgtttggcaactacacgctactgaatgtgttcttggctatcgctgtggataatctcgccaacgcccaggaactgaccaaggatgaacaggaggaagaagaggccttcaaccagaaacatgcactgcagaaggccaaggaggtcagcccgatgtctgcacccaacatgccttcgatcgaaagagacagaaggagaagacaccacatgtcgatgtgggagccacgcagcagccacctgagggagcggaggcgccggcaccacatgtccgtgtgggagcagcgtaccagccagctgaggaagcacatgcagatgtccagccaggaggccctcaacagagaggaggcgccgaccatgaacccgctcaaccccctcaacccgctcagctccctcaacccgctcaatgcccaccccagcctttatcggcgacccagggccattgagggcctggccctgggcctggccctggagaagttcgaggaggagcgcatcagccgtggggggtccctcaagggggatggaggggaccgatccagtgccctggacaaccagaggacccctttgtccctgggccagcgggagccaccatggctggccaggccctgtcatggaaactgtgacccgactcagcaggaggcagggggaggagaggctgtggtgacctttgaggaccgggccaggcacaggcagagccaacggcgcagccggcatcgccgcgtcaggacagaaggcaaggagtcctcttcagcctcccggagcaggtctgccagccaggaacgcagtctggatgaagccatgcccactgaaggggagaaggaccatgagctcaggggcaaccatggtgccaaggagccaacgatccaagaagagagagcccaggatttaaggaggaccaacagtctgatggtgtccagaggctccgggctggcaggaggccttgatgaggctgacacccccctagtcctgccccatcctgagctggaagtggggaagcacgtggtgctgacggagcaggagccagaaggcagcagtgagcaggccctgctggggaatgtgcagctagacatgggccgggtcatcagccagagcgagcctgacctctcctgcatcacggccaacacggacaaggccaccaccgagagcaccagcgtcaccgtcgccatccccgacgtggaccccttggtggactcaaccgtggtgcacattagcaacaagacggatggggaagccagtcccttgaaggaggcagagatcagagaggatgaggaggaggtggagaagaagaagcagaagaaggagaagcgtgagacaggcaaagccatggtgccccacagctcaatgttcatcttcagcaccaccaacccgatccggagggcctgccactacatcgtgaacctgcgctactttgagatgtgcatcctcctggtgattgcagccagcagcatcgccctggcggcagaggaccccgtcctgaccaactcggagcgcaacaaagtcctgaggtattttgactatgtgttcacgggcgtgttcacctttgagatggttataaagatgatagaccaaggcttgatcctgcaggatgggtcctacttccgagacttgtggaacatcctggactttgtggtggtcgttggcgcattggtggcctttgctctggcgatgtccctggaaaccaacaaaggacgggacatcaagaccatcaagtctctgcgggtgctccgagttctaaggccactgaaaaccatcaagcgcttgcccaagctcaaggccgtcttcgactgcgtagtgacctccttgaagaatgtcttcaacatactcattgtgtacaagctcttcatgttcatctttgctgtcatcgcagttcagctcttcaagggaaagttcttttattgcacggacagttccaaggacacagagaaggagtgcataggcaactatgtagatcatgagaaaaacaagatggaggtgaagggccgggaatggaagcgccatgaattccactacgacaacattatctgggccctgctgaccctcttcaccgtctccacaggggaaggatggcctcaagttctgcagcactctgtagatgtgacagaggaagaccgaggcccaagccgcagcaaccgcatggagatgtctatcttttatgtagtctactttgtggtcttccccttcttctttgtcaatatctttgtggctctcatcatcatcaccttccaggagcaaggggataagatgatggaggagtgcagcctggagaagaatgagagggcgtgcatcgacttcgccatcagcgccaaacctctcacccgctacatgccgcagaacagacacaccttccagtaccgcgtgtggcactttgtggtgtctccgtcctttgagtacaccattatggccatgatcgccttgaatactgttgtgctgatgatgaagtattattctgctccctgtacctatgagctggccctgaagtacctgaatatcgccttcaccatggtgttttccctggaatgtgtcctgaaggtcatcgcttttggctttttgaactatttccgagacacctggaatatctttgacttcatcaccgtgattggcagtatcacagaaattatcctgacagacagcaagctggtgaacaccagtggcttcaatatgagctttctgaagctcttccgagctgcccgcctcataaagctcctgcgtcagggctataccatacgcattttgctgtggacctttgtgcagtcctttaaggccctcccttatgtctgccttttaattgccatgcttttcttcatttatgccatcattgggatgcaggtatttggaaacataaaattagacgaggagagtcacatcaaccggcacaacaacttccggagtttctttgggtccctaatgctactcttcaggagtgccacaggtgaggcctggcaggagattatgctgtcatgccttggggagaagggctgtgagcctgacaccaccgcaccatcagggcagaacgagaacgaacgctgcggcaccgatctggcctacgtgtactttgtctccttcatcttcttctgctccttcttgatgctcaacctgtttgtggccgtcatcatggacaactttgagtacctgactcgggactcctccatcctggggcctcaccacttggacgagtttgtccgcgtctgggcagaatatgaccgagcagcatgtggccgcatccattacactgagatgtatgaaatgctgactctcatgtcacctccgctaggcctcggcaagagatgtccctccaaagtggcatataagaggttggtcctgatgaacatgccagtagctgaggacatgacggtccacttcacctccacacttatggctctgatccggacagctctggacattaaaattgccaaaggtggtgcagacaggcagcagctagactcagagctacaaaaggagaccctagccatctggcctcacctatcccagaagatgctggatctgcttgtgcccatgcccaaagcctctgacctgactgtgggcaaaatctatgcagcaatgatgatcatggactactataagcagagtaaggtgaagaagcagaggcagcagctggaggaacagaaaaatgcccccatgttccagcgcatggagccttcatctctgcctcaggagatcattgctaatgccaaagccctgccttacctccagcaggaccccgtttcaggcctgagtggccggagtggatacccttcgatgagtccactctctccccaggatatattccagttggcttgtatggaccccgccgatgacggacagttccaagaacggcagtctctggtggtgacagaccctagctccatgagacgttcattttccactattcgggataagcgttcaaattcctcgtggttggaggaattctccatggagcgaagcagtgaaaatacctacaagtcccgtcgccggagttaccactcctccttgcggctgtcagcccaccgcctgaactctgattcaggccacaagtctgacactcaccgctcagggggcagggagcggggacgatcaaaagagcgaaagcatcttctctctcctgatgtctcccgctgcaattcagaagagcgagggacccaggctgactgggagtccccagagcgccgtcaatccaggtcacccagtgagggcaggtcacagacgcccaacagacagggcacaggttccctaagtgagagctccatcccctctgtctctgacaccagcaccccaagaagaagtcgtcggcagctcccacccgtcccgccaaagccccggcccctcctttcctacagctccctgattcgacacgcgggcagcatctctccacctgctgatggaagcgaggagggctccccgctgacctcccaagctctggagagcaacaatgcttgcctgaccgagtcttccaactctccgcacccccagcagagccaacatgcctccccacagcgctacatctccgagccctacttggccctgcacgaagactcccacgcctcagactgtggtgaggaggagacgctcactttcgaagcagccgtggctactagcctgggccgttccaacaccatcggctcagccccacccctgcggcatagctggcagatgcccaacgggcactatcggcggcggaggcgcggggggcctgggccaggcatgatgtgtggggctgtcaacaacctgctaagtgacacggaagaagatgacaaatgctagaggctgctcccccctccgatgcatgctcttctctcacatggagaaaaccaagacagaattgggaagccagtgcggcccgggggggaggaagagggaaaaggaagatggaaggacaccatgcattatcagagaagaggaagtaaaggacaatcagaacaccagtcaaacccaccaaattgctttattcccctttgcaagatgggcactgccatagttctgcctctttgctggggaaagaaaccaggaacgtggagggttattactgcgggagaagggacacgaggatggctttgcttccccttgccccttcccacttttctaaaagctgtggagggatctagctggcctatgtctacactcagtgccctgagaagcctggaagactttctggctcttaactggggagtagtggagaccataggagaggactctcctccctcaccagctcttacgcctcagccagcaccactgccaccagggcaactgcagcagcatctcatgcataaccctgtggcttgcttcccccagggcagcacaggctaagtcaggaacatcggatgccagggagggaggagaaagccgaagcgaaaggggtcagggtgctgaggcaacagcagcaagggctggtctggacaagaaaagccatagcccggcagcccctaccatgagggagacagagaaacagaactggtggtgctggggggtatagccccccatccttgaggcctgtcacccacacagtaggtgctgagagttaggacaggtcaggaagtcccccagggtccacaaaggtgcctgaggctctggtaagggtgaagataaaagtatttaacaaccgctatggcatcaatgtaagtggagtttggtcctagtgccggagcccatgctattccaggcattggctctttagatgccagtcatgggggaaccctgagggtgtgggtagagtagcaggggccacctaagagattaaaaacagtctgttttccaaccagtgtggaagcaattaaatatgcgtaacagtgctacggccacaccagcacctcctggctgaaggtcagcccacactctggtccatgaggcagcaaggccagtgctgtgccaagcccggtaaggccaagtgccgaggcccagccttccctgccactcctctgagagggcagaacacacatatccaagtaggctacccaccactgggtagggatttctgtaaagatgggaaaggctgatagattgaaataagcttctgtgaaagtctggatttactgaggacctcccctgaggagggaccgttgggaccgcagattctgcagctggtgtggggttcaggtcagtttgtcaggatgctttaaggtgattagtaaatatacctcagcttagacttgggctgctccttctagcaaagcaggctccagtggggcctcatcatacaggatgacaagactggggccctgttcaccttgaacatgcccctgggccaagatggggcttcacccctccccagagtaagagctggggctgacagtcccaccctgtcattcctaatagcccaaacgcagaagcactgagcaagagagccctttcttgccaagccagtgctcttttggtatatggcatacagctccattggaggggacacatcactggctttatctggtggaaatgtacctttcccttaagttcctccttagtgccatcacagcaggtgaatgggtgccctacggggccctccttcccccaccaggaacagatggaacctgccacccaggatcctgatctgccctgcactgagcactcagtggataaacactcctccagcccagacacactcctcctcttgggcaggagcaatccagagttgttatttttcttagaaggagcctcttttccctctattttttaaattgaaatataatagctgcatcagccctgaaaagccaaattcaaccacatggctggagaatcatttgtcatggccccgccttctcttctgatactaatggagcttcatgacccacggtcagcccccaaaccaaagttgtcccaacagaggaggccagtgaggcagagacagagctctcccactctcagaccctcttttgtcttcattttcctctcccacttagcacatgtgtgcttgagggtggctgggaatgtgatatacagcaccctgatcctaacaggtgtgattgttacgtaagacgctgatactgggccttgtattgcttttaaagtttcctctgctcagcatcatttcatgccaaagtgctgctatgggctgctttgtgtgcacaaaattgctttttccacctcggaaatgcagctttccctagggggaggcctacaacaggacgaccattctgagccagtgagtctattgcatggtgttttgagaaagggaattttagtgacaccttatgccatttcaagaggagaaatgcaggctggcagagcaatttccagaaatggaatttgcctgcaaatagtataaacaacactaaatttactgtgccaggaaatcttcctgaactccttgaactcatacacacaggtatttgagtcctgaataaagtgttggaaagcactgcagatgcggtcacctgactgaccacctgggttttctattaccagtgaatttcttttattcaccttcccttgaccaagaaattgggtttcttttccctcagcctgcacttactcttctattaagaccagaaaataaaataattttccgttgagtc

SEQ ID NO: 4219 - DNA, 9724 bp, Homo sapiens
  source 1..9724: mol_type = unassigned DNA
gctgctgctgcctctccgaagagctcgcggagctccccagaggcggtggtccccgtgcttgtctggatgcggctctgagtctccgtgtgtctttctgcttgttgctgtgtgcgggtgttcggccgcgatcacctttgtgtgtcttctgtctgtttaaacctcaggatggctcgcttcggggaggcggtggtcgccaggccagggtccggcgatggagactcggaccagagcaggaaccggcaaggaacccccgtgccggcctcggggcaggcggccgcctacaagcagacgaaagcacagagggcgcggactatggctttgtacaaccccattcccgtccggcagaactgtttcaccgtcaacagatccctgttcatcttcggagaagataacattgtcaggaaatatgccaagaagctcatcgattggccgccatttgagtacatgatcctggccaccatcattgccaactgcatcgtcctggccctggagcagcatcttcctgaggatgacaagacccccatgtcccgaagactggagaagacagaaccttatttcattgggatcttttgctttgaagctgggatcaaaattgtggccctggggttcatcttccataagggctcttacctccgcaatggctggaatgtcatggacttcatcgtggtcctcagtggcatcctggccactgcaggaacccacttcaatactcacgtggacctgaggaccctccgggctgtgcgtgtcctgcggcctttgaagctcgtgtcagggatacctagcctgcagattgtgttgaagtccatcatgaaggccatggtacctcttctgcagattggccttctgctcttctttgccatcctgatgtttgctatcattggtttggagttctacagtggcaagttacatcgagcatgcttcatgaacaattcaggtattctagaaggatttgacccccctcacccatgtggtgtgcagggctgcccagctggttatgaatgcaaggactggatcggccccaatgatgggatcacccagtttgataacatcctttttgctgtgctgactgtcttccagtgcatcaccatggaagggtggaccactgtgctgtacaataccaatgatgccttaggagccacctggaattggctgtacttcatccccctcatcatcattggatccttctttgttctcaacctagtcctgggagtgctttccggggaatttgccaaagagagagagagagtggagaaccgaagggctttcatgaagctgcggcgccagcagcagattgagcgtgagctgaatggctaccgtgcctggatagacaaagcagaggaagtcatgctcgctgaagaaaataaaaatgctggaacatccgccttagaagtgcttcgaagggcaaccatcaagaggagccggacagaggccatgactcgagactccagtgatgagcactgtgttgatatctcctctgtgggcacacctctggcccgagccagtatcaaaagtgcaaaggtagacggggtctcttatttccggcacaaggaaaggcttctgcgcatctccattcgccacatggttaaatcccaggtgttttactggattgtgctgagccttgtggcactcaacactgcctgtgtggccattgtccatcacaaccagccccagtggctcacccacctcctctactatgcagaatttctgtttctgggactcttcctcttggagatgtccctgaagatgtatggcatggggcctcgcctttattttcactcttcattcaactgctttgattttggggtcacagtgggcagtatctttgaagtggtctgggcaatcttcagacctggtacgtcttttggaatcagtgtcttgcgagccctccggcttctaagaatatttaaaataaccaagtattgggcttccctacggaatttggtggtctccttgatgagctcaatgaagtctatcatcagtttgcttttcctcctcttcctcttcatcgttgtctttgctctcctaggaatgcagttatttggaggcaggtttaactttaatgatgggactccttcggcaaattttgataccttccctgcagccatcatgactgtgttccagatcctgacgggtgaggactggaatgaggtgatgtacaatgggatccgctcccagggtggggtcagctcaggcatgtggtctgccatctacttcattgtgctcaccttgtttggcaactacacgctactgaatgtgttcttggctatcgctgtggataatctcgccaacgcccaggaactgaccaaggatgaacaggaggaagaagaggccttcaaccagaaacatgcactgcagaaggccaaggaggtcagcccgatgtctgcacccaacatgccttcgatcgaaagagacagaaggagaagacaccacatgtcgatgtgggagccacgcagcagccacctgagggagcggaggcgccggcaccacatgtccgtgtgggagcagcgtaccagccagctgaggaagcacatgcagatgtccagccaggaggccctcaacagagaggaggcgccgaccatgaacccgctcaaccccctcaacccgctcagctccctcaacccgctcaatgcccaccccagcctttatcggcgacccagggccattgagggcctggccctgggcctggccctggagaagttcgaggaggagcgcatcagccgtggggggtccctcaagggggatggaggggaccgatccagtgccctggacaaccagaggacccctttgtccctgggccagcgggagccaccatggctggccaggccctgtcatggaaactgtgacccgactcagcaggaggcagggggaggagaggctgtggtgacctttgaggaccgggccaggcacaggcagagccaacggcgcagccggcatcgccgcgtcaggacagaaggcaaggagtcctcttcagcctcccggagcaggtctgccagccaggaacgcagtctggatgaagccatgcccactgaaggggagaaggaccatgagctcaggggcaaccatggtgccaaggagccaacgatccaagaagagagagcccaggatttaaggaggaccaacagtctgatggtgtccagaggctccgggctggcaggaggccttgatgaggctgacacccccctagtcctgccccatcctgagctggaagtggggaagcacgtggtgctgacggagcaggagccagaaggcagcagtgagcaggccctgctggggaatgtgcagctagacatgggccgggtcatcagccagagcgagcctgacctctcctgcatcacggccaacacggacaaggccaccaccgagagcaccagcgtcaccgtcgccatccccgacgtggaccccttggtggactcaaccgtggtgcacattagcaacaagacggatggggaagccagtcccttgaaggaggcagagatcagagaggatgaggaggaggtggagaagaagaagcagaagaaggagaagcgtgagacaggcaaagccatggtgccccacagctcaatgttcatcttcagcaccaccaacccgatccggagggcctgccactacatcgtgaacctgcgctactttgagatgtgcatcctcctggtgattgcagccagcagcatcgccctggcggcagaggaccccgtcctgaccaactcggagcgcaacaaagtcctgaggtattttgactatgtgttcacgggcgtgttcacctttgagatggttataaagatgatagaccaaggcttgatcctgcaggatgggtcctacttccgagacttgtggaacatcctggactttgtggtggtcgttggcgcattggtggcctttgctctggcgaacgctttgggaaccaacaaaggacgggacatcaagaccatcaagtctctgcgggtgctccgagttctaaggccactgaaaaccatcaagcgcttgcccaagctcaaggccgtcttcgactgcgtagtgacctccttgaagaatgtcttcaacatactcattgtgtacaagctcttcatgttcatctttgctgtcatcgcagttcagctcttcaagggaaagttcttttattgcacggacagttccaaggacacagagaaggagtgcataggcaactatgtagatcatgagaaaaacaagatggaggtgaagggccgggaatggaagcgccatgaattccactacgacaacattatctgggccctgctgaccctcttcaccgtctccacaggggaaggatggcctcaagttctgcagcactctgtagatgtgacagaggaagaccgaggcccaagccgcagcaaccgcatggagatgtctatcttttatgtagtctactttgtggtcttccccttcttctttgtcaatatctttgtggctctcatcatcatcaccttccaggagcaaggggataagatgatggaggagtgcagcctggagaagaatgagagggcgtgcatcgacttcgccatcagcgccaaacctctcacccgctacatgccgcagaacagacacaccttccagtaccgcgtgtggcactttgtggtgtctccgtcctttgagtacaccattatggccatgatcgccttgaatactgttgtgctgatgatgaagtattattctgctccctgtacctatgagctggccctgaagtacctgaatatcgccttcaccatggtgttttccctggaatgtgtcctgaaggtcatcgcttttggctttttgaactatttccgagacacctggaatatctttgacttcatcaccgtgattggcagtatcacagaaattatcctgacagacagcaagctggtgaacaccagtggcttcaatatgagctttctgaagctcttccgagctgcccgcctcataaagctcctgcgtcagggctataccatacgcattttgctgtggacctttgtgcagtcctttaaggccctcccttatgtctgccttttaattgccatgcttttcttcatttatgccatcattgggatgcaggtatttggaaacataaaattagacgaggagagtcacatcaaccggcacaacaacttccggagtttctttgggtccctaatgctactcttcaggagtgccacaggtgaggcctggcaggagattatgctgtcatgccttggggagaagggctgtgagcctgacaccaccgcaccatcagggcagaacgagaacgaacgctgcggcaccgatctggcctacgtgtactttgtctccttcatcttcttctgctccttcttgatgctcaacctgtttgtggccgtcatcatggacaactttgagtacctgactcgggactcctccatcctggggcctcaccacttggacgagtttgtccgcgtctgggcagaatatgaccgagcagcatgtggccgcatccattacactgagatgtatgaaatgctgactctcatgtcacctccgctaggcctcggcaagagatgtccctccaaagtggcatataagaggttggtcctgatgaacatgccagtagctgaggacatgacggtccacttcacctccacacttatggctctgatccggacagctctggacattaaaattgccaaaggtggtgcagacaggcagcagctagactcagagctacaaaaggagaccctagccatctggcctcacctatcccagaagatgctggatctgcttgtgcccatgcccaaagcctctgacctgactgtgggcaaaatctatgcagcaatgatgatcatggactactataagcagagtaaggtgaagaagcagaggcagcagctggaggaacagaaaaatgcccccatgttccagcgcatggagccttcatctctgcctcaggagatcattgctaatgccaaagccctgccttacctccagcaggaccccgtttcaggcctgagtggccggagtggatacccttcgatgagtccactctctccccaggatatattccagttggcttgtatggaccccgccgatgacggacagttccaagaacggcagtctctggtggtgacagaccctagctccatgagacgttcattttccactattcgggataagcgttcaaattcctcgtggttggaggaattctccatggagcgaagcagtgaaaatacctacaagtcccgtcgccggagttaccactcctccttgcggctgtcagcccaccgcctgaactctgattcaggccacaagtctgacactcaccgctcagggggcagggagcggggacgatcaaaagagcgaaagcatcttctctctcctgatgtctcccgctgcaattcagaagagcgagggacccaggctgactgggagtccccagagcgccgtcaatccaggtcacccagtgagggcaggtcacagacgcccaacagacagggcacaggttccctaagtgagagctccatcccctctgtctctgacaccagcaccccaagaagaagtcgtcggcagctcccacccgtcccgccaaagccccggcccctcctttcctacagctccctgattcgacacgcgggcagcatctctccacctgctgatggaagcgaggagggctccccgctgacctcccaagctctggagagcaacaatgcttgcctgaccgagtcttccaactctccgcacccccagcagagccaacatgcctccccacagcgctacatctccgagccctacttggccctgcacgaagactcccacgcctcagactgtggtgaggaggagacgctcactttcgaagcagccgtggctactagcctgggccgttccaacaccatcggctcagccccacccctgcggcatagctggcagatgcccaacgggcactatcggcggcggaggcgcggggggcctgggccaggcatgatgtgtggggctgtcaacaacctgctaagtgacacggaagaagatgacaaatgctagaggctgctcccccctccgatgcatgctcttctctcacatggagaaaaccaagacagaattgggaagccagtgcggcccgggggggaggaagagggaaaaggaagatggaaggacaccatgcattatcagagaagaggaagtaaaggacaatcagaacaccagtcaaacccaccaaattgctttattcccctttgcaagatgggcactgccatagttctgcctctttgctggggaaagaaaccaggaacgtggagggttattactgcgggagaagggacacgaggatggctttgcttccccttgccccttcccacttttctaaaagctgtggagggatctagctggcctatgtctacactcagtgccctgagaagcctggaagactttctggctcttaactggggagtagtggagaccataggagaggactctcctccctcaccagctcttacgcctcagccagcaccactgccaccagggcaactgcagcagcatctcatgcataaccctgtggcttgcttcccccagggcagcacaggctaagtcaggaacatcggatgccagggagggaggagaaagccgaagcgaaaggggtcagggtgctgaggcaacagcagcaagggctggtctggacaagaaaagccatagcccggcagcccctaccatgagggagacagagaaacagaactggtggtgctggggggtatagccccccatccttgaggcctgtcacccacacagtaggtgctgagagttaggacaggtcaggaagtcccccagggtccacaaaggtgcctgaggctctggtaagggtgaagataaaagtatttaacaaccgctatggcatcaatgtaagtggagtttggtcctagtgccggagcccatgctattccaggcattggctctttagatgccagtcatgggggaaccctgagggtgtgggtagagtagcaggggccacctaagagattaaaaacagtctgttttccaaccagtgtggaagcaattaaatatgcgtaacagtgctacggccacaccagcacctcctggctgaaggtcagcccacactctggtccatgaggcagcaaggccagtgctgtgccaagcccggtaaggccaagtgccgaggcccagccttccctgccactcctctgagagggcagaacacacatatccaagtaggctacccaccactgggtagggatttctgtaaagatgggaaaggctgatagattgaaataagcttctgtgaaagtctggatttactgaggacctcccctgaggagggaccgttgggaccgcagattctgcagctggtgtggggttcaggtcagtttgtcaggatgctttaaggtgattagtaaatatacctcagcttagacttgggctgctccttctagcaaagcaggctccagtggggcctcatcatacaggatgacaagactggggccctgttcaccttgaacatgcccctgggccaagatggggcttcacccctccccagagtaagagctggggctgacagtcccaccctgtcattcctaatagcccaaacgcagaagcactgagcaagagagccctttcttgccaagccagtgctcttttggtatatggcatacagctccattggaggggacacatcactggctttatctggtggaaatgtacctttcccttaagttcctccttagtgccatcacagcaggtgaatgggtgccctacggggccctccttcccccaccaggaacagatggaacctgccacccaggatcctgatctgccctgcactgagcactcagtggataaacactcctccagcccagacacactcctcctcttgggcaggagcaatccagagttgttatttttcttagaaggagcctcttttccctctattttttaaattgaaatataatagctgcatcagccctgaaaagccaaattcaaccacatggctggagaatcatttgtcatggccccgccttctcttctgatactaatggagcttcatgacccacggtcagcccccaaaccaaagttgtcccaacagaggaggccagtgaggcagagacagagctctcccactctcagaccctcttttgtcttcattttcctctcccacttagcacatgtgtgcttgagggtggctgggaatgtgatatacagcaccctgatcctaacaggtgtgattgttacgtaagacgctgatactgggccttgtattgcttttaaagtttcctctgctcagcatcatttcatgccaaagtgctgctatgggctgctttgtgtgcacaaaattgctttttccacctcggaaatgcagctttccctagggggaggcctacaacaggacgaccattctgagccagtgagtctattgcatggtgttttgagaaagggaattttagtgacaccttatgccatttcaagaggagaaatgcaggctggcagagcaatttccagaaatggaatttgcctgcaaatagtataaacaacactaaatttactgtgccaggaaatcttcctgaactccttgaactcatacacacaggtatttgagtcctgaataaagtgttggaaagcactgcagatgcggtcacctgactgaccacctgggttttctattaccagtgaatttcttttattcaccttcccttgaccaagaaattgggtttcttttccctcagcctgcacttactcttctattaagaccagaaaataaaataattttccgttgagtcacaaa

SEQ ID NO: 4220 - DNA, 7067 bp, Homo sapiens
  source 1..7067: mol_type = unassigned DNA
atggctcgcttcggggaggcggtggtcgccaggccagggtccggcgatggagactcggaccagagcaggaaccggcaaggaacccccgtgccggcctcggggcaggcggccgcctacaagcagacgaaagcacagagggcgcggactatggctttgtacaaccccattcccgtccggcagaactgtttcaccgtcaacagatccctgttcatcttcggagaagataacattgtcaggaaatatgccaagaagctcatcgattggccgccatttgagtacatgatcctggccaccatcattgccaactgcatcgtcctggccctggagcagcatcttcctgaggatgacaagacccccatgtcccgaagactggagaagacagaaccttatttcattgggatcttttgctttgaagctgggatcaaaattgtggccctggggttcatcttccataagggctcttacctccgcaatggctggaatgtcatggacttcatcgtggtcctcagtggcatcctggccactgcaggaacccacttcaatactcacgtggacctgaggaccctccgggctgtgcgtgtcctgcggcctttgaagctcgtgtcagggatacctagcctgcagattgtgttgaagtccatcatgaaggccatggtacctcttctgcagattggccttctgctcttctttgccatcctgatgtttgctatcattggtttggagttctacagtggcaagttacatcgagcatgcttcatgaacaattcaggtattctagaaggatttgacccccctcacccatgtggtgtgcagggctgcccagctggttatgaatgcaaggactggatcggccccaatgatgggatcacccagtttgataacatcctttttgctgtgctgactgtcttccagtgcatcaccatggaagggtggaccactgtgctgtacaataccaatgatgccttaggagccacctggaattggctgtacttcatccccctcatcatcattggatccttctttgttctcaacctagtcctgggagtgctttccggggaatttgccaaagagagagagagagtggagaaccgaagggctttcatgaagctgcggcgccagcagcagattgagcgtgagctgaatggctaccgtgcctggatagacaaagcagaggaagtcatgctcgctgaagaaaataaaaatgctggaacatccgccttagaagtgcttcgaagggcaaccatcaagaggagccggacagaggccatgactcgagactccagtgatgagcactgtgttgatatctcctctgtgggcacacctctggcccgagccagtatcaaaagtgcaaaggtagacggggtctcttatttccggcacaaggaaaggcttctgcgcatctccattcgccacatggttaaatcccaggtgttttactggattgtgctgagccttgtggcactcaacactgcctgtgtggccattgtccatcacaaccagccccagtggctcacccacctcctctactatgcagaatttctgtttctgggactcttcctcttggagatgtccctgaagatgtatggcatggggcctcgcctttattttcactcttcattcaactgctttgattttggggtcacagtgggcagtatctttgaagtggtctgggcaatcttcagacctggtacgtcttttggaatcagtgtcttgcgagccctccggcttctaagaatatttaaaataaccaagtattgggcttccctacggaatttggtggtctccttgatgagctcaatgaagtctatcatcagtttgcttttcctcctcttcctcttcatcgttgtctttgctctcctaggaatgcagttatttggaggcaggtttaactttaatgatgggactccttcggcaaattttgataccttccctgcagccatcatgactgtgttccagatcctgacgggtgaggactggaatgaggtgatgtacaatgggatccgctcccagggtggggtcagctcaggcatgtggtctgccatctacttcattgtgctcaccttgtttggcaactacacgctactgaatgtgttcttggctatcgctgtggataatctcgccaacgcccaggaactgaccaaggatgaacaggaggaagaagaggccttcaaccagaaacatgcactgcagaaggccaaggaggtcagcccgatgtctgcacccaacatgccttcgatcgaaagagacagaaggagaagacaccacatgtcgatgtgggagccacgcagcagccacctgagggagcggaggcgccggcaccacatgtccgtgtgggagcagcgtaccagccagctgaggaagcacatgcagatgtccagccaggaggccctcaacagagaggaggcgccgaccatgaacccgctcaaccccctcaacccgctcagctccctcaacccgctcaatgcccaccccagcctttatcggcgacccagggccattgagggcctggccctgggcctggccctggagaagttcgaggaggagcgcatcagccgtggggggtccctcaagggggatggaggggaccgatccagtgccctggacaaccagaggacccctttgtccctgggccagcgggagccaccatggctggccaggccctgtcatggaaactgtgacccgactcagcaggaggcagggggaggagaggctgtggtgacctttgaggaccgggccaggcacaggcagagccaacggcgcagccggcatcgccgcgtcaggacagaaggcaaggagtcctcttcagcctcccggagcaggtctgccagccaggaacgcagtctggatgaagccatgcccactgaaggggagaaggaccatgagctcaggggcaaccatggtgccaaggagccaacgatccaagaagagagagcccaggatttaaggaggaccaacagtctgatggtgtccagaggctccgggctggcaggaggccttgatgaggctgacacccccctagtcctgccccatcctgagctggaagtggggaagcacgtggtgctgacggagcaggagccagaaggcagcagtgagcaggccctgctggggaatgtgcagctagacatgggccgggtcatcagccagagcgagcctgacctctcctgcatcacggccaacacggacaaggccaccaccgagagcaccagcgtcaccgtcgccatccccgacgtggaccccttggtggactcaaccgtggtgcacattagcaacaagacggatggggaagccagtcccttgaaggaggcagagatcagagaggatgaggaggaggtggagaagaagaagcagaagaaggagaagcgtgagacaggcaaagccatggtgccccacagctcaatgttcatcttcagcaccaccaacccgatccggagggcctgccactacatcgtgaacctgcgctactttgagatgtgcatcctcctggtgattgcagccagcagcatcgccctggcggcagaggaccccgtcctgaccaactcggagcgcaacaaagtcctgaggtattttgactatgtgttcacgggcgtgttcacctttgagatggttataaagatgatagaccaaggcttgatcctgcaggatgggtcctacttccgagacttgtggaacatcctggactttgtggtggtcgttggcgcattggtggcctttgctctggcgaacgctttgggaaccaacaaaggacgggacatcaagaccatcaagtctctgcgggtgctccgagttctaaggccactgaaaaccatcaagcgcttgcccaagctcaaggccgtcttcgactgcgtagtgacctccttgaagaatgtcttcaacatactcattgtgtacaagctcttcatgttcatctttgctgtcatcgcagttcagctcttcaagggaaagttcttttattgcacggacagttccaaggacacagagaaggagtgcataggcaactatgtagatcatgagaaaaacaagatggaggtgaagggccgggaatggaagcgccatgaattccactacgacaacattatctgggccctgctgaccctcttcaccgtctccacaggggaaggatggcctcaagttctgcagcactctgtagatgtgacagaggaagaccgaggcccaagccgcagcaaccgcatggagatgtctatcttttatgtagtctactttgtggtcttccccttcttctttgtcaatatctttgtggctctcatcatcatcaccttccaggagcaaggggataagatgatggaggagtgcagcctggagaagaatgagagggcgtgcatcgacttcgccatcagcgccaaacctctcacccgctacatgccgcagaacagacacaccttccagtaccgcgtgtggcactttgtggtgtctccgtcctttgagtacaccattatggccatgatcgccttgaatactgttgtgctgatgatgaagtattattctgctccctgtacctatgagctggccctgaagtacctgaatatcgccttcaccatggtgttttccctggaatgtgtcctgaaggtcatcgcttttggctttttgaactatttccgagacacctggaatatctttgacttcatcaccgtgattggcagtatcacagaaattatcctgacagacagcaagctggtgaacaccagtggcttcaatatgagctttctgaagctcttccgagctgcccgcctcataaagctcctgcgtcagggctataccatacgcattttgctgtggacctttgtgcagtcctttaaggccctcccttatgtctgccttttaattgccatgcttttcttcatttatgccatcattgggatgcaggtatttggaaacataaaattagacgaggagagtcacatcaaccggcacaacaacttccggagtttctttgggtccctaatgctactcttcaggagtgccacaggtgaggcctggcaggagattatgctgtcatgccttggggagaagggctgtgagcctgacaccaccgcaccatcagggcagaacgagaacgaacgctgcggcaccgatctggcctacgtgtactttgtctccttcatcttcttctgctccttcttgatgctcaacctgtttgtggccgtcatcatggacaactttgagtacctgactcgggactcctccatcctggggcctcaccacttggacgagtttgtccgcgtctgggcagaatatgaccgagcagcatgtggccgcatccattacactgagatgtatgaaatgctgactctcatgtcacctccgctaggcctcggcaagagatgtccctccaaagtggcatataagaggttggtcctgatgaacatgccagtagctgaggacatgacggtccacttcacctccacacttatggctctgatccggacagctctggacattaaaattgccaaaggtggtgcagacaggcagcagctagactcagagctacaaaaggagaccctagccatctggcctcacctatcccagaagatgctggatctgcttgtgcccatgcccaaagcctctgacctgactgtgggcaaaatctatgcagcaatgatgatcatggactactataagcagagtaaggtgaagaagcagaggcagcagctggaggaacagaaaaatgcccccatgttccagcgcatggagccttcatctctgcctcaggagatcattgctaatgccaaagccctgccttacctccagcaggaccccgtttcaggcctgagtggccggagtggatacccttcgatgagtccactctctccccaggatatattccagttggcttgtatggaccccgccgatgacggacagttccaagaacggcagtctctggagccagaggttagtgaattaaaaagcgtgcagccctctaaccatggcatctaccttccttcggacacccaggagcatgcgggatctgggagggcatcttctatgccacgtctgactgtggatccccaggtggtgacagaccctagctccatgagacgttcattttccactattcgggataagcgttcaaattcctcgtggttggaggaattctccatggagcgaagcagtgaaaatacctacaagtcccgtcgccggagttaccactcctccttgcggctgtcagcccaccgcctgaactctgattcaggccacaagtctgacactcaccgctcagggggcagggagcggggacgatcaaaagagcgaaagcatcttctctctcctgatgtctcccgctgcaattcagaagagcgagggacccaggctgactgggagtccccagagcgccgtcaatccaggtcacccagtgagggcaggtcacagacgcccaacagacagggcacaggttccctaagtgagagctccatcccctctgtctctgacaccagcaccccaagaagaagtcgtcggcagctcccacccgtcccgccaaagccccggcccctcctttcctacagctccctgattcgacacgcgggcagcatctctccacctgctgatggaagcgaggagggctccccgctgacctcccaagctctggagagcaacaatgcttgcctgaccgagtcttccaactctccgcacccccagcagagccaacatgcctccccacagcgctacatctccgagccctacttggccctgcacgaagactcccacgcctcagactgtggtgaggaggagacgctcactttcgaagcagccgtggctactagcctgggccgttccaacaccatcggctcagccccacccctgcggcatagctggcagatgcccaacgggcactatcggcggcggaggcgcggggggcctgggccaggcatgatgtgtggggctgtcaacaacctgctaagtgacacggaagaagatgacaaatgctagaggctgctcccccctccgatgcatgctcttctctcacatggagaaaaccaagacagaattgggaagccagtgcggcccgggggggaggaagagggaaaaggaagatggaaggacaccatgcatta

SEQ ID NO: 4221 - DNA, 1795 bp, Homo sapiens
  source 1..1795: mol_type = unassigned DNA
actccttgtctctgccctctccctcccacagagcaatgttctgtgatggtgcccgagatgcgtggactgagcccagaccgcaggctgcccgagcccgccccctgcccggctgcggggagccctgagcccaggtccgcgggccgccgccaacgccacgtcctggccctgccggaagaagaggcatggcggccccagcagtgcgctctgctcgaggccgacgcctcggacgaggtgggcatgctgccggcttccccgcgcgccgcctctggcttcgacaacttcttccaggtgcaggagggcgagggccagggctgggagggcgccatggcactggaggcgggctccagccctttcctgccggtgagccccgaggtcatgaagcggcggcgcgggggcctcatcgagcagcgcgacatcatcaaggcccacgaggcgcacaagatgcagagcaccccgcaggcccggcgcaaggaatgggagatggctcgcttcggggaggcggtggtcgccaggccagggtccggcgatggagactcggaccagagcaggaaccggcaaggaacccccgtgccggcctcggggcaggcggccgcctacaagcagacgaaagcacagagggcgcggactatggctttgtacaaccccattcccgtccggcagaactgtttcaccgtcaacagatccctgttcatcttcggagaagataacattgtcaggaaatatgccaagaagctcatcgattggccgccatttgagtacatgatcctggccaccatcattgccaactgcatcgtcctggccctggagcagcatcttcctgaggatgacaagacccccatgtcccgaagactggagaagacagaaccttatttcattgggatcttttgctttgaagctgggatcaaaattgtggccctggggttcatcttccataagggctcttacctccgcaatggctggaatgtcatggacttcatcgtggtcctcagtggcatcctggccactgcaggaacccacttcaatactcacgtggacctgaggaccctccgggctgtgcgtgtcctgcggcctttgaagctcgtgtcagggatacctagcctgcagattgtgttgaagtccatcatgaaggccatggtacctcttctgcagattggccttctgctcttctttgccatcctgatgtttgctatcattggtttggagttctacagtggcaagttacatcgagcatgcttcatgaacaattcaggtattctagaaggatttgacccccctcacccatgtggtgtgcagggctgcccagctggttatgaatgcaaggactggatcggccccaatgatgggatcacccagtttgataacatcctttttgctgtgctgactgtcttccagtgcatcaccatggaagggtggaccactgtgctgtacaataccaatgatgccttaggagccacctggaattggctgtacttcatccccctcatcatcattggatccttctttgttctcaacctagtcctgggagtgctttccggggaatttgccaaagagagagagagagtggagaaccgaagggctttcatgaagctgcggcgccagcagcagattgagcgtgagctgaatggctaccgtgcctggatagacaaagcagaggaagtcatgctcgctgaagaaaataaaaatgctggaacatccgccttagaagtgcttcgaagggcaaccatcaagaggagccggacagaggccatgactcgagactccagtgatgagcactgtgttgatatctcctctgtgg

SEQ ID NO: 4222 - DNA, 16170 bp, Homo sapiens
  source 1..16170: mol_type = unassigned DNA
gctgctgctgcctctccgaagagctcgcggagctccccagaggcggtggtccccgtgcttgtctggatgcggctctgagtctccgtgtgtctttctgcttgttgctgtgtgcgggtgttcggccgcgatcacctttgtgtgtcttctgtctgtttaaacctcaggatggctcgcttcggggaggcggtggtcgccaggccagggtccggcgatggagactcggaccagagcaggaaccggcaaggaacccccgtgccggcctcggggcaggcggccgcctacaagcagacgaaagcacagagggcgcggactatggctttgtacaaccccattcccgtccggcagaactgtttcaccgtcaacagatccctgttcatcttcggagaagataacattgtcaggaaatatgccaagaagctcatcgattggccgccatttgagtacatgatcctggccaccatcattgccaactgcatcgtcctggccctggagcagcatcttcctgaggatgacaagacccccatgtcccgaagactggagaagacagaaccttatttcattgggatcttttgctttgaagctgggatcaaaattgtggccctggggttcatcttccataagggctcttacctccgcaatggctggaatgtcatggacttcatcgtggtcctcagtggcatcctggccactgcaggaacccacttcaatactcacgtggacctgaggaccctccgggctgtgcgtgtcctgcggcctttgaagctcgtgtcagggatacctagcctgcagattgtgttgaagtccatcatgaaggccatggtacctcttctgcagattggccttctgctcttctttgccatcctgatgtttgctatcattggtttggagttctacagtggcaagttacatcgagcatgcttcatgaacaattcaggtattctagaaggatttgacccccctcacccatgtggtgtgcagggctgcccagctggttatgaatgcaaggactggatcggccccaatgatgggatcacccagtttgataacatcctttttgctgtgctgactgtcttccagtgcatcaccatggaagggtggaccactgtgctgtacaataccaatgatgccttaggagccacctggaattggctgtacttcatccccctcatcatcattggatccttctttgttctcaacctagtcctgggagtgctttccggggaatttgccaaagagagagagagagtggagaaccgaagggctttcatgaagctgcggcgccagcagcagattgagcgtgagctgaatggctaccgtgcctggatagacaaagcagaggaagtcatgctcgctgaagaaaataaaaatgctggaacatccgccttagaagtgcttcgaagggcaaccatcaagaggagccggacagaggccatgactcgagactccagtgatgagcactgtgttgatatctcctctgtgggcacacctctggcccgagccagtatcaaaagtgcaaaggtagacggggtctcttatttccggcacaaggaaaggcttctgcgcatctccattcgccacatggttaaatcccaggtgttttactggattgtgctgagccttgtggcactcaacactgcctgtgtggccattgtccatcacaaccagccccagtggctcacccacctcctctactatgcagaatttctgtttctgggactcttcctcttggagatgtccctgaagatgtatggcatggggcctcgcctttattttcactcttcattcaactgctttgattttggggtcacagtgggcagtatctttgaagtggtctgggcaatcttcagacctggtacgtcttttggaatcagtgtcttgcgagccctccggcttctaagaatatttaaaataaccaagtattgggcttccctacggaatttggtggtctccttgatgagctcaatgaagtctatcatcagtttgcttttcctcctcttcctcttcatcgttgtctttgctctcctaggaatgcagttatttggaggcaggtttaactttaatgatgggactccttcggcaaattttgataccttccctgcagccatcatgactgtgttccagatcctgacgggtgaggactggaatgaggtgatgtacaatgggatccgctcccagggtggggtcagctcaggcatgtggtctgccatctacttcattgtgctcaccttgtttggcaactacacgctactgaatgtgttcttggctatcgctgtggataatctcgccaacgcccaggaactgaccaaggatgaacaggaggaagaagaggccttcaaccagaaacatgcactgcagaaggccaaggaggtcagcccgatgtctgcacccaacatgccttcgatcgagagggagcggaggcgccggcaccacatgtccgtgtgggagcagcgtaccagccagctgaggaagcacatgcagatgtccagccaggaggccctcaacagagaggaggcgccgaccatgaacccgctcaaccccctcaacccgctcagctccctcaacccgctcaatgcccaccccagcctttatcggcgacccagggccattgagggcctggccctgggcctggccctggagaagttcgaggaggagcgcatcagccgtggggggtccctcaagggggatggaggggaccgatccagtgccctggacaaccagaggacccctttgtccctgggccagcgggagccaccatggctggccaggccctgtcatggaaactgtgacccgactcagcaggaggcagggggaggagaggctgtggtgacctttgaggaccgggccaggcacaggcagagccaacggcgcagccggcatcgccgcgtcaggacagaaggcaaggagtcctcttcagcctcccggagcaggtctgccagccaggaacgcagtctggatgaagccatgcccactgaaggggagaaggaccatgagctcaggggcaaccatggtgccaaggagccaacgatccaagaagagagagcccaggatttaaggaggaccaacagtctgatggtgtccagaggctccgggctggcaggaggccttgatgaggctgacacccccctagtcctgccccatcctgagctggaagtggggaagcacgtggtgctgacggagcaggagccagaaggcagcagtgagcaggccctgctggggaatgtgcagctagacatgggccgggtcatcagccagagcgagcctgacctctcctgcatcacggccaacacggacaaggccaccaccgagagcaccagcgtcaccgtcgccatccccgacgtggaccccttggtggactcaaccgtggtgcacattagcaacaagacggatggggaagccagtcccttgaaggaggcagagatcagagaggatgaggaggaggtggagaagaagaagcagaagaaggagaagcgtgagacaggcaaagccatggtgccccacagctcaatgttcatcttcagcaccaccaacccgatccggagggcctgccactacatcgtgaacctgcgctactttgagatgtgcatcctcctggtgattgcagccagcagcatcgccctggcggcagaggaccccgtcctgaccaactcggagcgcaacaaagtcctgaggtattttgactatgtgttcacgggcgtgttcacctttgagatggttataaagatgatagaccaaggcttgatcctgcaggatgggtcctacttccgagacttgtggaacatcctggactttgtggtggtcgttggcgcattggtggcctttgctctggcgaacgctttgggaaccaacaaaggacgggacatcaagaccatcaagtctctgcgggtgctccgagttctaaggccactgaaaaccatcaagcgcttgcccaagctcaaggccgtcttcgactgcgtagtgacctccttgaagaatgtcttcaacatactcattgtgtacaagctcttcatgttcatctttgctgtcatcgcagttcagctcttcaagggaaagttcttttattgcacggacagttccaaggacacagagaaggagtgcataggcaactatgtagatcatgagaaaaacaagatggaggtgaagggccgggaatggaagcgccatgaattccactacgacaacattatctgggccctgctgaccctcttcaccgtctccacaggggaaggatggcctcaagttctgcagcactctgtagatgtgacagaggaagaccgaggcccaagccgcagcaaccgcatggagatgtctatcttttatgtagtctactttgtggtcttccccttcttctttgtcaatatctttgtggctctcatcatcatcaccttccaggagcaaggggataagatgatggaggagtgcagcctggagaagaatgagagggcgtgcatcgacttcgccatcagcgccaaacctctcacccgctacatgccgcagaacagacacaccttccagtaccgcgtgtggcactttgtggtgtctccgtcctttgagtacaccattatggccatgatcgccttgaatactgttgtgctgatgatgaagtattattctgctccctgtacctatgagctggccctgaagtacctgaatatcgccttcaccatggtgttttccctggaatgtgtcctgaaggtcatcgcttttggctttttgaactatttccgagacacctggaatatctttgacttcatcaccgtgattggcagtatcacagaaattatcctgacagacagcaagctggtgaacaccagtggcttcaatatgagctttctgaagctcttccgagctgcccgcctcataaagctcctgcgtcagggctataccatacgcattttgctgtggacctttgtgcagtcctttaaggccctcccttatgtctgccttttaattgccatgcttttcttcatttatgccatcattgggatgcaggtatttggaaacataaaattagacgaggagagtcacatcaaccggcacaacaacttccggagtttctttgggtccctaatgctactcttcaggagtgccacaggtgaggcctggcaggagattatgctgtcatgccttggggagaagggctgtgagcctgacaccaccgcaccatcagggcagaacgagaacgaacgctgcggcaccgatctggcctacgtgtactttgtctccttcatcttcttctgctccttcttgatgctcaacctgtttgtggccgtcatcatggacaactttgagtacctgactcgggactcctccatcctggggcctcaccacttggacgagtttgtccgcgtctgggcagaatatgaccgagcagcatgtggccgcatccattacactgagatgtatgaaatgctgactctcatgtcacctccgctaggcctcggcaagagatgtccctccaaagtggcatataagaggttggtcctgatgaacatgccagtagctgaggacatgacggtccacttcacctccacacttatggctctgatccggacagctctggacattaaaattgccaaaggtggtgcagacaggcagcagctagactcagagctacaaaaggagaccctagccatctggcctcacctatcccagaagatgctggatctgcttgtgcccatgcccaaagcctctgacctgactgtgggcaaaatctatgcagcaatgatgatcatggactactataagcagagtaaggtgaagaagcagaggcagcagctggaggaacagaaaaatgcccccatgttccagcgcatggagccttcatctctgcctcaggagatcattgctaatgccaaagccctgccttacctccagcaggaccccgtttcaggcctgagtggccggagtggatacccttcgatgagtccactctctccccaggatatattccagttggcttgtatggaccccgccgatgacggacagttccaagaacggcagtctctggtggtgacagaccctagctccatgagacgttcattttccactattcgggataagcgttcaaattcctcgtggttggaggaattctccatggagcgaagcagtgaaaatacctacaagtcccgtcgccggagttaccactcctccttgcggctgtcagcccaccgcctgaactctgattcaggccacaagtctgacactcaccgctcagggggcagggagcggggacgatcaaaagagcgaaagcatcttctctctcctgatgtctcccgctgcaattcagaagagcgagggacccaggctgactgggagtccccagagcgccgtcaatccaggtcacccagtgagggcaggtcacagacgcccaacagacagggcacaggttccctaagtgagagctccatcccctctgtctctgacaccagcaccccaagaagaagtcgtcggcagctcccacccgtcccgccaaagccccggcccctcctttcctacagctccctgattcgacacgcgggcagcatctctccacctgctgatggaagcgaggagggctccccgctgacctcccaagctctggagagcaacaatgcttgcctgaccgagtcttccaactctccgcacccccagcagagccaacatgcctccccacagcgctacatctccgagccctacttggccctgcacgaagactcccacgcctcagactgtggtgaggaggagacgctcactttcgaagcagccgtggctactagcctgggccgttccaacaccatcggctcagccccacccctgcggcatagctggcagatgcccaacgggcactatcggcggcggaggcgcggggggcctgggccaggcatgatgtgtggggctgtcaacaacctgctaagtgacacggaagaagatgacaaatgctagaggctgctcccccctccgatgcatgctcttctctcacatggagaaaaccaagacagaattgggaagccagtgcggcccgggggggaggaagagggaaaaggaagatggaaggacaccatgcattatcagagaagaggaagtaaaggacaatcagaacaccagtcaaacccaccaaattgctttattcccctttgcaagatgggcactgccatagttctgcctctttgctggggaaagaaaccaggaacgtggagggttattactgcgggagaagggacacgaggatggctttgcttccccttgccccttcccacttttctaaaagctgtggagggatctagctggcctatgtctacactcagtgccctgagaagcctggaagactttctggctcttaactggggagtagtggagaccataggagaggactctcctccctcaccagctcttacgcctcagccagcaccactgccaccagggcaactgcagcagcatctcatgcataaccctgtggcttgcttcccccagggcagcacaggctaagtcaggaacatcggatgccagggagggaggagaaagccgaagcgaaaggggtcagggtgctgaggcaacagcagcaagggctggtctggacaagaaaagccatagcccggcagcccctaccatgagggagacagagaaacagaactggtggtgctggggggtatagccccccatccttgaggcctgtcacccacacagtaggtgctgagagttaggacaggtcaggaagtcccccagggtccacaaaggtgcctgaggctctggtaagggtgaagataaaagtatttaacaaccgctatggcatcaatgtaagtggagtttggtcctagtgccggagcccatgctattccaggcattggctctttagatgccagtcatgggggaaccctgagggtgtgggtagagtagcaggggccacctaagagattaaaaacagtctgttttccaaccagtgtggaagcaattaaatatgcgtaacagtgctacggccacaccagcacctcctggctgaaggtcagcccacactctggtccatgaggcagcaaggccagtgctgtgccaagcccggtaaggccaagtgccgaggcccagccttccctgccactcctctgagagggcagaacacacatatccaagtaggctacccaccactgggtagggatttctgtaaagatgggaaaggctgatagattgaaataagcttctgtgaaagtctggatttactgaggacctcccctgaggagggaccgttgggaccgcagattctgcagctggtgtggggttcaggtcagtttgtcaggatgctttaaggtgattagtaaatatacctcagcttagacttgggctgctccttctagcaaagcaggctccagtggggcctcatcatacaggatgacaagactggggccctgttcaccttgaacatgcccctgggccaagatggggcttcacccctccccagagtaagagctggggctgacagtcccaccctgtcattcctaatagcccaaacgcagaagcactgagcaagagagccctttcttgccaagccagtgctcttttggtatatggcatacagctccattggaggggacacatcactggctttatctggtggaaatgtacctttcccttaagttcctccttagtgccatcacagcaggtgaatgggtgccctacggggccctccttcccccaccaggaacagatggaacctgccacccaggatcctgatctgccctgcactgagcactcagtggataaacactcctccagcccagacacactcctcctcttgggcaggagcaatccagagttgttatttttcttagaaggagcctcttttccctctattttttaaattgaaatataatagctgcatcagccctgaaaagccaaattcaaccacatggctggagaatcatttgtcatggccccgccttctcttctgatactaatggagcttcatgacccacggtcagcccccaaaccaaagttgtcccaacagaggaggccagtgaggcagagacagagctctcccactctcagaccctcttttgtcttcattttcctctcccacttagcacatgtgtgcttgagggtggctgggaatgtgatatacagcaccctgatcctaacaggtgtgattgttacgtaagacgctgatactgggccttgtattgcttttaaagtttcctctgctcagcatcatttcatgccaaagtgctgctatgggctgctttgtgtgcacaaaattgctttttccacctcggaaatgcagctttccctagggggaggcctacaacaggacgaccattctgagccagtgagtctattgcatggtgttttgagaaagggaattttagtgacaccttatgccatttcaagaggagaaatgcaggctggcagagcaatttccagaaatggaatttgcctgcaaatagtataaacaacactaaatttactgtgccaggaaatcttcctgaactccttgaactcatacacacaggtatttgagtcctgaataaagtgttggaaagcactgcagatgcggtcacctgactgaccacctgggttttctattaccagtgaatttcttttattcaccttcccttgaccaagaaattgggtttcttttccctcagcctgcacttactcttctattaagaccagaaaataaaataattttccgttgagtcacaaactcatcatcttgtttggtgttctgctgcctctgaacaaaagtgaatgccagccttcccttgctgggtgtcagagtctgcctcccttgaaaagaggcccctgtagaccccaacacctattcttttctctggttaattacagcagcatctgagaaattccatgcaaaagaagactacaaccagtgtttcagatataccacaagatcaaatttgggcactggtggtccacctcagaagactcttgagtcatatattcagtttctcttgctaatatatgactcgtcttcaccatctcctcaaaacaagagcaaagccaagatagaggaaggtaaaaggaggaggaaaggaaaccaaggcagggagatgttctaagtaggtttgcatttagttacccctcatttcacttaaggctccagacagactccaggtagggaatgcatgctgtctctttctctgtgtctgtctccccatctcctagaggacagagtgccagcgacctctggacaggggcagggctccagccaaggtgcccctgagccagggtcaacatagaatttcctgccccgtgaagggctggcaccagctagcatccccttggctccacatgagtcatgaacacaattgtcagtgggggtctctgctgctcttctggctgaagaatctgtttttcttctgggcttcacttgtagttcctattcaatgtctccatagggcactgagatcaccaagaacattacccagaagctgaagtccaaatgttctagattttgacctctcttgactctggggccacaaagagaaggccccataatccacctctcagccagtatctcccttctttgcacagattcctcccaaccccatagagcctatgtggtgagcatgagggtcgtcttccctctgttctcccatcccagcctctgttttgctgcatgttagcgctgatccagctcctgagatggttaattccacccaatccaagcttatttgcttgcctgactgactccaccactctctcagctatgggggaatattgcattctaatgaaatagggtttggaactcacctggtgctcctcgcaagacaactgacacaaggtgtagggtgtgggggtggacaaaatgcccacctactggataaaagctcactgcaggaaaatgaggtctcctggcataatgcaacaaaaatctcatataattttgatttttaaaaagttgttctcaatttttcattacatcctacttctcagccctctggatgtttcatttttttggacaaagtgtttctttagtggttggggccagggacaggttgagggatatttctcggctcatttataagatataaatattatgaggttgtatgtaaagaaagggcaaacgtacagcagaaggggagcaaatagctacctttcaaggattttgagatttgaaggttaaggaatttttactgctatttttgttcatcagtttcatgtctgttatgttttgagatcctcagaggcctagggttagcgtataccaagaatcctggtgagaggcgttgccatgccttggggtgaattcttccccactagctctctcacccagcctacaagtccttctctcatagatcccagagcaatgggcaccgtccaggaggtacaggagaggactttatgatgcaggaaagaaggaagaagtgggtcccttgcaagtggccagacagggaatgatggtttgactccagaaatcaggaatcaggttcaggtttggataacttctctttaaaatatctccacattgagactcttattttaacaaaatccaaacaaaattaactcagggcttgtgacctaacctttgtaagaaggtgatcaaagagatcctacattaataagcactgcctgtagcaccagctttgtctttttgtcttttgttgtttctttcctgaaccaccctgtacatcatagccaggtctaccccaaatagagcagcagctgatggcttctctgctgtctgtggagggagggctcggctgcagacctatggtgttttgtcagctgttaggtgctacagcccacccagtcagagtacatagacatagcgctttaagggacaaaggacaaacagaactatctttgctttccggaggccatctttttctttccttgaatcctttctgctttaaacttctgaggtttatgcatcccagagaggtcacaccaagccaaagagaaaaaattcatagattgtcccagcctacccaaagggcctgaaaagcctctctaaacaaaactcaagatagctgagaagtatgaatggggttcacagcaaagtccaattgatggcttttgaggctgggacacccccaaactgcccttctgtttttgtagttttgctttcttccacccaccctctctccgcatgctgtaagttaggggagttagtatcttgaacttctaaatgcaaaaggagattttataataagccatgctacctgtaaatacattattgaggtttgcatttttatttttggaggtatgaaagagttgagtagaccaagtcaaaagaggtgtggggatttatgtttatttttatttgtttggggttgtttggttggtggctgggtttcttgtaacagacctattctggaatagcaaagaaggataccttggtgatctgcaatgtttctgaatctgtttctctttaggaagtgattgccatcaaatttagtgatatgatatttgagtcaaaaatctgaggttatagtaccagctgtcttttctctctggtctcctttttgtcgtctttctctttctgtctaaattggcctctgtcttttcctaaggacttaaaatataacccaaattaatgaagaactgccccaaaacttcagtgaaagccaaggaggtacagaattttttcaggacatctttaaccaatacaaaatttatgtcttaagaagataatttttacaatagtgtagtaatctgataaatgaaaactattggaagtcaatagttttttatattccagctttctgtattcaaacttgtgccttcagcaagcatctcttcactttctttcccttgtcaattgaaacatgaatgtttggctaactcatgatgtaaagtgtctgttaagttaataatacataatttaaagcacttagtctccacaaagcaatttagaaaaatcttcacttgttagatcccatgaagtacctatgaaattctcagcattgctataagcatttgattttttttaaggaaacttcctgtttaatggaatctgaatccaagatttgctttaatttcactctattcttcccattttcccttattcttcttgttgtctctctaattaaaaaaaaaaaaaacctaggcttttttttttctatccagaaagttgggttttcatgatctgagcttccttatgtctccttctctttgtgcaaacttaaaccagtcatagattgtcacccagacatattctccaacccagcattggaaatctgaacgaatcttttctctttttgtcctacaagtttgtcagagatgagaatggattgctgtctacattctacaaccagaccctagactttataccaggctgtgccacttcctcttcacttcactcagaggatggccccaaaactgaaaaggaaatgaaataatcaaatataccaaatccgaatttgactttatttgatgactcaatattttccttccagtactctaatttttttttatggcaatggcctatatggcacaagaaccaccacttaaagcaaatctgttgaacatttttataagggatgagcaagaaaaacacactccaaaattttaaagtgccattaatcaatttttaagaataaaggtaatatgaaatgagggctaaacaatgtaatataactgccagttaaggtagacagtagttgtggtcttagttacatttgatatggagttgtgtaatattaagcagatcccagtggagttagtaaaaacataggtattgagttttaatggctaccaattgggatatatacttagcctgcaggctgaactttagtcagtgtttttctatcatgttgttttgtgaacaagtcaaaatttatacaaagctaccctaagtgctgcaattgcagaggaacttgcctcttcgtgatattagagggcagtccaactccgctcaaactgagtccaagatttgaattcatccagaaaaacaaatggaggagaaaagcctaatgcaccacatgtgtttggcatttcatggctgggacaatggagtagagggtaggaagacaagctgtagaacaaaagcaaagtgaggtagaaagtaacaggtcccagacgaggacagacttagagatgtgtaaccttggatcctctttttcacttagaatatgggtaaacttcttagcacaagactggattaagagaagttctttctgttaaactcacctagggtagtggctttgaaggcctcagaggattaatagattcccaaaattttcttccagacctgggagatggagagaaagaggttcttgctttaaagcggctcgaagacaatctttatgacttcagcaactcttcaacatagtagcaccaataaaggagagattatgttaacttcctagtggtgagaataccatgggatgggagaagggccagtgagtgggatgggaatgagcttcatcaggaacagatttcagactctgcagggtgcaccggttctagcctcaaataacaacattgcaaggaggtggactacagggtccacaccctctgtccttcggggcccatggtcaggccattccctctttgttttgctcctagaggatgagcatgtaagatgagatcaggagggaaattgggtgctctgcctcaggctgttaaaatgctgctacctgcattctaaaacgtgcaagtcatgccccacaagacacctccttagggcagcatccactgtggtgtgccagcctgacacccctgcagtcacggtgtttgaatggcagctgatgctggcccacccagagtatcggtgcatctctcctaaagccacagttcagcactgcatgttgaccaggcggatatcctataatatagatgctcgtttggatccaaaaggaaaaccattaaaaataaaagaaagatgaaaaactttaatgttttgggggggataaaagaaaagaataaataaaaccttgttgtaaagaatgcatcggcctgatttccctcacttgatgtgtttctttgctgctaccagaaagggaaatcatgggagtgaagcctgccaggaccctcagggtaagctggcagcaggctctgcagctgcacttagttggggtctgctcagaccagtcaggaggaattcagaggctttcaaagtcccaaggacatcctggctctgaaaggttttcttttgttaaaaaatgcactttgtgctgtgtgtggtagctcgtatgtgttaccccagctattcaggaagctagggcagaaggattgcttgaggctaggaattcaagactggcctggatgacagagtgaaaccctcatctcttaaaaaaaaaaaaaaggaataaaaatgttctctgccttggataacatttttttttaaagattccatacaaactcattccctgaaagagaaaaacagattttctaatcaggacattgtcctgatctgcaagcgaggagtttaacaaggtaggcagagaacttccttatggaacaacagggctctgtgaccagaaaaactatgaccagcctcctctgaaaaaaggtggggggattatagggcaccagctcagccgccaagttcaggaagcagctgattcccaagactcttaggagatactgtccattcttcctcctgtccacatcactccccatttaactgcaattgctcccttgccacagggaaagcagcaagccccaggcccaggcctccatttgatttgccactccgagaactgtctgcttcattctgcttgaggagatatcttcacctaatcctagtgttaattattttaatctgagcaacgcttttatcaattagatagaaaccagcattccaaaataagtcccctaagtttgtagtttgagccaagatattttcttgagccctaagatatatgactttattagctaggatttttcttatgattaaaaacatccaaaaatgtgatatgtggtcatctctcagggaggtctaggtccttgcaggctggattttagaaatttctaagattctctacaacttttaaattttatgttatttttcaatcataatttctttcctgtggcttctatcaccattggagttagaatctgacaacctttaacttcacacttttatgagataataagttggtttcttgggcaaaggttggtttgtaagccatttacatggattgatgatttctgttcttgttttcttctaacctagaactcaggtccacagttttccacaggctaatggcactatgaaacagatataaagaaaaatagacactg

SEQ ID NO: 4223 - DNA, 8087 bp, Homo sapiens
  source 1..8087: mol_type = unassigned DNA
cgaggccgccgccgtcgcctccgccgggcgagccggagccggagtcgagccgcggccgggagccgggcgggctggggacgcgggccgggggcggaggcgctgggggccggggccggggccgggggcggaggcgctgggggccggggccggggccgggcgccgagcggggtccgcggtgaccgcgccgcccgggcgatgcccgcggggacgccgccggccagcagagcgaggtgctgccggccgccaccatgaccgagggcgcacgggccgccgacgaggtccgggtgcccctgggcgcgccgccccctggccctgcggcgttggtgggggcgtccccggagagccccggggcgccgggacgcgaggcggagcgggggtccgagctcggcgtgtcaccctccgagagcccggcggccgagcgcggcgcggagctgggtgccgacgaggagcagcgcgtcccgtacccggccttggcggccacggtcttcttctgcctcggtcagaccacgcggccgcgcagctggtgcctccggctggtctgcaacccatggttcgagcacgtgagcatgctggtaatcatgctcaactgcgtgaccctgggcatgttccggccctgtgaggacgttgagtgcggctccgagcgctgcaacatcctggaggcctttgacgccttcattttcgccttttttgcggtggagatggtcatcaagatggtggccttggggctgttcgggcagaagtgttacctgggtgacacgtggaacaggctggatttcttcatcgtcgtggcgggcatgatggagtactcgttggacggacacaacgtgagcctctcggctatcaggaccgtgcgggtgctgcggcccctccgcgccatcaaccgcgtgcctagcatgcggatcctggtcactctgctgctggatacgctgcccatgctcgggaacgtccttctgctgtgcttcttcgtcttcttcattttcggcatcgttggcgtccagctctgggctggcctcctgcggaaccgctgcttcctggacagtgcctttgtcaggaacaacaacctgaccttcctgcggccgtactaccagacggaggagggcgaggagaacccgttcatctgctcctcacgccgagacaacggcatgcagaagtgctcgcacatccccggccgccgcgagctgcgcatgccctgcaccctgggctgggaggcctacacgcagccgcaggccgagggggtgggcgctgcacgcaacgcctgcatcaactggaaccagtactacaacgtgtgccgctcgggtgactccaacccccacaacggtgccatcaacttcgacaacatcggctacgcctggattgccatcttccaggtgatcacgctggaaggctgggtggacatcatgtactacgtcatggacgcccactcattctacaacttcatctatttcatcctgctcatcatcgtgggctccttcttcatgatcaacctgtgcctggtggtgattgccacgcagttctcggagacgaagcagcgggagagtcagctgatgcgggagcagcgggcacgccacctgtccaacgacagcacgctggccagcttctccgagcctggcagctgctacgaagagctgctgaagtacgtgggccacatattccgcaaggtcaagcggcgcagcttgcgcctctacgcccgctggcagagccgctggcgcaagaaggtggaccccagtgctgtgcaaggccagggtcccgggcaccgccagcgccgggcaggcaggcacacagcctcggtgcaccacctggtctaccaccaccatcaccaccaccaccaccactaccatttcagccatggcagcccccgcaggcccggccccgagccaggcgcctgcgacaccaggctggtccgagctggcgcgcccccctcgccaccttccccaggccgcggaccccccgacgcagagtctgtgcacagcatctaccatgccgactgccacatagaggggccgcaggagagggcccgggtggcacatgccgcagccactgccgctgccagcctcagactggccacagggctgggcaccatgaactaccccacgatcctgccctcaggggtgggcagcggcaaaggcagcaccagccccggacccaaggggaagtgggccggtggaccgccaggcaccggggggcacggcccgttgagcttgaacagccctgatccctacgagaagatcccgcatgtggtcggggagcatggactgggccaggcccctggccatctgtcgggcctcagtgtgccctgccccctgcccagccccccagcgggcacactgacctgtgagctgaagagctgcccgtactgcacccgtgccctggaggacccggagggtgagctcagcggctcggaaagtggagactcagatggccgtggcgtctatgaattcacgcaggacgtccggcacggtgaccgctgggaccccacgcgaccaccccgtgcgacggacacaccaggcccaggcccaggcagcccccagcggcgggcacagcagagggcagccccgggcgagccaggctggatgggccgcctctgggttaccttcagcggcaagctgcgccgcatcgtggacagcaagtacttcagccgtggcatcatgatggccatccttgtcaacacgctgagcatgggcgtggagtaccatgagcagcccgaggagctgactaatgctctggagatcagcaacatcgtgttcaccagcatgtttgccctggagatgctgctgaagctgctggcctgcggccctctgggctacatccggaacccgtacaacatcttcgacggcatcatcgtggtcatcagcgtctgggagatcgtggggcaggcggacggtggcttgtctgtgctgcgcaccttccggctgctgcgtgtgctgaagctggtgcgctttctgccagccctgcggcgccagctcgtggtgctggtgaagaccatggacaacgtggctaccttctgcacgctgctcatgctcttcattttcatcttcagcatcctgggcatgcaccttttcggctgcaagttcagcctgaagacagacaccggagacaccgtgcctgacaggaagaacttcgactccctgctgtgggccatcgtcaccgtgttccagatcctgacccaggaggactggaacgtggtcctgtacaacggcatggcctccacctcctcctgggccgccctctacttcgtggccctcatgaccttcggcaactatgtgctcttcaacctgctggtggccatcctcgtggagggcttccaggcggagggcgatgccaacagatccgacacggacgaggacaagacgtcggtccacttcgaggaggacttccacaagctcagagaactccagaccacagagctgaagatgtgttccctggccgtgacccccaacgggcacctggagggacgaggcagcctgtcccctcccctcatcatgtgcacagctgccacgcccatgcctacccccaagagctcaccattcctggatgcagcccccagcctcccagactctcggcgtggcagcagcagctccggggacccgccactgggagaccagaagcctccggccagcctccgaagttctccctgtgccccctggggccccagtggcgcctggagcagccggcgctccagctggagcagcctgggccgtgcccccagcctcaagcgccgcggccagtgtggggaacgtgagtccctgctgtctggcgagggcaagggcagcaccgacgacgaagctgaggacggcagggccgcgcccgggccccgtgccaccccactgcggcgggccgagtccctggacccacggcccctgcggccggccgccctcccgcctaccaagtgccgcgatcgcgacgggcaggtggtggccctgcccagcgacttcttcctgcgcatcgacagccaccgtgaggatgcagccgagcttgacgacgactcggaggacagctgctgcctccgcctgcataaagtgctggagccctacaagccccagtggtgccggagccgcgaggcctgggccctctacctcttctccccacagaaccggttccgcgtctcctgccagaaggtcatcacacacaagatgtttgatcacgtggtcctcgtcttcatcttcctcaactgcgtcaccatcgccctggagaggcctgacattgatcccggcagcaccgagcgggtcttcctcagcgtctccaattacatcttcacggccatcttcgtggcggagatgatggtgaaggtggtggccctggggctgctgtccggcgagcacgcctacctgcagagcagctggaacctgctggatgggctgctggtgctggtgtccctggtggacattgtcgtggccatggcctcggctggtggcgccaagatcctgggtgttctgcgcgtgctgcgtctgctgcggaccctgcggcctctgagggtcatcagccgggccccgggcctcaagctggtggtggagacgctgatatcatcactcaggcccattgggaacatcgtcctcatctgctgcgccttcttcatcatttttggcattttgggtgtgcagctcttcaaagggaagttctactactgcgagggccccgacaccaggaacatctccaccaaggcacagtgccgggccgcccactaccgctgggtgcgacgcaagtacaacttcgacaacctgggccaggccctgatgtcgctgttcgtgctgtcatccaaggatggatgggtgaacatcatgtacgacgggctggatgccgtgggtgtcgaccagcagcctgtgcagaaccacaacccctggatgctgctgtacttcatctccttcctgctcatcgtcagcttcttcgtgctcaacatgttcgtgggcgtcgtggtcgagaacttccacaagtgccggcagcaccaggaggcggaggaggcgcggcggcgagaggagaagcggctgcggcgcctagagaggaggcgcaggagcactttccccagcccagaggcccagcgccggccctactatgccgactactcgcccacgcgccgctccattcactcgctgtgcaccagccactatctcgacctcttcatcaccttcatcatctgtgtcaacgtcatcaccatgtccatggagcactataaccaacccaagtcgctggacgaggccctcaagtactgcaactacgtcttcaccatcgtgtttgtcttcgaggctgcactgaagctggtagcatttgggttccgtcggttcttcaaggacaggtggaaccagctggacctggccatcgtgctgctgtcactcatgggcatcacgctggaggagatagagatgagcgccgcgctgcccatcaaccccaccatcatccgcatcatgcgcgtgcttcgcattgcccgtgtgctgaagctgctgaagatggctacgggcatgcgcgccctgctggacactgtggtgcaagctctcccccaggtggggaacctgggccttcttttcatgctcctgttttttatctatgctgcgctgggagtggagctgttcgggaggctggagtgcagtgaagacaacccctgcgagggcctgagcaggcacgccaccttcagcaacttcggcatggccttcctcacgctgttccgcgtgtccacgggggacaactggaacgggatcatgaaggacacgctgcgcgagtgctcccgtgaggacaagcactgcctgagctacctgccggccctgtcgcccgtctacttcgtgaccttcgtgctggtggcccagttcgtgctggtgaacgtggtggtggccgtgctcatgaagcacctggaggagagcaacaaggaggcacgggaggatgcggagctggacgccgagatcgagctggagatggcgcagggccccgggagtgcacgccgggtggacgcggacaggcctcccttgccccaggagagtccgggcgccagggacgccccaaacctggttgcacgcaaggtgtccgtgtccaggatgctctcgctgcccaacgacagctacatgttcaggcccgtggtgcctgcctcggcgccccacccccgcccgctgcaggaggtggagatggagacctatggggccggcacccccttgggctccgttgcctctgtgcactctccgcccgcagagtcctgtgcctccctccagatcccattggctgtgtcgtccccagccaggagcggcgagcccctccacgccctgtcccctcggggcacagcccgctcccccagtctcagccggctgctctgcagacaggaggctgtgcacaccgattccttggaagggaagattgacagccctagggacaccctggatcctgcagagcctggtgagaaaaccccggtgaggccggtgacccaggggggctccctgcagtccccaccacgctccccacggcccgccagcgtccgcactcgtaagcataccttcggacagcgctgcgtctccagccggccggcggccccaggcggagaggaggccgaggcctcggacccagccgacgaggaggtcagccacatcaccagctccgcctgcccctggcagcccacagccgagccccatggccccgaagcctctccggtggccggcggcgagcgggacctgcgcaggctctacagcgtggatgctcagggcttcctggacaagccgggccgggcagacgagcagtggcggccctcggcggagctgggcagcggggagcctggggaggcgaaggcctggggccctgaggccgagcccgctctgggtgcgcgcagaaagaagaagatgagccccccctgcatctcggtggaaccccctgcggaggacgagggctctgcgcggccctccgcggcagagggcggcagcaccacactgaggcgcaggaccccgtcctgtgaggccacgcctcacagggactccctggagcccacagagggctcaggcgccgggggggaccctgcagccaagggggagcgctggggccaggcctcctgccgggctgagcacctgaccgtccccagctttgcctttgagccgctggacctcggggtccccagtggagaccctttcttggacggtagccacagtgtgaccccagaatccagagcttcctcttcaggggccatagtgcccctggaacccccagaatcagagcctcccatgcccgtcggtgaccccccagagaagaggcgggggctgtacctcacagtcccccagtgtcctctggagaaaccagggtccccctcagccacccctgccccagggggtggtgcagatgaccccgtgtagctcggggcttggtgccgcccacggctttggccctggggtctgggggccccgctggggtggaggcccaggcagaaccctgcatggaccctgacttgggtcccgtcgtgagcagaaaggcccggggaggatgacggcccaggccctggttctctgcccagcgaagcaggagtagctgccgggccccacgagcctccgtccgttctggttcgggtttctccgagttttgctaccagccgaggctgtgcgggcaactgggtcagcctcccgtcaggagagaagccgcgtctgtgggacgaagaccgggcacccgccagagaggggaaggtaccaggttgcgtcctttcaggccccgcgttgttacaggacactcgctgggggccctgtgcccttgccggcggcaggttgcagccaccgcggcccaatgtcaccttcactcacagtctgagttcttgtccgcctgtcacgccctcaccaccctccccttccagccaccaccctttccgttccgctcgggccttcccagaagcgtcctgtgactctgggagaggtgacacctcactaaggggccgaccccatggagtaacgcgcccggccccgatgcgaatcaggcctcccctacatctgggggcgttggccgcgagattcccattgacacctttgtttcgtgtgcttttaaattcaggttaaatgttgcaataatctgatgcagaagactcagcttctcaagggagagggagggggcggagcggaataaatagtaacttatttaagaaatgc

SEQ ID NO: 4224 - DNA, 8069 bp, Homo sapiens
  source 1..8069: mol_type = unassigned DNA
cgaggccgccgccgtcgcctccgccgggcgagccggagccggagtcgagccgcggccgggagccgggcgggctggggacgcgggccgggggcggaggcgctgggggccggggccggggccgggggcggaggcgctgggggccggggccggggccgggcgccgagcggggtccgcggtgaccgcgccgcccgggcgatgcccgcggggacgccgccggccagcagagcgaggtgctgccggccgccaccatgaccgagggcgcacgggccgccgacgaggtccgggtgcccctgggcgcgccgccccctggccctgcggcgttggtgggggcgtccccggagagccccggggcgccgggacgcgaggcggagcgggggtccgagctcggcgtgtcaccctccgagagcccggcggccgagcgcggcgcggagctgggtgccgacgaggagcagcgcgtcccgtacccggccttggcggccacggtcttcttctgcctcggtcagaccacgcggccgcgcagctggtgcctccggctggtctgcaacccatggttcgagcacgtgagcatgctggtaatcatgctcaactgcgtgaccctgggcatgttccggccctgtgaggacgttgagtgcggctccgagcgctgcaacatcctggaggcctttgacgccttcattttcgccttttttgcggtggagatggtcatcaagatggtggccttggggctgttcgggcagaagtgttacctgggtgacacgtggaacaggctggatttcttcatcgtcgtggcgggcatgatggagtactcgttggacggacacaacgtgagcctctcggctatcaggaccgtgcgggtgctgcggcccctccgcgccatcaaccgcgtgcctagcatgcggatcctggtcactctgctgctggatacgctgcccatgctcgggaacgtccttctgctgtgcttcttcgtcttcttcattttcggcatcgttggcgtccagctctgggctggcctcctgcggaaccgctgcttcctggacagtgcctttgtcaggaacaacaacctgaccttcctgcggccgtactaccagacggaggagggcgaggagaacccgttcatctgctcctcacgccgagacaacggcatgcagaagtgctcgcacatccccggccgccgcgagctgcgcatgccctgcaccctgggctgggaggcctacacgcagccgcaggccgagggggtgggcgctgcacgcaacgcctgcatcaactggaaccagtactacaacgtgtgccgctcgggtgactccaacccccacaacggtgccatcaacttcgacaacatcggctacgcctggattgccatcttccaggtgatcacgctggaaggctgggtggacatcatgtactacgtcatggacgcccactcattctacaacttcatctatttcatcctgctcatcatcgtgggctccttcttcatgatcaacctgtgcctggtggtgattgccacgcagttctcggagacgaagcagcgggagagtcagctgatgcgggagcagcgggcacgccacctgtccaacgacagcacgctggccagcttctccgagcctggcagctgctacgaagagctgctgaagtacgtgggccacatattccgcaaggtcaagcggcgcagcttgcgcctctacgcccgctggcagagccgctggcgcaagaaggtggaccccagtgctgtgcaaggccagggtcccgggcaccgccagcgccgggcaggcaggcacacagcctcggtgcaccacctggtctaccaccaccatcaccaccaccaccaccactaccatttcagccatggcagcccccgcaggcccggccccgagccaggcgcctgcgacaccaggctggtccgagctggcgcgcccccctcgccaccttccccaggccgcggaccccccgacgcagagtctgtgcacagcatctaccatgccgactgccacatagaggggccgcaggagagggcccgggtggcacatgccgcagccactgccgctgccagcctcagactggccacagggctgggcaccatgaactaccccacgatcctgccctcaggggtgggcagcggcaaaggcagcaccagccccggacccaaggggaagtgggccggtggaccgccaggcaccggggggcacggcccgttgagcttgaacagccctgatccctacgagaagatcccgcatgtggtcggggagcatggactgggccaggcccctggccatctgtcgggcctcagtgtgccctgccccctgcccagccccccagcgggcacactgacctgtgagctgaagagctgcccgtactgcacccgtgccctggaggacccggagggtgagctcagcggctcggaaagtggagactcagatggccgtggcgtctatgaattcacgcaggacgtccggcacggtgaccgctgggaccccacgcgaccaccccgtgcgacggacacaccaggcccaggcccaggcagcccccagcggcgggcacagcagagggcagccccgggcgagccaggctggatgggccgcctctgggttaccttcagcggcaagctgcgccgcatcgtggacagcaagtacttcagccgtggcatcatgatggccatccttgtcaacacgctgagcatgggcgtggagtaccatgagcagcccgaggagctgactaatgctctggagatcagcaacatcgtgttcaccagcatgtttgccctggagatgctgctgaagctgctggcctgcggccctctgggctacatccggaacccgtacaacatcttcgacggcatcatcgtggtcatcagcgtctgggagatcgtggggcaggcggacggtggcttgtctgtgctgcgcaccttccggctgctgcgtgtgctgaagctggtgcgctttctgccagccctgcggcgccagctcgtggtgctggtgaagaccatggacaacgtggctaccttctgcacgctgctcatgctcttcattttcatcttcagcatcctgggcatgcaccttttcggctgcaagttcagcctgaagacagacaccggagacaccgtgcctgacaggaagaacttcgactccctgctgtgggccatcgtcaccgtgttccagatcctgacccaggaggactggaacgtggtcctgtacaacggcatggcctccacctcctcctgggccgccctctacttcgtggccctcatgaccttcggcaactatgtgctcttcaacctgctggtggccatcctcgtggagggcttccaggcggagggcgatgccaacagatccgacacggacgaggacaagacgtcggtccacttcgaggaggacttccacaagctcagagaactccagaccacagagctgaagatgtgttccctggccgtgacccccaacgggcacctggagggacgaggcagcctgtcccctcccctcatcatgtgcacagctgccacgcccatgcctacccccaagagctcaccattcctggatgcagcccccagcctcccagactctcggcgtggcagcagcagctccggggacccgccactgggagaccagaagcctccggccagcctccgaagttctccctgtgccccctggggccccagtggcgcctggagcagccggcgctccagctggagcagcctgggccgtgcccccagcctcaagcgccgcggccagtgtggggaacgtgagtccctgctgtctggcgagggcaagggcagcaccgacgacgaagctgaggacggcagggccgcgcccgggccccgtgccaccccactgcggcgggccgagtccctggacccacggcccctgcggccggccgccctcccgcctaccaagtgccgcgatcgcgacgggcaggtggtggccctgcccagcgacttcttcctgcgcatcgacagccaccgtgaggatgcagccgagcttgacgacgactcggaggacagctgctgcctccgcctgcataaagtgctggagccctacaagccccagtggtgccggagccgcgaggcctgggccctctacctcttctccccacagaaccggttccgcgtctcctgccagaaggtcatcacacacaagatgtttgatcacgtggtcctcgtcttcatcttcctcaactgcgtcaccatcgccctggagaggcctgacattgatcccggcagcaccgagcgggtcttcctcagcgtctccaattacatcttcacggccatcttcgtggcggagatgatggtgaaggtggtggccctggggctgctgtccggcgagcacgcctacctgcagagcagctggaacctgctggatgggctgctggtgctggtgtccctggtggacattgtcgtggccatggcctcggctggtggcgccaagatcctgggtgttctgcgcgtgctgcgtctgctgcggaccctgcggcctctgagggtcatcagccgggccccgggcctcaagctggtggtggagacgctgatatcatcactcaggcccattgggaacatcgtcctcatctgctgcgccttcttcatcatttttggcattttgggtgtgcagctcttcaaagggaagttctactactgcgagggccccgacaccaggaacatctccaccaaggcacagtgccgggccgcccactaccgctgggtgcgacgcaagtacaacttcgacaacctgggccaggccctgatgtcgctgttcgtgctgtcatccaaggatggatgggtgaacatcatgtacgacgggctggatgccgtgggtgtcgaccagcagcctgtgcagaaccacaacccctggatgctgctgtacttcatctccttcctgctcatcgtcagcttcttcgtgctcaacatgttcgtgggcgtcgtggtcgagaacttccacaagtgccggcagcaccaggaggcggaggaggcgcggcggcgagaggagaagcggctgcggcgcctagagaggaggcgcaggaaggcccagcgccggccctactatgccgactactcgcccacgcgccgctccattcactcgctgtgcaccagccactatctcgacctcttcatcaccttcatcatctgtgtcaacgtcatcaccatgtccatggagcactataaccaacccaagtcgctggacgaggccctcaagtactgcaactacgtcttcaccatcgtgtttgtcttcgaggctgcactgaagctggtagcatttgggttccgtcggttcttcaaggacaggtggaaccagctggacctggccatcgtgctgctgtcactcatgggcatcacgctggaggagatagagatgagcgccgcgctgcccatcaaccccaccatcatccgcatcatgcgcgtgcttcgcattgcccgtgtgctgaagctgctgaagatggctacgggcatgcgcgccctgctggacactgtggtgcaagctctcccccaggtggggaacctgggccttcttttcatgctcctgttttttatctatgctgcgctgggagtggagctgttcgggaggctggagtgcagtgaagacaacccctgcgagggcctgagcaggcacgccaccttcagcaacttcggcatggccttcctcacgctgttccgcgtgtccacgggggacaactggaacgggatcatgaaggacacgctgcgcgagtgctcccgtgaggacaagcactgcctgagctacctgccggccctgtcgcccgtctacttcgtgaccttcgtgctggtggcccagttcgtgctggtgaacgtggtggtggccgtgctcatgaagcacctggaggagagcaacaaggaggcacgggaggatgcggagctggacgccgagatcgagctggagatggcgcagggccccgggagtgcacgccgggtggacgcggacaggcctcccttgccccaggagagtccgggcgccagggacgccccaaacctggttgcacgcaaggtgtccgtgtccaggatgctctcgctgcccaacgacagctacatgttcaggcccgtggtgcctgcctcggcgccccacccccgcccgctgcaggaggtggagatggagacctatggggccggcacccccttgggctccgttgcctctgtgcactctccgcccgcagagtcctgtgcctccctccagatcccattggctgtgtcgtccccagccaggagcggcgagcccctccacgccctgtcccctcggggcacagcccgctcccccagtctcagccggctgctctgcagacaggaggctgtgcacaccgattccttggaagggaagattgacagccctagggacaccctggatcctgcagagcctggtgagaaaaccccggtgaggccggtgacccaggggggctccctgcagtccccaccacgctccccacggcccgccagcgtccgcactcgtaagcataccttcggacagcgctgcgtctccagccggccggcggccccaggcggagaggaggccgaggcctcggacccagccgacgaggaggtcagccacatcaccagctccgcctgcccctggcagcccacagccgagccccatggccccgaagcctctccggtggccggcggcgagcgggacctgcgcaggctctacagcgtggatgctcagggcttcctggacaagccgggccgggcagacgagcagtggcggccctcggcggagctgggcagcggggagcctggggaggcgaaggcctggggccctgaggccgagcccgctctgggtgcgcgcagaaagaagaagatgagccccccctgcatctcggtggaaccccctgcggaggacgagggctctgcgcggccctccgcggcagagggcggcagcaccacactgaggcgcaggaccccgtcctgtgaggccacgcctcacagggactccctggagcccacagagggctcaggcgccgggggggaccctgcagccaagggggagcgctggggccaggcctcctgccgggctgagcacctgaccgtccccagctttgcctttgagccgctggacctcggggtccccagtggagaccctttcttggacggtagccacagtgtgaccccagaatccagagcttcctcttcaggggccatagtgcccctggaacccccagaatcagagcctcccatgcccgtcggtgaccccccagagaagaggcgggggctgtacctcacagtcccccagtgtcctctggagaaaccagggtccccctcagccacccctgccccagggggtggtgcagatgaccccgtgtagctcggggcttggtgccgcccacggctttggccctggggtctgggggccccgctggggtggaggcccaggcagaaccctgcatggaccctgacttgggtcccgtcgtgagcagaaaggcccggggaggatgacggcccaggccctggttctctgcccagcgaagcaggagtagctgccgggccccacgagcctccgtccgttctggttcgggtttctccgagttttgctaccagccgaggctgtgcgggcaactgggtcagcctcccgtcaggagagaagccgcgtctgtgggacgaagaccgggcacccgccagagaggggaaggtaccaggttgcgtcctttcaggccccgcgttgttacaggacactcgctgggggccctgtgcccttgccggcggcaggttgcagccaccgcggcccaatgtcaccttcactcacagtctgagttcttgtccgcctgtcacgccctcaccaccctccccttccagccaccaccctttccgttccgctcgggccttcccagaagcgtcctgtgactctgggagaggtgacacctcactaaggggccgaccccatggagtaacgcgcccggccccgatgcgaatcaggcctcccctacatctgggggcgttggccgcgagattcccattgacacctttgtttcgtgtgcttttaaattcaggttaaatgttgcaataatctgatgcagaagactcagcttctcaagggagagggagggggcggagcggaataaatagtaacttatttaagaaatgc

SEQ ID NO: 4225 - DNA, 10015 bp, Homo sapiens
  source 1..10015: mol_type = unassigned DNA
atggctgagagcgcctccccgccctcctcatctgcagcagccccagccgctgagccaggagtcaccacggagcagcccggaccccggagccccccatcctccccgccaggcctggaggagcctctggatggagctgatcctcatgtcccacacccagacctggcgcctattgccttcttctgcctgcgacagaccaccagcccccggaactggtgcatcaagatggccactgggccttggtggtggtgcctgtgcatgctggtgatcctgctgaactgcgtgacacttggcatgtaccagccgtgcgacgacatggactgcctgtccgaccgctgcaagatcctgcaggtctttgatgacttcatctttatcttctttgccatggagatggtgctcaagatggtggccctggggatttttggcaagaagtgctacctcggggacacatggaaccgcctggatttcttcatcgtcatggcagggatggtcgagtactccctggaccttcagaacatcaacctgtcagccatccgcaccgtgcgcgtcctgaggcccctcaaagccatcaaccgcgtgcccagtatgcggatcctggtgaacctgctcctggacacactgcccatgctggggaatgtcctgctgctctgcttctttgtcttcttcatctttggcatcataggtgtgcagctctgggcgggcctgctgcgtaaccgctgcttcctggaggagaacttcaccatacaaggggatgtggccttgcccccatactaccagccggaggaggatgatgagatgcccttcatctgctccctgtcgggcgacaatgggataatgggctgccatgagatccccccgctcaaggagcagggccgtgagtgctgcctgtccaaggacgacgtctacgactttggggcggggcgccaggacctcaatgccagcggcctctgtgtcaactggaaccgttactacaatgtgtgccgcacgggcagcgccaacccccacaagggtgccatcaactttgacaacatcggttatgcttggattgtcatcttccaggtgatcactctggaaggctgggtggagatcatgtactacgtgatggatgctcactccttctacaacttcatctacttcatcctgcttatcatagtgggctccttcttcatgatcaacctgtgcctcgttgtcatagcgacccagttctcggagaccaagcaacgggagcaccggctgatgctggagcagcggcagcgctacctgtcctccagcacggtggccagctacgccgagcctggcgactgctacgaggagatcttccagtatgtctgccacatcctgcgcaaggccaagcgccgcgccctgggcctctaccaggccctgcagagccggcgccaggccctgggcccggaggccccggcccccgccaaacctgggccccacgccaaggagccccggcactaccatgggaagactaagggtcagggagatgaagggagacatctcggaagccggcattgccagactttgcatgggcctgcctcccctggaaatgatcactcgggaagaggcaagccagggccacgggagctgtgcccgcaacatagccccctggatgcgacgccccacaccctggtgcagcccatccccgccacgctggcttccgatcccgccagctgcccttgctgccagcatgaggacggccggcggccctcgggcctgggcagcaccgactcgggccaggagggctcgggctccgggagctccgctggtggcgaggacgaggcggatggggacggggcccggagcagcgaggacggagcctcctcagaactggggaaggaggaggaggaggaggagcaggcggatggggcggtctggctgtgcggggatgtgtggcgggagacgcgagccaagctgcgcggcatcgtggacagcaagtacttcaaccggggcatcatgatggccatcctggtcaacaccgtcagcatgggcatcgagcaccacgagcaggccaatgagctgaccaacatcctggagatctgcaatgtggtcttcaccagcatgtttgccctggagatgatcctgaagctggctgcatttgggctcttcgactacctgcgtaacccctacaacatcttcgacagcatcattgtcatcatcagcatctgggagattgtggggcaggcggacggtgggctgtcggtgctgcggaccttccggctgctgcgcgtgctgaaactggtgcgcttcatgcctgccctgcggcgccagctcgtggtgctcatgaagaccatggacaacgtggccaccttctgcatgctgctcatgctcttcatcttcatcttcagcatccttgggatgcatatttttggctgcaagttcagcctccgcacggacactggagacacggtgcccgacaggaagaacttcgactccctgctgtgggccatcgtcactgtgttccagatcctcacccaggaggactggaacgtcgttctctacaatggcatggcctccacttctccctgggcctccctctactttgtcgccctcatgaccttcggcaactatgtgctcttcaacctgctggtggccatcctggtggagggcttccaggcggagggtgacgccaatcgctcctactcggacgaggaccagagctcatccaacatagaagagtttgataagctccaggaaggcctggacagcagcggagatcccaagctctgcccaatccccatgacccccaatgggcacctggaccccagtctcccactgggtgggcacctaggtcctgctggggctgcgggacctgccccccgactctcactgcagccggaccccatgctggtggccctgggctcccgaaagagcagtgtcatgtctctagggaggatgagctatgaccagcgctccctgtccagctcccggagctcctactacgggccatggggccgcagcgcggcctgggccagccgtcgctccagctggaacagcctcaagcacaagccgccgtcggcggagcatgagtccctgctctctgcggagcgcggcggcggcgcccgggtctgcgaggttgccgcggacgaggggccgccgcgggccgcacccctgcacaccccacacgcccaccacattcatcacgggccccatctggcgcaccgccaccgccaccaccgccggacgctgtccctcgacaacagggactcggtggacctggccgagctggtgcccgcggtgggcgcccacccccgggccgcctggagggcggcaggcccggcccccgggcatgaggactgcaatggcaggatgcccagcatcgccaaagacgtcttcaccaagatgggcgaccgcggggatcgcggggaggatgaggaggaaatcgactacaccctgtgcttccgcgtccgcaagatgatcgacgtctataagcccgactggtgcgaggtccgcgaagactggtctgtctacctcttctctcccgagaacaggttccgggtcctgtgtcagaccattattgcccacaaactcttcgactacgtcgtcctggccttcatctttctcaactgcatcaccatcgccctggagcggcctcagatcgaggccggcagcaccgaacgcatctttctcaccgtgtccaactacatcttcacggccatcttcgtgggcgagatgacattgaaggtagtctcgctgggcctgtacttcggcgagcaggcgtacctacgcagcagctggaacgtgctggatggctttcttgtcttcgtgtccatcatcgacatcgtggtgtccctggcctcagccgggggagccaagatcttgggggtcctccgagtcttgcggctcctgcgcaccctacgccccctgcgtgtcatcagccgggcgccgggcctgaagctggtggtggagacactcatctcctccctcaagcccatcggcaacatcgtgctcatctgctgtgccttcttcatcatctttggcatcctgggagtgcagctcttcaagggcaagttctaccactgtctgggcgtggacacccgcaacatcaccaaccgctcggactgcatggccgccaactaccgctgggtccatcacaaatacaacttcgacaacctgggccaggctctgatgtccctctttgtcctggcatccaaggatggttgggtgaacatcatgtacaatggactggatgctgttgctgtggaccagcagcctgtgaccaaccacaacccctggatgctgctgtacttcatctccttcctgctcatcgtcagcttctttgtgctcaacatgtttgtgggtgtcgtggtggagaacttccacaagtgccggcagcaccaggaggctgaagaggcacggcggcgtgaggagaagcggctgcggcgcctggagaagaagcgccggaaggcccagcggctgccctactatgccacctattgtcacacccggctgctcatccactccatgtgcaccagccactacctggacatcttcatcaccttcatcatctgcctcaacgtggtcaccatgtccctggagcactacaatcagcccacgtccctggagacagccctcaagtactgcaactatatgttcaccactgtctttgtgctggaggctgtgctgaagctggtggcatttggtctgaggcgcttcttcaaggaccgatggaaccagctggacctggccattgtgctactgtcagtcatgggcatcaccctggaggagatcgagatcaatgcggccctgcccatcaatcccaccatcatccgcatcatgagggttctgcgcattgcccgagtgctgaagctgttgaagatggccacaggaatgcgggccctgctggacacggtggtgcaagctttgccccaggtgggcaacctgggcctcctcttcatgctgctcttcttcatctatgctgctctcggggtggagctctttgggaagctggtctgcaacgacgagaacccgtgcgagggcatgagccggcatgccaccttcgagaacttcggcatggccttcctcacactcttccaggtctccacgggtgacaactggaacgggatcatgaaggacacgctgcgggactgcacccacgacgagcgcagctgcctgagcagcctgcagtttgtgtcgccgctgtacttcgtgagcttcgtgctcaccgcgcagttcgtgctcatcaacgtggtggtggctgtgctcatgaagcacctggacgacagcaacaaggaggcgcaggaggacgccgagatggatgccgagctcgagctggagatggcccatggcctgggccctggcccgaggctgcctaccggctccccgggcgcccctggccgagggccgggaggggcgggcggcgggggcgacaccgagggcggcttgtgccggcgctgctactcgcctgcccaggagaacctgtggctggacagcgtctctttaatcatcaaggactccttggagggggagctgaccatcatcgacaacctgtcgggctccatcttccaccactactcctcgcctgccggctgcaagaagtgtcaccacgacaagcaagaggtgcagctggctgagacggaggccttctccctgaactcagacaggtcctcgtccatcctgctgggtgacgacctgagtctcgaggaccccacagcctgcccacctggccgcaaagacagcaagggtgagctggacccacctgagcccatgcgtgtgggagacctgggcgaatgcttcttccccttgtcctctacggccgtctcgccggatccagagaacttcctgtgtgagatggaggagatcccattcaaccctgtccggtcctggctgaaacatgacagcagtcaagcacccccaagtcccttctccccggatgcctccagccctctcctgcccatgccagccgagttcttccaccctgcagtgtctgccagccagaaaggcccagaaaagggcactggcactggaaccctccccaagattgcgctgcagggctcctgggcatctctgcggtcaccaagggtcaactgtaccctcctccggcaggccaccgggagcgacacgtcgctggacgccagccccagcagctccgcgggcagcctgcagaccacgctcgaggacagcctgaccctgagcgacagcccccggcgtgccctggggccgcccgcgcctgctccaggaccccgggccggcctgtcccccgccgctcgccgccgcctgagcctgcgcggccggggcctcttcagcctgcgggggctgcgggcgcatcagcgcagccacagcagcgggggctccaccagcccgggctgcacccaccacgactccatggacccctcggacgaggagggccgcggtggcgcgggcggcgggggcgcgggcagcgagcactcggagaccctcagcagcctctcgctcacctccctcttctgcccgccgcccccgccgccagcccccggcctcacgcccgccaggaagttcagcagcaccagcagcctggccgcccccggccgcccccacgccgccgccctggcccacggcctggcccggagcccctcgtgggccgcggaccgcagcaaggacccccccggccgggcaccgctgcccatgggcctgggccccttggcgcccccgccgcaaccgctccccggagagctggagccgggagacgccgccagcaagaggaagagatgagggtcgcaggggcccccggccgcccaccgcccgccccgtctcaccttctttacctcaggagccaggagcagacagcaatacttcgtccacacctgggatcgcgcagggcccgcagggcacaggcgcccgacagccgggctgagcggagtctgggttagccaggcctgcgtggcccatggtggcccttccagtgcatatacatacatatatatatatatatgcatatatatatatatatatatatatatgtgtatacacacacacatagacagacatatatatatatatttattttttttactgagagcttatgacttccagaaagtgctaaaggtgggaggtgggccagggcctggacggggcttttgtctgatgctctgggattctggccagacccaccccagggcacatgtcctgcgggggcgtcccagctgtgttttttgatgtctcctccctggttaagagtagcttggagaggaccctcaggcctctgagggcaccaggccctggagaagaggtgcaattcagggtgtgtgtgtgttttttttcctttaaagaagaaacgctgctaagatcccacgtggctcccacgtgtcggggtgtctgtcctgtcatcctgactgtctcgttattgtgaagtctttcgtagacaccccagagcacacacatccccttagtccaccggttagatgtctctctttagaaaaatcaggggtgagtagctgtgtttccttaggcctggggtaggggatggagagcagctccaaggctgagctggggctctggccccaggtgaggtccccagctcctgagcacttctgagggggtgggttccacccccaggagggcgggggtgggtggagcaggagtggaggcagcctgcagaggaagggtgcgggagactgagccggcagtggcttgcttggaggggctagggtacccgcctggtctcggctggctccagctgccctgcaggtgcccctgggctcaggtagttagttgttcagccactaatgccttttatcccccatatgggcgctgagctgtggctgttcctggacactgtgctgtccccgtcctgagcaactatgcccccgccccagtaggttcaaggcaaagcagctctgaccgaattctaggcaggggtgggggcacctgcctgggccctgggtccagccgcatccccatgcccagcctttcgcgtcacctggaggccacatcttcccaccccacctgccagcccctgtctctcctccccgctgcccctaactgcagctcagctttcactatagcagtgcttcccaaacgggttctagacttgggtgtttgatttgaagagttacgcatttatttcactatttattgggaaaaaaatgcattgaacccgtgatttcacagacattttgcttaggtcaaggctactttttaaaaagggagtgactttcatgaagtcagtttgaagaaggaggttgggagcatgttggtggcagtgatctggagaggctgcaggggccacgagtttgcagatgctgtacttcagcaataaccttgcctttgctaagaccccctccgagggcttcaggggggcctgccaagggggggccttgttcttgttcccaaactctgacttggaagaactcagcttgtggccgggctggtgagggtgtggggtgcgcccttcccttttgggctgagggagagggggccgggaggggttgtcaagcccacccgggaaactgagccctggagaggggaagcagccagcccaggatgcttcagggccctggcagcaaagaagctggggtggtgtggagggccctactccacaccctagagctgtgatgctgagcaaggtgcctgtggcggaaggaactgcccagtcctccctgggggcaggtagacctgtggggatggctcggtccaagcccaacactgcccgctccagagagcctcagccctgcctccctttccacagaggtggttttatgtggaacgaggtaccttgtctggggaagaagtggagctgggcaggcttgactgctcctggctgaccctgagctctcgcagttggagggaagcagacagacttgactttttgcaagtccgcgtgttgctggagggacacgtgtattggagcccagaagaggggctgtgtggcctgggaataccatgtggaaggttgggcttcaagttaacaggatcagacaccagtcaagcagcctcaggtcatcttgcgactccactgagcagcctttcctgttgtcacatgggttcagagcagctgagcagggaacacgtcctaggcaggtctgacgtgaaacctccccttaccctgaaccgtgtgactctgcaagcagacacctcgaggcaggtgttctaggcaaagggatgggcatgagcgaaggctccagggtccacagagcagggagtgtggagaaggtggaagagctgagctcagaggcagagaagctccttgcagggagcactgggagatggcctggcccgtcccaggctcctggaggccccacctgccgatcccaggcacttgaccttgttcctgtgggtgacagagatgagaaccagggaagctgtgatccactggccaggacaagtcaacatgggtgagggttgggcaaagggcccttccttcctccccaaccctgtggtctggggccatggcctcaggcttgtgtctatcacaaaagcacaaacttgccctaacccacatgggcctggctgtggggaaagtggggacccaggtccctgagctgtctgctgggctccgtagagcggtggtgggcaggcaccttggcatctgtgcagagacggcccagtctggccaaatcctcttcctctcccctgctctaccttctccggcaccaggcagccccttaaaggaggacaaagtgtgtaaagcccgtctgctgtcttcccccaaatcctcagctcagagccttccgcttccagggccaaccccagccccgtttgctgcgttgtgtaagggcttggggtcttagaagctgctctttagcccagatacacatactcttttttgtctttgtgcaataatcagtgttcctggcagagcctgggccaagctgcagcctactgaggaggcagaggccacctcctccagaaagccctcggcctgggccgccgccgtgactctagcactctcagtcgctgtacagtttctatggtgtgaatgaacttccctcctagttgctgatggcgctggtacctgctggcccatggcccgggtgtagagaaaccaagcggcagccaccaccagtgttgttttgaataaaagcccagaagcctattt

SEQ ID NO: 4226 - DNA, 9892 bp, Homo sapiens
  source 1..9892: mol_type = unassigned DNA
atggctgagagcgcctccccgccctcctcatctgcagcagccccagccgctgagccaggagtcaccacggagcagcccggaccccggagccccccatcctccccgccaggcctggaggagcctctggatggagctgatcctcatgtcccacacccagacctggcgcctattgccttcttctgcctgcgacagaccaccagcccccggaactggtgcatcaagatggccactgggccttggtggtggtgcctgtgcatgctggtgatcctgctgaactgcgtgacacttggcatgtaccagccgtgcgacgacatggactgcctgtccgaccgctgcaagatcctgcaggtctttgatgacttcatctttatcttctttgccatggagatggtgctcaagatggtggccctggggatttttggcaagaagtgctacctcggggacacatggaaccgcctggatttcttcatcgtcatggcagggatggtcgagtactccctggaccttcagaacatcaacctgtcagccatccgcaccgtgcgcgtcctgaggcccctcaaagccatcaaccgcgtgcccagtatgcggatcctggtgaacctgctcctggacacactgcccatgctggggaatgtcctgctgctctgcttctttgtcttcttcatctttggcatcataggtgtgcagctctgggcgggcctgctgcgtaaccgctgcttcctggaggagaacttcaccatacaaggggatgtggccttgcccccatactaccagccggaggaggatgatgagatgcccttcatctgctccctgtcgggcgacaatgggataatgggctgccatgagatccccccgctcaaggagcagggccgtgagtgctgcctgtccaaggacgacgtctacgactttggggcggggcgccaggacctcaatgccagcggcctctgtgtcaactggaaccgttactacaatgtgtgccgcacgggcagcgccaacccccacaagggtgccatcaactttgacaacatcggttatgcttggattgtcatcttccaggtgatcactctggaaggctgggtggagatcatgtactacgtgatggatgctcactccttctacaacttcatctacttcatcctgcttatcatagtgggctccttcttcatgatcaacctgtgcctcgttgtcatagcgacccagttctcggagaccaagcaacgggagcaccggctgatgctggagcagcggcagcgctacctgtcctccagcacggtggccagctacgccgagcctggcgactgctacgaggagatcttccagtatgtctgccacatcctgcgcaaggccaagcgccgcgccctgggcctctaccaggccctgcagagccggcgccaggccctgggcccggaggccccggcccccgccaaacctgggccccacgccaaggagccccggcactaccagctgtgcccgcaacatagccccctggatgcgacgccccacaccctggtgcagcccatccccgccacgctggcttccgatcccgccagctgcccttgctgccagcatgaggacggccggcggccctcgggcctgggcagcaccgactcgggccaggagggctcgggctccgggagctccgctggtggcgaggacgaggcggatggggacggggcccggagcagcgaggacggagcctcctcagaactggggaaggaggaggaggaggaggagcaggcggatggggcggtctggctgtgcggggatgtgtggcgggagacgcgagccaagctgcgcggcatcgtggacagcaagtacttcaaccggggcatcatgatggccatcctggtcaacaccgtcagcatgggcatcgagcaccacgagcaggccacagagctgaccaacatcctggagatctgcaatgtggtcttcaccagcatgtttgccctggagatgatcctgaagctggctgcatttgggctcttcgactacctgcgtaacccctacaacatcttcgacagcatcattgtcatcatcagcatctgggagattgtggggcaggcggacggtgggctgtcggtgctgcggaccttccggctgctgcgcgtgctgaaactggtgcgcttcatgcctgccctgcggcgccagctcgtggtgctcatgaagaccatggacaacgtggccaccttctgcatgctgctcatgctcttcatcttcatcttcagcatccttgggatgcatatttttggctgcaagttcagcctccgcacggacactggagacacggtgcccgacaggaagaacttcgactccctgctgtgggccatcgtcactgtgttccagatcctcacccaggaggactggaacgtcgttctctacaatggcatggcctccacttctccctgggcctccctctactttgtcgccctcatgaccttcggcaactatgtgctcttcaacctgctggtggccatcctggtggagggcttccaggcggagggtgacgccaatcgctcctactcggacgaggaccagagctcatccaacatagaagagtttgataagctccaggaaggcctggacagcagcggagatcccaagctctgcccaatccccatgacccccaatgggcacctggaccccagtctcccactgggtgggcacctaggtcctgctggggctgcgggacctgccccccgactctcactgcagccggaccccatgctggtggccctgggctcccgaaagagcagtgtcatgtctctagggaggatgagctatgaccagcgctccctgtccagctcccggagctcctactacgggccatggggccgcagcgcggcctgggccagccgtcgctccagctggaacagcctcaagcacaagccgccgtcggcggagcatgagtccctgctctctgcggagcgcggcggcggcgcccgggtctgcgaggttgccgcggacgaggggccgccgcgggccgcacccctgcacaccccacacgcccaccacattcatcacgggccccatctggcgcaccgccaccgccaccaccgccggacgctgtccctcgacaacagggactcggtggacctggccgagctggtgcccgcggtgggcgcccacccccgggccgcctggagggcggcaggcccggcccccgggcatgaggactgcaatggcaggatgcccagcatcgccaaagacgtcttcaccaagatgggcgaccgcggggatcgcggggaggatgaggaggaaatcgactacaccctgtgcttccgcgtccgcaagatgatcgacgtctataagcccgactggtgcgaggtccgcgaagactggtctgtctacctcttctctcccgagaacaggttccgggtcctgtgtcagaccattattgcccacaaactcttcgactacgtcgtcctggccttcatctttctcaactgcatcaccatcgccctggagcggcctcagatcgaggccggcagcaccgaacgcatctttctcaccgtgtccaactacatcttcacggccatcttcgtgggcgagatgacattgaaggtagtctcgctgggcctgtacttcggcgagcaggcgtacctacgcagcagctggaacgtgctggatggctttcttgtcttcgtgtccatcatcgacatcgtggtgtccctggcctcagccgggggagccaagatcttgggggtcctccgagtcttgcggctcctgcgcaccctacgccccctgcgtgtcatcagccgggcgccgggcctgaagctggtggtggagacactcatctcctccctcaagcccatcggcaacatcgtgctcatctgctgtgccttcttcatcatctttggcatcctgggagtgcagctcttcaagggcaagttctaccactgtctgggcgtggacacccgcaacatcaccaaccgctcggactgcatggccgccaactaccgctgggtccatcacaaatacaacttcgacaacctgggccaggctctgatgtccctctttgtcctggcatccaaggatggttgggtgaacatcatgtacaatggactggatgctgttgctgtggaccagcagcctgtgaccaaccacaacccctggatgctgctgtacttcatctccttcctgctcatcgtcagcttctttgtgctcaacatgtttgtgggtgtcgtggtggagaacttccacaagtgccggcagcaccaggaggctgaagaggcacggcggcgtgaggagaagcggctgcggcgcctggagaagaagcgccggaaggcccagcggctgccctactatgccacctattgtcacacccggctgctcatccactccatgtgcaccagccactacctggacatcttcatcaccttcatcatctgcctcaacgtggtcaccatgtccctggagcactacaatcagcccacgtccctggagacagccctcaagtactgcaactatatgttcaccactgtctttgtgctggaggctgtgctgaagctggtggcatttggtctgaggcgcttcttcaaggaccgatggaaccagctggacctggccattgtgctactgtcagtcatgggcatcaccctggaggagatcgagatcaatgcggccctgcccatcaatcccaccatcatccgcatcatgagggttctgcgcattgcccgagtgctgaagctgttgaagatggccacaggaatgcgggccctgctggacacggtggtgcaagctttgccccaggtgggcaacctgggcctcctcttcatgctgctcttcttcatctatgctgctctcggggtggagctctttgggaagctggtctgcaacgacgagaacccgtgcgagggcatgagccggcatgccaccttcgagaacttcggcatggccttcctcacactcttccaggtctccacgggtgacaactggaacgggatcatgaaggacacgctgcgggactgcacccacgacgagcgcagctgcctgagcagcctgcagtttgtgtcgccgctgtacttcgtgagcttcgtgctcaccgcgcagttcgtgctcatcaacgtggtggtggctgtgctcatgaagcacctggacgacagcaacaaggaggcgcaggaggacgccgagatggatgccgagctcgagctggagatggcccatggcctgggccctggcccgaggctgcctaccggctccccgggcgcccctggccgagggccgggaggggcgggcggcgggggcgacaccgagggcggcttgtgccggcgctgctactcgcctgcccaggagaacctgtggctggacagcgtctctttaatcatcaaggactccttggagggggagctgaccatcatcgacaacctgtcgggctccatcttccaccactactcctcgcctgccggctgcaagaagtgtcaccacgacaagcaagaggtgcagctggctgagacggaggccttctccctgaactcagacaggtcctcgtccatcctgctgggtgacgacctgagtctcgaggaccccacagcctgcccacctggccgcaaagacagcaagggtgagctggacccacctgagcccatgcgtgtgggagacctgggcgaatgcttcttccccttgtcctctacggccgtctcgccggatccagagaacttcctgtgtgagatggaggagatcccattcaaccctgtccggtcctggctgaaacatgacagcagtcaagcacccccaagtcccttctccccggatgcctccagccctctcctgcccatgccagccgagttcttccaccctgcagtgtctgccagccagaaaggcccagaaaagggcactggcactggaaccctccccaagattgcgctgcagggctcctgggcatctctgcggtcaccaagggtcaactgtaccctcctccggcaggccaccgggagcgacacgtcgctggacgccagccccagcagctccgcgggcagcctgcagaccacgctcgaggacagcctgaccctgagcgacagcccccggcgtgccctggggccgcccgcgcctgctccaggaccccgggccggcctgtcccccgccgctcgccgccgcctgagcctgcgcggccggggcctcttcagcctgcgggggctgcgggcgcatcagcgcagccacagcagcgggggctccaccagcccgggctgcacccaccacgactccatggacccctcggacgaggagggccgcggtggcgcgggcggcgggggcgcgggcagcgagcactcggagaccctcagcagcctctcgctcacctccctcttctgcccgccgcccccgccgccagcccccggcctcacgcccgccaggaagttcagcagcaccagcagcctggccgcccccggccgcccccacgccgccgccctggcccacggcctggcccggagcccctcgtgggccgcggaccgcagcaaggacccccccggccgggcaccgctgcccatgggcctgggccccttggcgcccccgccgcaaccgctccccggagagctggagccgggagacgccgccagcaagaggaagagatgagggtcgcaggggcccccggccgcccaccgcccgccccgtctcaccttctttacctcaggagccaggagcagacagcaatacttcgtccacacctgggatcgcgcagggcccgcagggcacaggcgcccgacagccgggctgagcggagtctgggttagccaggcctgcgtggcccatggtggcccttccagtgcatatacatacatatatatatatatatgcatatatatatatatatatatatatatgtgtatacacacacacatagacagacatatatatatatatttattttttttactgagagcttatgacttccagaaagtgctaaaggtgggaggtgggccagggcctggacggggcttttgtctgatgctctgggattctggccagacccaccccagggcacatgtcctgcgggggcgtcccagctgtgttttttgatgtctcctccctggttaagagtagcttggagaggaccctcaggcctctgagggcaccaggccctggagaagaggtgcaattcagggtgtgtgtgtgttttttttcctttaaagaagaaacgctgctaagatcccacgtggctcccacgtgtcggggtgtctgtcctgtcatcctgactgtctcgttattgtgaagtctttcgtagacaccccagagcacacacatccccttagtccaccggttagatgtctctctttagaaaaatcaggggtgagtagctgtgtttccttaggcctggggtaggggatggagagcagctccaaggctgagctggggctctggccccaggtgaggtccccagctcctgagcacttctgagggggtgggttccacccccaggagggcgggggtgggtggagcaggagtggaggcagcctgcagaggaagggtgcgggagactgagccggcagtggcttgcttggaggggctagggtacccgcctggtctcggctggctccagctgccctgcaggtgcccctgggctcaggtagttagttgttcagccactaatgccttttatcccccatatgggcgctgagctgtggctgttcctggacactgtgctgtccccgtcctgagcaactatgcccccgccccagtaggttcaaggcaaagcagctctgaccgaattctaggcaggggtgggggcacctgcctgggccctgggtccagccgcatccccatgcccagcctttcgcgtcacctggaggccacatcttcccaccccacctgccagcccctgtctctcctccccgctgcccctaactgcagctcagctttcactatagcagtgcttcccaaacgggttctagacttgggtgtttgatttgaagagttacgcatttatttcactatttattgggaaaaaaatgcattgaacccgtgatttcacagacattttgcttaggtcaaggctactttttaaaaagggagtgactttcatgaagtcagtttgaagaaggaggttgggagcatgttggtggcagtgatctggagaggctgcaggggccacgagtttgcagatgctgtacttcagcaataaccttgcctttgctaagaccccctccgagggcttcaggggggcctgccaagggggggccttgttcttgttcccaaactctgacttggaagaactcagcttgtggccgggctggtgagggtgtggggtgcgcccttcccttttgggctgagggagagggggccgggaggggttgtcaagcccacccgggaaactgagccctggagaggggaagcagccagcccaggatgcttcagggccctggcagcaaagaagctggggtggtgtggagggccctactccacaccctagagctgtgatgctgagcaaggtgcctgtggcggaaggaactgcccagtcctccctgggggcaggtagacctgtggggatggctcggtccaagcccaacactgcccgctccagagagcctcagccctgcctccctttccacagaggtggttttatgtggaacgaggtaccttgtctggggaagaagtggagctgggcaggcttgactgctcctggctgaccctgagctctcgcagttggagggaagcagacagacttgactttttgcaagtccgcgtgttgctggagggacacgtgtattggagcccagaagaggggctgtgtggcctgggaataccatgtggaaggttgggcttcaagttaacaggatcagacaccagtcaagcagcctcaggtcatcttgcgactccactgagcagcctttcctgttgtcacatgggttcagagcagctgagcagggaacacgtcctaggcaggtctgacgtgaaacctccccttaccctgaaccgtgtgactctgcaagcagacacctcgaggcaggtgttctaggcaaagggatgggcatgagcgaaggctccagggtccacagagcagggagtgtggagaaggtggaagagctgagctcagaggcagagaagctccttgcagggagcactgggagatggcctggcccgtcccaggctcctggaggccccacctgccgatcccaggcacttgaccttgttcctgtgggtgacagagatgagaaccagggaagctgtgatccactggccaggacaagtcaacatgggtgagggttgggcaaagggcccttccttcctccccaaccctgtggtctggggccatggcctcaggcttgtgtctatcacaaaagcacaaacttgccctaacccacatgggcctggctgtggggaaagtggggacccaggtccctgagctgtctgctgggctccgtagagcggtggtgggcaggcaccttggcatctgtgcagagacggcccagtctggccaaatcctcttcctctcccctgctctaccttctccggcaccaggcagccccttaaaggaggacaaagtgtgtaaagcccgtctgctgtcttcccccaaatcctcagctcagagccttccgcttccagggccaaccccagccccgtttgctgcgttgtgtaagggcttggggtcttagaagctgctctttagcccagatacacatactcttttttgtctttgtgcaataatcagtgttcctggcagagcctgggccaagctgcagcctactgaggaggcagaggccacctcctccagaaagccctcggcctgggccgccgccgtgactctagcactctcagtcgctgtacagtttctatggtgtgaatgaacttccctcctagttgctgatggcgctggtacctgctggcccatggcccgggtgtagagaaaccaagcggcagccaccaccagtgttgttttgaataaaagcccagaagcctattt

SEQ ID NO: 4227 - DNA, 6740 bp, Homo sapiens
  source 1..6740: mol_type = unassigned DNA
atggctgagagcgcctccccgccctcctcatctgcagcagccccagccgctgagccaggagtcaccacggagcagcccggaccccggagccccccatcctccccgccaggcctggaggagcctctggatggagctgatcctcatgtcccacacccagacctggcgcctattgccttcttctgcctgcgacagaccaccagcccccggaactggtgcatcaagatggtgtgcaacccgtggtttgaatgtgtcagcatgctggtgatcctgctgaactgcgtgacacttggcatgtaccagccgtgcgacgacatggactgcctgtccgaccgctgcaagatcctgcaggtctttgatgacttcatctttatcttctttgccatggagatggtgctcaagatggtggccctggggatttttggcaagaagtgctacctcggggacacatggaaccgcctggatttcttcatcgtcatggcagggatggtcgagtactccctggaccttcagaacatcaacctgtcagccatccgcaccgtgcgcgtcctgaggcccctcaaagccatcaaccgcgtgcccagtatgcggatcctggtgaacctgctcctggacacactgcccatgctggggaatgtcctgctgctctgcttctttgtcttcttcatctttggcatcataggtgtgcagctctgggcgggcctgctgcgtaaccgctgcttcctggaggagaacttcaccatacaaggggatgtggccttgcccccatactaccagccggaggaggatgatgagatgcccttcatctgctccctgtcgggcgacaatgggataatgggctgccatgagatccccccgctcaaggagcagggccgtgagtgctgcctgtccaaggacgacgtctacgactttggggcggggcgccaggacctcaatgccagcggcctctgtgtcaactggaaccgttactacaatgtgtgccgcacgggcagcgccaacccccacaagggtgccatcaactttgacaacatcggttatgcttggattgtcatcttccaggtgatcactctggaaggctgggtggagatcatgtactacgtgatggatgctcactccttctacaacttcatctacttcatcctgcttatcatagtgggctccttcttcatgatcaacctgtgcctcgttgtcatagcgacccagttctcggagaccaagcaacgggagcaccggctgatgctggagcagcggcagcgctacctgtcctccagcacggtggccagctacgccgagcctggcgactgctacgaggagatcttccagtatgtctgccacatcctgcgcaaggccaagcgccgcgccctgggcctctaccaggccctgcagagccggcgccaggccctgggcccggaggccccggcccccgccaaacctgggccccacgccaaggagccccggcactaccatgggaagactaagggtcagggagatgaagggagacatctcggaagccggcattgccagactttgcatgggcctgcctcccctggaaatgatcactcgggaagagagctgtgcccgcaacatagccccctggatgcgacgccccacaccctggtgcagcccatccccgccacgctggcttccgatcccgccagctgcccttgctgccagcatgaggacggccggcggccctcgggcctgggcagcaccgactcgggccaggagggctcgggctccgggagctccgctggtggcgaggacgaggcggatggggacggggcccggagcagcgaggacggagcctcctcagaactggggaaggaggaggaggaggaggagcaggcggatggggcggtctggctgtgcggggatgtgtggcgggagacgcgagccaagctgcgcggcatcgtggacagcaagtacttcaaccggggcatcatgatggccatcctggtcaacaccgtcagcatgggcatcgagcaccacgagcagccggaggagctgaccaacatcctggagatctgcaatgtggtcttcaccagcatgtttgccctggagatgatcctgaagctggctgcatttgggctcttcgactacctgcgtaacccctacaacatcttcgacagcatcattgtcatcatcagcatctgggagattgtggggcaggcggacggtgggctgtcggtgctgcggaccttccggctgctgcgcgtgctgaaactggtgcgcttcatgcctgccctgcggcgccagctcgtggtgctcatgaagaccatggacaacgtggccaccttctgcatgctgctcatgctcttcatcttcatcttcagcatccttgggatgcatatttttggctgcaagttcagcctccgcacggacactggagacacggtgcccgacaggaagaacttcgactccctgctgtgggccatcgtcactgtgttccagatcctcacccaggaggactggaacgtcgttctctacaatggcatggcctccacttctccctgggcctccctctactttgtcgccctcatgaccttcggcaactatgtgctcttcaacctgctggtggccatcctggtggagggcttccaggcggagggtgacgccaatcgctcctactcggacgaggaccagagctcatccaacatagaagagtttgataagctccaggaaggcctggacagcagcggagatcccaagctctgcccaatccccatgacccccaatgggcacctggaccccagtctcccactgggtgggcacctaggtcctgctggggctgcgggacctgccccccgactctcactgcagccggaccccatgctggtggccctgggctcccgaaagagcagtgtcatgtctctagggaggatgagctatgaccagcgctccctgtccagctcccggagctcctactacgggccatggggccgcagcgcggcctgggccagccgtcgctccagctggaacagcctcaagcacaagccgccgtcggcggagcatgagtccctgctctctgcggagcgcggcggcggcgcccgggtctgcgaggttgccgcggacgaggggccgccgcgggccgcacccctgcacaccccacacgcccaccacattcatcacgggccccatctggcgcaccgccaccgccaccaccgccggacgctgtccctcgacaacagggactcggtggacctggccgagctggtgcccgcggtgggcgcccacccccgggccgcctggagggcggcaggcccggcccccgggcatgaggactgcaatggcaggatgcccagcatcgccaaagacgtcttcaccaagatgggcgaccgcggggatcgcggggaggatgaggaggaaatcgactacaccctgtgcttccgcgtccgcaagatgatcgacgtctataagcccgactggtgcgaggtccgcgaagactggtctgtctacctcttctctcccgagaacaggttccgggtcctgtgtcagaccattattgcccacaaactcttcgactacgtcgtcctggccttcatctttctcaactgcatcaccatcgccctggagcggcctcagatcgaggccggcagcaccgaacgcatctttctcaccgtgtccaactacatcttcacggccatcttcgtgggcgagatgacattgaaggtagtctcgctgggcctgtacttcggcgagcaggcgtacctacgcagcagctggaacgtgctggatggctttcttgtcttcgtgtccatcatcgacatcgtggtgtccctggcctcagccgggggagccaagatcttgggggtcctccgagtcttgcggctcctgcgcaccctacgccccctgcgtgtcatcagccgggcgccgggcctgaagctggtggtggagacactcatctcctccctcaagcccatcggcaacatcgtgctcatctgctgtgccttcttcatcatctttggcatcctgggagtgcagctcttcaagggcaagttctaccactgtctgggcgtggacacccgcaacatcaccaaccgctcggactgcatggccgccaactaccgctgggtccatcacaaatacaacttcgacaacctgggccaggctctgatgtccctctttgtcctggcatccaaggatggttgggtgaacatcatgtacaatggactggatgctgttgctgtggaccagcagcctgtgaccaaccacaacccctggatgctgctgtacttcatctccttcctgctcatcgtcagcttctttgtgctcaacatgtttgtgggtgtcgtggtggagaacttccacaagtgccggcagcaccaggaggctgaagaggcacggcggcgtgaggagaagcggctgcggcgcctggagaagaagcgccggaaggcccagcggctgccctactatgccacctattgtcacacccggctgctcatccactccatgtgcaccagccactacctggacatcttcatcaccttcatcatctgcctcaacgtggtcaccatgtccctggagcactacaatcagcccacgtccctggagacagccctcaagtactgcaactatatgttcaccactgtctttgtgctggaggctgtgctgaagctggtggcatttggtctgaggcgcttcttcaaggaccgatggaaccagctggacctggccattgtgctactgtcagtcatgggcatcaccctggaggagatcgagatcaatgcggccctgcccatcaatcccaccatcatccgcatcatgagggttctgcgcattgcccgagtgctgaagctgttgaagatggccacaggaatgcgggccctgctggacacggtggtgcaagctttgccccaggtgggcaacctgggcctcctcttcatgctgctcttcttcatctatgctgctctcggggtggagctctttgggaagctggtctgcaacgacgagaacccgtgcgagggcatgagccggcatgccaccttcgagaacttcggcatggccttcctcacactcttccaggtctccacgggtgacaactggaacgggatcatgaaggacacgctgcgggactgcacccacgacgagcgcagctgcctgagcagcctgcagtttgtgtcgccgctgtacttcgtgagcttcgtgctcaccgcgcagttcgtgctcatcaacgtggtggtggctgtgctcatgaagcacctggacgacagcaacaaggaggcgcaggaggacgccgagatggatgccgagctcgagctggagatggcccatggcctgggccctggcccgaggctgcctaccggctccccgggcgcccctggccgagggccgggaggggcgggcggcgggggcgacaccgagggcggcttgtgccggcgctgctactcgcctgcccaggagaacctgtggctggacagcgtctctttaatcatcaaggactccttggagggggagctgaccatcatcgacaacctgtcgggctccatcttccaccactactcctcgcctgccggctgcaagaagtgtcaccacgacaagcaagaggtgcagctggctgagacggaggccttctccctgaactcagacaggtcctcgtccatcctgctgggtgacgacctgagtctcgaggaccccacagcctgcccacctggccgcaaagacagcaagggtgagctggacccacctgagcccatgcgtgtgggagacctgggcgaatgcttcttccccttgtcctctacggccgtctcgccggatccagagaacttcctgtgtgagatggaggagatcccattcaaccctgtccggtcctggctgaaacatgacagcagtcaagcacccccaagtcccttctccccggatgcctccagccctctcctgcccatgccagccgagttcttccaccctgcagtgtctgccagccagaaaggcccagaaaagggcactggcactggaaccctccccaagattgcgctgcagggctcctgggcatctctgcggtcaccaagggtcaactgtaccctcctccggcaggtaccgacacctcccaggccctagagcactggtctgtgggcaaggggcaggatctaagccaggcctggaagtccaagggactgggaggggaaggacccaaccaaaggccgagggcaccaccgtgcaagggggtttgggaacgctggggtgacgctgagactggagggggaggtggcactggggcggatggagtgggcggggctgggtcctggggacagcagagtgtggggaggaccccaaggcgggtctggaagaggcctgtgatccctagcttgaggggaggggaggagaggaggaggagtactggaggttttgcagggtggcggggtgctggcagtggggaggacaccctgggtgctctgggtgggtgtgagtgggggcttgattactaggaatggaggtgggagggcgggtctggtggatgagaagcctcgggctgcagggtcccccgtactggattggccagggccacagccctcctacccacgggcacacagaggtctgaagcactgagggctccgctgtgggggtggggaaatggggccgggccggctcccacagtgagtgcagttgattcactgggtgactgtctgacccgtcacaccaggctgtgtgctctggcgggcaggacacaaactccctgcctgccgggctcactgtttagtgctgagagtgagctgcctgggtgcaggagggatgataaccaaaataaa

SEQ ID NO: 4228 - DNA, 10004 bp, Homo sapiens
  source 1..10004: mol_type = unassigned DNA
atggctgagagcgcctccccgccctcctcatctgcagcagccccagccgctgagccaggagtcaccacggagcagcccggaccccggagccccccatcctccccgccaggcctggaggagcctctggatggagctgatcctcatgtcccacacccagacctggcgcctattgccttcttctgcctgcgacagaccaccagcccccggaactggtgcatcaagatggtgtgcaacccgtggtttgaatgtgtcagcatgctggtgatcctgctgaactgcgtgacacttggcatgtaccagccgtgcgacgacatggactgcctgtccgaccgctgcaagatcctgcaggtctttgatgacttcatctttatcttctttgccatggagatggtgctcaagatggtggccctggggatttttggcaagaagtgctacctcggggacacatggaaccgcctggatttcttcatcgtcatggcagggatggtcgagtactccctggaccttcagaacatcaacctgtcagccatccgcaccgtgcgcgtcctgaggcccctcaaagccatcaaccgcgtgcccagtatgcggatcctggtgaacctgctcctggacacactgcccatgctggggaatgtcctgctgctctgcttctttgtcttcttcatctttggcatcataggtgtgcagctctgggcgggcctgctgcgtaaccgctgcttcctggaggagaacttcaccatacaaggggatgtggccttgcccccatactaccagccggaggaggatgatgagatgcccttcatctgctccctgtcgggcgacaatgggataatgggctgccatgagatccccccgctcaaggagcagggccgtgagtgctgcctgtccaaggacgacgtctacgactttggggcggggcgccaggacctcaatgccagcggcctctgtgtcaactggaaccgttactacaatgtgtgccgcacgggcagcgccaacccccacaagggtgccatcaactttgacaacatcggttatgcttggattgtcatcttccaggtgatcactctggaaggctgggtggagatcatgtactacgtgatggatgctcactccttctacaacttcatctacttcatcctgcttatcatagtgggctccttcttcatgatcaacctgtgcctcgttgtcatagcgacccagttctcggagaccaagcaacgggagcaccggctgatgctggagcagcggcagcgctacctgtcctccagcacggtggccagctacgccgagcctggcgactgctacgaggagatcttccagtatgtctgccacatcctgcgcaaggccaagcgccgcgccctgggcctctaccaggccctgcagagccggcgccaggccctgggcccggaggccccggcccccgccaaacctgggccccacgccaaggagccccggcactaccatgggaagactaagggtcagggagatgaagggagacatctcggaagccggcattgccagactttgcatgggcctgcctcccctggaaatgatcactcgggaagagagctgtgcccgcaacatagccccctggatgcgacgccccacaccctggtgcagcccatccccgccacgctggcttccgatcccgccagctgcccttgctgccagcatgaggacggccggcggccctcgggcctgggcagcaccgactcgggccaggagggctcgggctccgggagctccgctggtggcgaggacgaggcggatggggacggggcccggagcagcgaggacggagcctcctcagaactggggaaggaggaggaggaggaggagcaggcggatggggcggtctggctgtgcggggatgtgtggcgggagacgcgagccaagctgcgcggcatcgtggacagcaagtacttcaaccggggcatcatgatggccatcctggtcaacaccgtcagcatgggcatcgagcaccacgagcagccggaggagctgaccaacatcctggagatctgcaatgtggtcttcaccagcatgtttgccctggagatgatcctgaagctggctgcatttgggctcttcgactacctgcgtaacccctacaacatcttcgacagcatcattgtcatcatcagcatctgggagattgtggggcaggcggacggtgggctgtcggtgctgcggaccttccggctgctgcgcgtgctgaaactggtgcgcttcatgcctgccctgcggcgccagctcgtggtgctcatgaagaccatggacaacgtggccaccttctgcatgctgctcatgctcttcatcttcatcttcagcatccttgggatgcatatttttggctgcaagttcagcctccgcacggacactggagacacggtgcccgacaggaagaacttcgactccctgctgtgggccatcgtcactgtgttccagatcctcacccaggaggactggaacgtcgttctctacaatggcatggcctccacttctccctgggcctccctctactttgtcgccctcatgaccttcggcaactatgtgctcttcaacctgctggtggccatcctggtggagggcttccaggcggagggtgacgccaatcgctcctactcggacgaggaccagagctcatccaacatagaagagtttgataagctccaggaaggcctggacagcagcggagatcccaagctctgcccaatccccatgacccccaatgggcacctggaccccagtctcccactgggtgggcacctaggtcctgctggggctgcgggacctgccccccgactctcactgcagccggaccccatgctggtggccctgggctcccgaaagagcagtgtcatgtctctagggaggatgagctatgaccagcgctccctgtccagctcccggagctcctactacgggccatggggccgcagcgcggcctgggccagccgtcgctccagctggaacagcctcaagcacaagccgccgtcggcggagcatgagtccctgctctctgcggagcgcggcggcggcgcccgggtctgcgaggttgccgcggacgaggggccgccgcgggccgcacccctgcacaccccacacgcccaccacattcatcacgggccccatctggcgcaccgccaccgccaccaccgccggacgctgtccctcgacaacagggactcggtggacctggccgagctggtgcccgcggtgggcgcccacccccgggccgcctggagggcggcaggcccggcccccgggcatgaggactgcaatggcaggatgcccagcatcgccaaagacgtcttcaccaagatgggcgaccgcggggatcgcggggaggatgaggaggaaatcgactacaccctgtgcttccgcgtccgcaagatgatcgacgtctataagcccgactggtgcgaggtccgcgaagactggtctgtctacctcttctctcccgagaacaggttccgggtcctgtgtcagaccattattgcccacaaactcttcgactacgtcgtcctggccttcatctttctcaactgcatcaccatcgccctggagcggcctcagatcgaggccggcagcaccgaacgcatctttctcaccgtgtccaactacatcttcacggccatcttcgtgggcgagatgacattgaaggtagtctcgctgggcctgtacttcggcgagcaggcgtacctacgcagcagctggaacgtgctggatggctttcttgtcttcgtgtccatcatcgacatcgtggtgtccctggcctcagccgggggagccaagatcttgggggtcctccgagtcttgcggctcctgcgcaccctacgccccctgcgtgtcatcagccgggcgccgggcctgaagctggtggtggagacactcatctcctccctcaagcccatcggcaacatcgtgctcatctgctgtgccttcttcatcatctttggcatcctgggagtgcagctcttcaagggcaagttctaccactgtctgggcgtggacacccgcaacatcaccaaccgctcggactgcatggccgccaactaccgctgggtccatcacaaatacaacttcgacaacctgggccaggctctgatgtccctctttgtcctggcatccaaggatggttgggtgaacatcatgtacaatggactggatgctgttgctgtggaccagcagcctgtgaccaaccacaacccctggatgctgctgtacttcatctccttcctgctcatcgtcagcttctttgtgctcaacatgtttgtgggtgtcgtggtggagaacttccacaagtgccggcagcaccaggaggctgaagaggcacggcggcgtgaggagaagcggctgcggcgcctggagaagaagcgccggaaggcccagcggctgccctactatgccacctattgtcacacccggctgctcatccactccatgtgcaccagccactacctggacatcttcatcaccttcatcatctgcctcaacgtggtcaccatgtccctggagcactacaatcagcccacgtccctggagacagccctcaagtactgcaactatatgttcaccactgtctttgtgctggaggctgtgctgaagctggtggcatttggtctgaggcgcttcttcaaggaccgatggaaccagctggacctggccattgtgctactgtcagtcatgggcatcaccctggaggagatcgagatcaatgcggccctgcccatcaatcccaccatcatccgcatcatgagggttctgcgcattgcccgagtgctgaagctgttgaagatggccacaggaatgcgggccctgctggacacggtggtgcaagctttgccccaggtgggcaacctgggcctcctcttcatgctgctcttcttcatctatgctgctctcggggtggagctctttgggaagctggtctgcaacgacgagaacccgtgcgagggcatgagccggcatgccaccttcgagaacttcggcatggccttcctcacactcttccaggtctccacgggtgacaactggaacgggatcatgaaggacacgctgcgggactgcacccacgacgagcgcagctgcctgagcagcctgcagtttgtgtcgccgctgtacttcgtgagcttcgtgctcaccgcgcagttcgtgctcatcaacgtggtggtggctgtgctcatgaagcacctggacgacagcaacaaggaggcgcaggaggacgccgagatggatgccgagctcgagctggagatggcccatggcctgggccctggcccgaggctgcctaccggctccccgggcgcccctggccgagggccgggaggggcgggcggcgggggcgacaccgagggcggcttgtgccggcgctgctactcgcctgcccaggagaacctgtggctggacagcgtctctttaatcatcaaggactccttggagggggagctgaccatcatcgacaacctgtcgggctccatcttccaccactactcctcgcctgccggctgcaagaagtgtcaccacgacaagcaagaggtgcagctggctgagacggaggccttctccctgaactcagacaggtcctcgtccatcctgctgggtgacgacctgagtctcgaggaccccacagcctgcccacctggccgcaaagacagcaagggtgagctggacccacctgagcccatgcgtgtgggagacctgggcgaatgcttcttccccttgtcctctacggccgtctcgccggatccagagaacttcctgtgtgagatggaggagatcccattcaaccctgtccggtcctggctgaaacatgacagcagtcaagcacccccaagtcccttctccccggatgcctccagccctctcctgcccatgccagccgagttcttccaccctgcagtgtctgccagccagaaaggcccagaaaagggcactggcactggaaccctccccaagattgcgctgcagggctcctgggcatctctgcggtcaccaagggtcaactgtaccctcctccggcaggccaccgggagcgacacgtcgctggacgccagccccagcagctccgcgggcagcctgcagaccacgctcgaggacagcctgaccctgagcgacagcccccggcgtgccctggggccgcccgcgcctgctccaggaccccgggccggcctgtcccccgccgctcgccgccgcctgagcctgcgcggccggggcctcttcagcctgcgggggctgcgggcgcatcagcgcagccacagcagcgggggctccaccagcccgggctgcacccaccacgactccatggacccctcggacgaggagggccgcggtggcgcgggcggcgggggcgcgggcagcgagcactcggagaccctcagcagcctctcgctcacctccctcttctgcccgccgcccccgccgccagcccccggcctcacgcccgccaggaagttcagcagcaccagcagcctggccgcccccggccgcccccacgccgccgccctggcccacggcctggcccggagcccctcgtgggccgcggaccgcagcaaggacccccccggccgggcaccgctgcccatgggcctgggccccttggcgcccccgccgcaaccgctccccggagagctggagccgggagacgccgccagcaagaggaagagatgagggtcgcaggggcccccggccgcccaccgcccgccccgtctcaccttctttacctcaggagccaggagcagacagcaatacttcgtccacacctgggatcgcgcagggcccgcagggcacaggcgcccgacagccgggctgagcggagtctgggttagccaggcctgcgtggcccatggtggcccttccagtgcatatacatacatatatatatatatatgcatatatatatatatatatatatatatgtgtatacacacacacatagacagacatatatatatatatttattttttttactgagagcttatgacttccagaaagtgctaaaggtgggaggtgggccagggcctggacggggcttttgtctgatgctctgggattctggccagacccaccccagggcacatgtcctgcgggggcgtcccagctgtgttttttgatgtctcctccctggttaagagtagcttggagaggaccctcaggcctctgagggcaccaggccctggagaagaggtgcaattcagggtgtgtgtgtgttttttttcctttaaagaagaaacgctgctaagatcccacgtggctcccacgtgtcggggtgtctgtcctgtcatcctgactgtctcgttattgtgaagtctttcgtagacaccccagagcacacacatccccttagtccaccggttagatgtctctctttagaaaaatcaggggtgagtagctgtgtttccttaggcctggggtaggggatggagagcagctccaaggctgagctggggctctggccccaggtgaggtccccagctcctgagcacttctgagggggtgggttccacccccaggagggcgggggtgggtggagcaggagtggaggcagcctgcagaggaagggtgcgggagactgagccggcagtggcttgcttggaggggctagggtacccgcctggtctcggctggctccagctgccctgcaggtgcccctgggctcaggtagttagttgttcagccactaatgccttttatcccccatatgggcgctgagctgtggctgttcctggacactgtgctgtccccgtcctgagcaactatgcccccgccccagtaggttcaaggcaaagcagctctgaccgaattctaggcaggggtgggggcacctgcctgggccctgggtccagccgcatccccatgcccagcctttcgcgtcacctggaggccacatcttcccaccccacctgccagcccctgtctctcctccccgctgcccctaactgcagctcagctttcactatagcagtgcttcccaaacgggttctagacttgggtgtttgatttgaagagttacgcatttatttcactatttattgggaaaaaaatgcattgaacccgtgatttcacagacattttgcttaggtcaaggctactttttaaaaagggagtgactttcatgaagtcagtttgaagaaggaggttgggagcatgttggtggcagtgatctggagaggctgcaggggccacgagtttgcagatgctgtacttcagcaataaccttgcctttgctaagaccccctccgagggcttcaggggggcctgccaagggggggccttgttcttgttcccaaactctgacttggaagaactcagcttgtggccgggctggtgagggtgtggggtgcgcccttcccttttgggctgagggagagggggccgggaggggttgtcaagcccacccgggaaactgagccctggagaggggaagcagccagcccaggatgcttcagggccctggcagcaaagaagctggggtggtgtggagggccctactccacaccctagagctgtgatgctgagcaaggtgcctgtggcggaaggaactgcccagtcctccctgggggcaggtagacctgtggggatggctcggtccaagcccaacactgcccgctccagagagcctcagccctgcctccctttccacagaggtggttttatgtggaacgaggtaccttgtctggggaagaagtggagctgggcaggcttgactgctcctggctgaccctgagctctcgcagttggagggaagcagacagacttgactttttgcaagtccgcgtgttgctggagggacacgtgtattggagcccagaagaggggctgtgtggcctgggaataccatgtggaaggttgggcttcaagttaacaggatcagacaccagtcaagcagcctcaggtcatcttgcgactccactgagcagcctttcctgttgtcacatgggttcagagcagctgagcagggaacacgtcctaggcaggtctgacgtgaaacctccccttaccctgaaccgtgtgactctgcaagcagacacctcgaggcaggtgttctaggcaaagggatgggcatgagcgaaggctccagggtccacagagcagggagtgtggagaaggtggaagagctgagctcagaggcagagaagctccttgcagggagcactgggagatggcctggcccgtcccaggctcctggaggccccacctgccgatcccaggcacttgaccttgttcctgtgggtgacagagatgagaaccagggaagctgtgatccactggccaggacaagtcaacatgggtgagggttgggcaaagggcccttccttcctccccaaccctgtggtctggggccatggcctcaggcttgtgtctatcacaaaagcacaaacttgccctaacccacatgggcctggctgtggggaaagtggggacccaggtccctgagctgtctgctgggctccgtagagcggtggtgggcaggcaccttggcatctgtgcagagacggcccagtctggccaaatcctcttcctctcccctgctctaccttctccggcaccaggcagccccttaaaggaggacaaagtgtgtaaagcccgtctgctgtcttcccccaaatcctcagctcagagccttccgcttccagggccaaccccagccccgtttgctgcgttgtgtaagggcttggggtcttagaagctgctctttagcccagatacacatactcttttttgtctttgtgcaataatcagtgttcctggcagagcctgggccaagctgcagcctactgaggaggcagaggccacctcctccagaaagccctcggcctgggccgccgccgtgactctagcactctcagtcgctgtacagtttctatggtgtgaatgaacttccctcctagttgctgatggcgctggtacctgctggcccatggcccgggtgtagagaaaccaagcggcagccaccaccagtgttgttttgaataaaagcccagaagcctatttaagaatt

SEQ ID NO: 4229 - DNA, 9892 bp, Homo sapiens
  source 1..9892: mol_type = unassigned DNA
atggctgagagcgcctccccgccctcctcatctgcagcagccccagccgctgagccaggagtcaccacggagcagcccggaccccggagccccccatcctccccgccaggcctggaggagcctctggatggagctgatcctcatgtcccacacccagacctggcgcctattgccttcttctgcctgcgacagaccaccagcccccggaactggtgcatcaagatggtgtgcaacccgtggtttgaatgtgtcagcatgctggtgatcctgctgaactgcgtgacacttggcatgtaccagccgtgcgacgacatggactgcctgtccgaccgctgcaagatcctgcaggtctttgatgacttcatctttatcttctttgccatggagatggtgctcaagatggtggccctggggatttttggcaagaagtgctacctcggggacacatggaaccgcctggatttcttcatcgtcatggcagggatggtcgagtactccctggaccttcagaacatcaacctgtcagccatccgcaccgtgcgcgtcctgaggcccctcaaagccatcaaccgcgtgcccagtatgcggatcctggtgaacctgctcctggacacactgcccatgctggggaatgtcctgctgctctgcttctttgtcttcttcatctttggcatcataggtgtgcagctctgggcgggcctgctgcgtaaccgctgcttcctggaggagaacttcaccatacaaggggatgtggccttgcccccatactaccagccggaggaggatgatgagatgcccttcatctgctccctgtcgggcgacaatgggataatgggctgccatgagatccccccgctcaaggagcagggccgtgagtgctgcctgtccaaggacgacgtctacgactttggggcggggcgccaggacctcaatgccagcggcctctgtgtcaactggaaccgttactacaatgtgtgccgcacgggcagcgccaacccccacaagggtgccatcaactttgacaacatcggttatgcttggattgtcatcttccaggtgatcactctggaaggctgggtggagatcatgtactacgtgatggatgctcactccttctacaacttcatctacttcatcctgcttatcatagtgggctccttcttcatgatcaacctgtgcctcgttgtcatagcgacccagttctcggagaccaagcaacgggagcaccggctgatgctggagcagcggcagcgctacctgtcctccagcacggtggccagctacgccgagcctggcgactgctacgaggagatcttccagtatgtctgccacatcctgcgcaaggccaagcgccgcgccctgggcctctaccaggccctgcagagccggcgccaggccctgggcccggaggccccggcccccgccaaacctgggccccacgccaaggagccccggcactaccagctgtgcccgcaacatagccccctggatgcgacgccccacaccctggtgcagcccatccccgccacgctggcttccgatcccgccagctgcccttgctgccagcatgaggacggccggcggccctcgggcctgggcagcaccgactcgggccaggagggctcgggctccgggagctccgctggtggcgaggacgaggcggatggggacggggcccggagcagcgaggacggagcctcctcagaactggggaaggaggaggaggaggaggagcaggcggatggggcggtctggctgtgcggggatgtgtggcgggagacgcgagccaagctgcgcggcatcgtggacagcaagtacttcaaccggggcatcatgatggccatcctggtcaacaccgtcagcatgggcatcgagcaccacgagcagccggaggagctgaccaacatcctggagatctgcaatgtggtcttcaccagcatgtttgccctggagatgatcctgaagctggctgcatttgggctcttcgactacctgcgtaacccctacaacatcttcgacagcatcattgtcatcatcagcatctgggagattgtggggcaggcggacggtgggctgtcggtgctgcggaccttccggctgctgcgcgtgctgaaactggtgcgcttcatgcctgccctgcggcgccagctcgtggtgctcatgaagaccatggacaacgtggccaccttctgcatgctgctcatgctcttcatcttcatcttcagcatccttgggatgcatatttttggctgcaagttcagcctccgcacggacactggagacacggtgcccgacaggaagaacttcgactccctgctgtgggccatcgtcactgtgttccagatcctcacccaggaggactggaacgtcgttctctacaatggcatggcctccacttctccctgggcctccctctactttgtcgccctcatgaccttcggcaactatgtgctcttcaacctgctggtggccatcctggtggagggcttccaggcggagggtgacgccaatcgctcctactcggacgaggaccagagctcatccaacatagaagagtttgataagctccaggaaggcctggacagcagcggagatcccaagctctgcccaatccccatgacccccaatgggcacctggaccccagtctcccactgggtgggcacctaggtcctgctggggctgcgggacctgccccccgactctcactgcagccggaccccatgctggtggccctgggctcccgaaagagcagtgtcatgtctctagggaggatgagctatgaccagcgctccctgtccagctcccggagctcctactacgggccatggggccgcagcgcggcctgggccagccgtcgctccagctggaacagcctcaagcacaagccgccgtcggcggagcatgagtccctgctctctgcggagcgcggcggcggcgcccgggtctgcgaggttgccgcggacgaggggccgccgcgggccgcacccctgcacaccccacacgcccaccacattcatcacgggccccatctggcgcaccgccaccgccaccaccgccggacgctgtccctcgacaacagggactcggtggacctggccgagctggtgcccgcggtgggcgcccacccccgggccgcctggagggcggcaggcccggcccccgggcatgaggactgcaatggcaggatgcccagcatcgccaaagacgtcttcaccaagatgggcgaccgcggggatcgcggggaggatgaggaggaaatcgactacaccctgtgcttccgcgtccgcaagatgatcgacgtctataagcccgactggtgcgaggtccgcgaagactggtctgtctacctcttctctcccgagaacaggttccgggtcctgtgtcagaccattattgcccacaaactcttcgactacgtcgtcctggccttcatctttctcaactgcatcaccatcgccctggagcggcctcagatcgaggccggcagcaccgaacgcatctttctcaccgtgtccaactacatcttcacggccatcttcgtgggcgagatgacattgaaggtagtctcgctgggcctgtacttcggcgagcaggcgtacctacgcagcagctggaacgtgctggatggctttcttgtcttcgtgtccatcatcgacatcgtggtgtccctggcctcagccgggggagccaagatcttgggggtcctccgagtcttgcggctcctgcgcaccctacgccccctgcgtgtcatcagccgggcgccgggcctgaagctggtggtggagacactcatctcctccctcaagcccatcggcaacatcgtgctcatctgctgtgccttcttcatcatctttggcatcctgggagtgcagctcttcaagggcaagttctaccactgtctgggcgtggacacccgcaacatcaccaaccgctcggactgcatggccgccaactaccgctgggtccatcacaaatacaacttcgacaacctgggccaggctctgatgtccctctttgtcctggcatccaaggatggttgggtgaacatcatgtacaatggactggatgctgttgctgtggaccagcagcctgtgaccaaccacaacccctggatgctgctgtacttcatctccttcctgctcatcgtcagcttctttgtgctcaacatgtttgtgggtgtcgtggtggagaacttccacaagtgccggcagcaccaggaggctgaagaggcacggcggcgtgaggagaagcggctgcggcgcctggagaagaagcgccggaaggcccagcggctgccctactatgccacctattgtcacacccggctgctcatccactccatgtgcaccagccactacctggacatcttcatcaccttcatcatctgcctcaacgtggtcaccatgtccctggagcactacaatcagcccacgtccctggagacagccctcaagtactgcaactatatgttcaccactgtctttgtgctggaggctgtgctgaagctggtggcatttggtctgaggcgcttcttcaaggaccgatggaaccagctggacctggccattgtgctactgtcagtcatgggcatcaccctggaggagatcgagatcaatgcggccctgcccatcaatcccaccatcatccgcatcatgagggttctgcgcattgcccgagtgctgaagctgttgaagatggccacaggaatgcgggccctgctggacacggtggtgcaagctttgccccaggtgggcaacctgggcctcctcttcatgctgctcttcttcatctatgctgctctcggggtggagctctttgggaagctggtctgcaacgacgagaacccgtgcgagggcatgagccggcatgccaccttcgagaacttcggcatggccttcctcacactcttccaggtctccacgggtgacaactggaacgggatcatgaaggacacgctgcgggactgcacccacgacgagcgcagctgcctgagcagcctgcagtttgtgtcgccgctgtacttcgtgagcttcgtgctcaccgcgcagttcgtgctcatcaacgtggtggtggctgtgctcatgaagcacctggacgacagcaacaaggaggcgcaggaggacgccgagatggatgccgagctcgagctggagatggcccatggcctgggccctggcccgaggctgcctaccggctccccgggcgcccctggccgagggccgggaggggcgggcggcgggggcgacaccgagggcggcttgtgccggcgctgctactcgcctgcccaggagaacctgtggctggacagcgtctctttaatcatcaaggactccttggagggggagctgaccatcatcgacaacctgtcgggctccatcttccaccactactcctcgcctgccggctgcaagaagtgtcaccacgacaagcaagaggtgcagctggctgagacggaggccttctccctgaactcagacaggtcctcgtccatcctgctgggtgacgacctgagtctcgaggaccccacagcctgcccacctggccgcaaagacagcaagggtgagctggacccacctgagcccatgcgtgtgggagacctgggcgaatgcttcttccccttgtcctctacggccgtctcgccggatccagagaacttcctgtgtgagatggaggagatcccattcaaccctgtccggtcctggctgaaacatgacagcagtcaagcacccccaagtcccttctccccggatgcctccagccctctcctgcccatgccagccgagttcttccaccctgcagtgtctgccagccagaaaggcccagaaaagggcactggcactggaaccctccccaagattgcgctgcagggctcctgggcatctctgcggtcaccaagggtcaactgtaccctcctccggcaggccaccgggagcgacacgtcgctggacgccagccccagcagctccgcgggcagcctgcagaccacgctcgaggacagcctgaccctgagcgacagcccccggcgtgccctggggccgcccgcgcctgctccaggaccccgggccggcctgtcccccgccgctcgccgccgcctgagcctgcgcggccggggcctcttcagcctgcgggggctgcgggcgcatcagcgcagccacagcagcgggggctccaccagcccgggctgcacccaccacgactccatggacccctcggacgaggagggccgcggtggcgcgggcggcgggggcgcgggcagcgagcactcggagaccctcagcagcctctcgctcacctccctcttctgcccgccgcccccgccgccagcccccggcctcacgcccgccaggaagttcagcagcaccagcagcctggccgcccccggccgcccccacgccgccgccctggcccacggcctggcccggagcccctcgtgggccgcggaccgcagcaaggacccccccggccgggcaccgctgcccatgggcctgggccccttggcgcccccgccgcaaccgctccccggagagctggagccgggagacgccgccagcaagaggaagagatgagggtcgcaggggcccccggccgcccaccgcccgccccgtctcaccttctttacctcaggagccaggagcagacagcaatacttcgtccacacctgggatcgcgcagggcccgcagggcacaggcgcccgacagccgggctgagcggagtctgggttagccaggcctgcgtggcccatggtggcccttccagtgcatatacatacatatatatatatatatgcatatatatatatatatatatatatatgtgtatacacacacacatagacagacatatatatatatatttattttttttactgagagcttatgacttccagaaagtgctaaaggtgggaggtgggccagggcctggacggggcttttgtctgatgctctgggattctggccagacccaccccagggcacatgtcctgcgggggcgtcccagctgtgttttttgatgtctcctccctggttaagagtagcttggagaggaccctcaggcctctgagggcaccaggccctggagaagaggtgcaattcagggtgtgtgtgtgttttttttcctttaaagaagaaacgctgctaagatcccacgtggctcccacgtgtcggggtgtctgtcctgtcatcctgactgtctcgttattgtgaagtctttcgtagacaccccagagcacacacatccccttagtccaccggttagatgtctctctttagaaaaatcaggggtgagtagctgtgtttccttaggcctggggtaggggatggagagcagctccaaggctgagctggggctctggccccaggtgaggtccccagctcctgagcacttctgagggggtgggttccacccccaggagggcgggggtgggtggagcaggagtggaggcagcctgcagaggaagggtgcgggagactgagccggcagtggcttgcttggaggggctagggtacccgcctggtctcggctggctccagctgccctgcaggtgcccctgggctcaggtagttagttgttcagccactaatgccttttatcccccatatgggcgctgagctgtggctgttcctggacactgtgctgtccccgtcctgagcaactatgcccccgccccagtaggttcaaggcaaagcagctctgaccgaattctaggcaggggtgggggcacctgcctgggccctgggtccagccgcatccccatgcccagcctttcgcgtcacctggaggccacatcttcccaccccacctgccagcccctgtctctcctccccgctgcccctaactgcagctcagctttcactatagcagtgcttcccaaacgggttctagacttgggtgtttgatttgaagagttacgcatttatttcactatttattgggaaaaaaatgcattgaacccgtgatttcacagacattttgcttaggtcaaggctactttttaaaaagggagtgactttcatgaagtcagtttgaagaaggaggttgggagcatgttggtggcagtgatctggagaggctgcaggggccacgagtttgcagatgctgtacttcagcaataaccttgcctttgctaagaccccctccgagggcttcaggggggcctgccaagggggggccttgttcttgttcccaaactctgacttggaagaactcagcttgtggccgggctggtgagggtgtggggtgcgcccttcccttttgggctgagggagagggggccgggaggggttgtcaagcccacccgggaaactgagccctggagaggggaagcagccagcccaggatgcttcagggccctggcagcaaagaagctggggtggtgtggagggccctactccacaccctagagctgtgatgctgagcaaggtgcctgtggcggaaggaactgcccagtcctccctgggggcaggtagacctgtggggatggctcggtccaagcccaacactgcccgctccagagagcctcagccctgcctccctttccacagaggtggttttatgtggaacgaggtaccttgtctggggaagaagtggagctgggcaggcttgactgctcctggctgaccctgagctctcgcagttggagggaagcagacagacttgactttttgcaagtccgcgtgttgctggagggacacgtgtattggagcccagaagaggggctgtgtggcctgggaataccatgtggaaggttgggcttcaagttaacaggatcagacaccagtcaagcagcctcaggtcatcttgcgactccactgagcagcctttcctgttgtcacatgggttcagagcagctgagcagggaacacgtcctaggcaggtctgacgtgaaacctccccttaccctgaaccgtgtgactctgcaagcagacacctcgaggcaggtgttctaggcaaagggatgggcatgagcgaaggctccagggtccacagagcagggagtgtggagaaggtggaagagctgagctcagaggcagagaagctccttgcagggagcactgggagatggcctggcccgtcccaggctcctggaggccccacctgccgatcccaggcacttgaccttgttcctgtgggtgacagagatgagaaccagggaagctgtgatccactggccaggacaagtcaacatgggtgagggttgggcaaagggcccttccttcctccccaaccctgtggtctggggccatggcctcaggcttgtgtctatcacaaaagcacaaacttgccctaacccacatgggcctggctgtggggaaagtggggacccaggtccctgagctgtctgctgggctccgtagagcggtggtgggcaggcaccttggcatctgtgcagagacggcccagtctggccaaatcctcttcctctcccctgctctaccttctccggcaccaggcagccccttaaaggaggacaaagtgtgtaaagcccgtctgctgtcttcccccaaatcctcagctcagagccttccgcttccagggccaaccccagccccgtttgctgcgttgtgtaagggcttggggtcttagaagctgctctttagcccagatacacatactcttttttgtctttgtgcaataatcagtgttcctggcagagcctgggccaagctgcagcctactgaggaggcagaggccacctcctccagaaagccctcggcctgggccgccgccgtgactctagcactctcagtcgctgtacagtttctatggtgtgaatgaacttccctcctagttgctgatggcgctggtacctgctggcccatggcccgggtgtagagaaaccaagcggcagccaccaccagtgttgttttgaataaaagcccagaagcctattt

SEQ ID NO: 4230 - DNA, 5952 bp, Homo sapiens
  source 1..5952: mol_type = unassigned DNA
atggctgagagcgcctccccgccctcctcatctgcagcagccccagccgctgagccaggagtcaccacggagcagcccggaccccggagccccccatcctccccgccaggcctggaggagcctctggatggagctgatcctcatgtcccacacccagacctggcgcctattgccttcttctgcctgcgacagaccaccagcccccggaactggtgcatcaagatggtgtgcaacccgtggtttgaatgtgtcagcatgctggtgatcctgctgaactgcgtgacacttggcatgtaccagccgtgcgacgacatggactgcctgtccgaccgctgcaagatcctgcaggtctttgatgacttcatctttatcttctttgccatggagatggtgctcaagatggtggccctggggatttttggcaagaagtgctacctcggggacacatggaaccgcctggatttcttcatcgtcatggcagggatggtcgagtactccctggaccttcagaacatcaacctgtcagccatccgcaccgtgcgcgtcctgaggcccctcaaagccatcaaccgcgtgcccagtatgcggatcctggtgaacctgctcctggacacactgcccatgctggggaatgtcctgctgctctgcttctttgtcttcttcatctttggcatcataggtgtgcagctctgggcgggcctgctgcgtaaccgctgcttcctggaggagaacttcaccatacaaggggatgtggccttgcccccatactaccagccggaggaggatgatgagatgcccttcatctgctccctgtcgggcgacaatgggataatgggctgccatgagatccccccgctcaaggagcagggccgtgagtgctgcctgtccaaggacgacgtctacgactttggggcggggcgccaggacctcaatgccagcggcctctgtgtcaactggaaccgttactacaatgtgtgccgcacgggcagcgccaacccccacaagggtgccatcaactttgacaacatcggttatgcttggattgtcatcttccaggtgatcactctggaaggctgggtggagatcatgtactacgtgatggatgctcactccttctacaacttcatctacttcatcctgcttatcatagtgggctccttcttcatgatcaacctgtgcctcgttgtcatagcgacccagttctcggagaccaagcaacgggagcaccggctgatgctggagcagcggcagcgctacctgtcctccagcacggtggccagctacgccgagcctggcgactgctacgaggagatcttccagtatgtctgccacatcctgcgcaaggccaagcgccgcgccctgggcctctaccaggccctgcagagccggcgccaggccctgggcccggaggccccggcccccgccaaacctgggccccacgccaaggagccccggcactaccagctgtgcccgcaacatagccccctggatgcgacgccccacaccctggtgcagcccatccccgccacgctggcttccgatcccgccagctgcccttgctgccagcatgaggacggccggcggccctcgggcctgggcagcaccgactcgggccaggagggctcgggctccgggagctccgctggtggcgaggacgaggcggatggggacggggcccggagcagcgaggacggagcctcctcagaactggggaaggaggaggaggaggaggagcaggcggatggggcggtctggctgtgcggggatgtgtggcgggagacgcgagccaagctgcgcggcatcgtggacagcaagtacttcaaccggggcatcatgatggccatcctggtcaacaccgtcagcatgggcatcgagcaccacgagcagccggaggagctgaccaacatcctggagatctgcaatgtggtcttcaccagcatgtttgccctggagatgatcctgaagctggctgcatttgggctcttcgactacctgcgtaacccctacaacatcttcgacagcatcattgtcatcatcagcatctgggagattgtggggcaggcggacggtgggctgtcggtgctgcggaccttccggctgctgcgcgtgctgaaactggtgcgcttcatgcctgccctgcggcgccagctcgtggtgctcatgaagaccatggacaacgtggccaccttctgcatgctgctcatgctcttcatcttcatcttcagcatccttgggatgcatatttttggctgcaagttcagcctccgcacggacactggagacacggtgcccgacaggaagaacttcgactccctgctgtgggccatcgtcactgtgttccagatcctcacccaggaggactggaacgtcgttctctacaatggcatggcctccacttctccctgggcctccctctactttgtcgccctcatgaccttcggcaactatgtgctcttcaacctgctggtggccatcctggtggagggcttccaggcggagggtgacgccaatcgctcctactcggacgaggaccagagctcatccaacatagaagagtttgataagctccaggaaggcctggacagcagcggagatcccaagctctgcccaatccccatgacccccaatgggcacctggaccccagtctcccactgggtgggcacctaggtcctgctggggctgcgggacctgccccccgactctcactgcagccggaccccatgctggtggccctgggctcccgaaagagcagtgtcatgtctctagggaggatgagctatgaccagcgctccctgtccagctcccggagctcctactacgggccatggggccgcagcgcggcctgggccagccgtcgctccagctggaacagcctcaagcacaagccgccgtcggcggagcatgagtccctgctctctgcggagcgcggcggcggcgcccgggtctgcgaggttgccgcggacgaggggccgccgcgggccgcacccctgcacaccccacacgcccaccacattcatcacgggccccatctggcgcaccgccaccgccaccaccgccggacgctgtccctcgacaacagggactcggtggacctggccgagctggtgcccgcggtgggcgcccacccccgggccgcctggagggcggcaggcccggcccccgggcatgaggactgcaatggcaggatgcccagcatcgccaaagacgtcttcaccaagatgggcgaccgcggggatcgcggggaggatgaggaggaaatcgactacaccctgtgcttccgcgtccgcaagatgatcgacgtctataagcccgactggtgcgaggtccgcgaagactggtctgtctacctcttctctcccgagaacaggttccgggtcctgtgtcagaccattattgcccacaaactcttcgactacgtcgtcctggccttcatctttctcaactgcatcaccatcgccctggagcggcctcagatcgaggccggcagcaccgaacgcatctttctcaccgtgtccaactacatcttcacggccatcttcgtgggcgagatgacattgaaggtagtctcgctgggcctgtacttcggcgagcaggcgtacctacgcagcagctggaacgtgctggatggctttcttgtcttcgtgtccatcatcgacatcgtggtgtccctggcctcagccgggggagccaagatcttgggggtcctccgagtcttgcggctcctgcgcaccctacgccccctgcgtgtcatcagccgggcgccgggcctgaagctggtggtggagacactcatctcctccctcaagcccatcggcaacatcgtgctcatctgctgtgccttcttcatcatctttggcatcctgggagtgcagctcttcaagggcaagttctaccactgtctgggcgtggacacccgcaacatcaccaaccgctcggactgcatggccgccaactaccgctgggtccatcacaaatacaacttcgacaacctgggccaggctctgatgtccctctttgtcctggcatccaaggatggttgggtgaacatcatgtacaatggactggatgctgttgctgtggaccagcagcctgtgaccaaccacaacccctggatgctgctgtacttcatctccttcctgctcatcgtcagcttctttgtgctcaacatgtttgtgggtgtcgtggtggagaacttccacaagtgccggcagcaccaggaggctgaagaggcacggcggcgtgaggagaagcggctgcggcgcctggagaagaagcgccggaaggcccagcggctgccctactatgccacctattgtcacacccggctgctcatccactccatgtgcaccagccactacctggacatcttcatcaccttcatcatctgcctcaacgtggtcaccatgtccctggagcactacaatcagcccacgtccctggagacagccctcaagtactgcaactatatgttcaccactgtctttgtgctggaggctgtgctgaagctggtggcatttggtctgaggcgcttcttcaaggaccgatggaaccagctggacctggccattgtgctactgtcagtcatgggcatcaccctggaggagatcgagatcaatgcggccctgcccatcaatcccaccatcatccgcatcatgagggttctgcgcattgcccgagtgctgaagctgttgaagatggccacaggaatgcgggccctgctggacacggtggtgcaagctttgccccaggtgggcaacctgggcctcctcttcatgctgctcttcttcatctatgctgctctcggggtggagctctttgggaagctggtctgcaacgacgagaacccgtgcgagggcatgagccggcatgccaccttcgagaacttcggcatggccttcctcacactcttccaggtctccacgggtgacaactggaacgggatcatgaaggacacgctgcgggactgcacccacgacgagcgcagctgcctgagcagcctgcagtttgtgtcgccgctgtacttcgtgagcttcgtgctcaccgcgcagttcgtgctcatcaacgtggtggtggctgtgctcatgaagcacctggacgacagcaacaaggaggcgcaggaggacgccgagatggatgccgagctcgagctggagatggcccatggcctgggccctggcccgaggctgcctaccggctccccgggcgcccctggccgagggccgggaggggcgggcggcgggggcgacaccgagggcggcttgtgccggcgctgctactcgcctgcccaggagaacctgtggctggacagcgtctctttaatcatcaaggactccttggagggggagctgaccatcatcgacaacctgtcgggctccatcttccaccactactcctcgcctgccggctgcaagaagtgtcaccacgacaagcaagaggtgcagctggctgagacggaggccttctccctgaactcagacaggtcctcgtccatcctgctgggtgacgacctgagtctcgaggaccccacagcctgcccacctggccgcaaagacagcaagggtgagctggacccacctgagcccatgcgtgtgggagacctgggcgaatgcttcttccccttgtcctctacggccgtctcgccggatccagagaacttcctgtgtgagatggaggagatcccattcaaccctgtccggtcctggctgaaacatgacagcagtcaagcacccccaagtcccttctccccggatgcctccagccctctcctgcccatgccagccgagttcttccaccctgcagtgtctgccagccagaaaggcccagaaaagggcactggcactggaaccctccccaagattgcgctgcagggctcctgggcatctctgcggtcaccaagggtcaactgtaccctcctccggcaggtaccgacacctcccaggccctagagcact

SEQ ID NO: 4231 - DNA, 3053 bp, Homo sapiens
  source 1..3053: mol_type = unassigned DNA
ctctgctctgagctctgttggtcccagccaggagagcccgagtcatgaggtgggcacccagtgggcagggtgggcagcaggggccctcttggaggcagcagtgagttgggaagaggaggccgggccccacagcgggcatgatggacaagttccggatgatcttccagttcctgcagtccaaccaggagtccttcatgaatggcatctgtggcatcatggccctggccagtgcccagatgtactcggccttcgacttcaactgcccctgcctgccgggctacaatgcagcctacagcgcgggcatcctgctggcgccacccctggtgctctttctgcttggcctggtcatgaacaacaacgtgtccatgctggccgaagagtggaagcggccgctgggccgccgggccaaggaccccgctgtgttgcgctacatgttctgctccatggcccagcgcgccctcatcgcgcctgtcgtctgggtggccgtcacgctactcgacggcaaatgcttcctctgtgccttctgcactgccgtgcccgtgagcgcactgggcaacggcagcctggcacccggccttcctgcccccgagctcgcccgcctgctggcccgggtgccctgccctgagatctacgatggcgactggctgttggcccgagaggtggccgtgcgttacctccgctgcatctcccaggcgctgggctggtccttcgtgctgctgaccactctgctggcattcgtggtgcgctctgtgcggccctgcttcacgcaggccgccttcctcaagagcaagtactggtcccactatatcgacatcgagcgcaagctcttcgacgagacgtgcacggagcacgccaaagcctttgccaaggtctgcatccagcagttcttcgaggccatgaaccatgacctggagctgggtcacacccacgggacactggccacggcccctgcttccgcagctgcccccacgacccccgatggtgcggaggaggaaagggagaagctgcgtggcatcacggatcaaggcaccatgaacaggctgctcacgagctggcacaaatgcaaaccgcctctgcggctgggccaggaggagccaccgctgatgggcaacggctgggctgggggtgggccccggcctccgcgtaaggaggtggccacctacttcagcaaagtgtgaggtgtggccagctgaagaggcaggaacggggatctgagcccacagcccctccaacccccaaaccaggtggaaaaaggaagggtttcagtgctgggcagtactcccctaggcagatccacactccctagcactcgcctgcccattggaggcaggaaatttggagctggaaggggatctgatgccttcaggtgtgacactgccctggatggccctagggcagtgggcccatgagcagtattagtctaaaggggtcggaactgtcatggcaggtacagggaccaatggctcccctctgcccagcccttcccaggctgatgttcactgtctcctcccaggttcaacagacatccctgccccagggtccaccctcgtctgtggctgttcagtacctctcttcctttatgctccgggctcggggagtgggaatcatcaggcgtctcatgaagtgggagccctctgatttgggcaagcgtgtcgtaggtgagactgggtgtgccggggcaggtccataaggacatgacacacagcctacctggtgtgacacacctggggtgacaggcgatgagacaagatgtcagaagctaggttcacatggaagaggtcagagtgtgtggtcaccatgggggtcatgtgacaattgtccaggtggactgcatgtttatttagcacaaaccaagcacaaaagtcctcctgtagaggggtctttgaaaaaccaccttaatacccccgtcacatccaggtctccaggggaaatcagaccatccccaaggcttgagaagttagacacagaagctgaagtctctccatttttctcaaagaccccacctcttggggatggagttctaagaggctaagaggagctccaaggctctagcccaggtgggatgagggtggaggagagcagtgtaaagagaaagcagctcagattccagagtgagacagaactgggtcaaatggtgtctctaccactcacaaaccctgtccctgggccagctgcatcactgcctgtgccttcgtttcttcatctatacaatgaggatgaggcccccccggcccgccatcatggggttgctgtgtgtaaaagcacatggcacatagtaggcacccagcacagggtggctaatgtatttgttgatttctgaacctaaggacttccttcctcctcccctgggcagggatgagacagcaacacaaacactcgagcttccatcttgttgaggaggaaacagaggtacagataggtttctcagcaccgccctcagctctgagacataagtcccaagcatctaaggattcattttgatcttggcatgattccatccttttttatccatccttccctctattcccacttctggggtccagtttccctcctcttaattatttgggaggagttgctcagatctttgtgggccaaggtgggctgggagggctcttccaggaggtaggagttggtatgggccctgaagtcagggaggattaggatgagcaaaaaacaaggtgtatgttggtgggtggcagcacttccagtgggaagagaaggcccggaggtatcaggaggtacaaatgtgatgaagagcaaagctttgggtcaggcacacctgagttcaaataccagcactgcaggacttgtggccagtcacccagccactctaagcctcagtgtgtctgtctataaaatggatattagaagacctgcttggccaggcggagtggctcatgcctgtaatcccagcacttgggaggccaaggagggaggatcacttgagcctgggagttggagaccagcctgggcaacatagcaagactctgtctctgtaaagtaataataataataagaagaagaagaagaataaagagaagatttataatttt

SEQ ID NO: 4232 - DNA, 1859 bp, Homo sapiens
  source 1..1859: mol_type = unassigned DNA
gttagattagtctgaagccgccaccagccccaggcccccgtgcagaagaaaagcgggagggaacggcggaggccgccgctgccctgcaccgccctcctggaggccacttggagagtccggccccgaggaggccatggccacaagtgcccacagctggccccaggttgccagcgtcgctacagcccagaccaaggcagaataatctccggatgagctggtggcaccgctgagcctttggtctcaccagggcttcctgttgctggcaggcggggtggagcggagctgctgggaggctgctggataggagaggggtcacggctgcggaagaggaggttcttcgggacacccgtggatggacacggcaaggaaacaccaggccaaccacagctggggataaaatagcacaaccacaccctgccgtccagcgcctcccagcctgtgccccttcctagtaccaccagcaaccatcaatcccgtctcctcctgcctcctctcctgcaatccaccccgccacgactatcgccatggcagccctgatcgcagagaacttccgcttcctgtcacttttcttcaagagcaaggatgtgatgattttcaacggcctggtggcactgggcacggtgggcagccaggagctgttctctgtggtggccttccactgcccctgctcgccggcccggaactacctgtacgggctggcggccatcggcgtgcccgccctggtgctcttcatcattggcatcatcctcaacaaccacacctggaacctcgtggccgagtgccagcaccggaggaccaagaactgctccgccgcccccaccttcctccttctaagctccatcctgggacgtgcggctgtggcccctgtcacctggtctgtcatctccctgctgcgtggtgaggcttatgtctgtgctctcagtgagttcgtggacccttcctcactcacggccagggaagagcacttcccatcagcccacgccactgaaatcctggccaggttcccctgcaaggagaaccctgacaacctgtcagacttccgggaggaggtcagccgcaggctcaggtatgagtcccagctctttggatggctgctcatcggcgtggtggccatcctggtgttcctgaccaagtgcctcaagcattactgctcaccactcagctaccgccaggaggcctactgggcgcagtaccgcgccaatgaggaccagctgttccagcgcacggccgaggtgcactctcgggtgctcgctgccaacaatgtgcgccgcttctttggctttgtggcgctcaacaaggatgatgaggaactgattgccaacttcccagtggaaggcacgcagccacggccacagtggaatgccatcaccggcgtctacttgtaccgtgagaaccagggcctcccactctacagccgcctgcacaagtgggcccagggtctggcaggcaacggcgcggcccctgacaacgtggagatggccctgctcccctcctaaggaggtgcttcccatgctctttgtaaatggcactacttggtcccaaactgaaccccactgcttgctcacatccatatcagaaggggatttttaaaaaactgttatcttcttggccaggggaaaggaccacaaggcaatctggggtgtggacagacccagtagacaatggaagccccagccagcagggccaggtgacagtgaagctcaccagtgggctcctttatggtactctatgcagttaacatgtatctagctgcatagggacacccagcgcagcagtgcaccactgggaagtggcctccagtgcagcctctggccttattttatatatttaaatttttgataaagtttttcttactaaaa

SEQ ID NO: 4233 - DNA, 1843 bp, Homo sapiens
  source 1..1843: mol_type = unassigned DNA
ctctgcctggtggcgccgggaggctgtttttccactcactggcgcgcagactccatcccactgttttcttctctcttttctggagttagattagtctgaagccgccaccagccccaggcccccgtgcagaagaaaagcgggagggaacggcggaggccgccgctgccctgcaccgccctcctggaggccacttggagagtccggccccgaggaggccatggccacaagtgcccacagctggccccaggcggggtggagcggagctgctgggaggctgctggataggagaggggtcacggctgcggaagaggaggttcttcgggacacccgtggatggacacggcaaggaaacaccaggccaaccacagctggggataaaatagcacaaccacaccctgccgtccagcgcctcccagcctgtgccccttcctagtaccaccagcaaccatcaatcccgtctcctcctgcctcctctcctgcaatccaccccgccacgactatcgccatggcagccctgatcgcagagaacttccgcttcctgtcacttttcttcaagagcaaggatgtgatgattttcaacggcctggtggcactgggcacggtgggcagccaggagctgttctctgtggtggccttccactgcccctgctcgccggcccggaactacctgtacgggctggcggccatcggcgtgcccgccctggtgctcttcatcattggcatcatcctcaacaaccacacctggaacctcgtggccgagtgccagcaccggaggaccaagaactgctccgccgcccccaccttcctccttctaagctccatcctgggacgtgcggctgtggcccctgtcacctggtctgtcatctccctgctgcgtggtgaggcttatgtctgtgctctcagtgagttcgtggacccttcctcactcacggccagggaagagcacttcccatcagcccacgccactgaaatcctggccaggttcccctgcaaggagaaccctgacaacctgtcagacttccgggaggaggtcagccgcaggctcaggtatgagtcccagctctttggatggctgctcatcggcgtggtggccatcctggtgttcctgaccaagtgcctcaagcattactgctcaccactcagctaccgccaggaggcctactgggcgcagtaccgcgccaatgaggaccagctgttccagcgcacggccgaggtgcactctcgggtgctcgctgccaacaatgtgcgccgcttctttggctttgtggcgctcaacaaggatgatgaggaactgattgccaacttcccagtggaaggcacgcagccacggccacagtggaatgccatcaccggcgtctacttgtaccgtgagaaccagggcctcccactctacagccgcctgcacaagtgggcccagggtctggcaggcaacggcgcggcccctgacaacgtggagatggccctgctcccctcctaaggaggtgcttcccatgctctttgtaaatggcactacttggtcccaaactgaaccccactgcttgctcacatccatatcagaaggggatttttaaaaaactgttatcttcttggccaggggaaaggaccacaaggcaatctggggtgtggacagacccagtagacaatggaagccccagccagcagggccaggtgacagtgaagctcaccagtgggctcctttatggtactctatgcagttaacatgtatctagctgcatagggacacccagcgcagcagtgcaccactgggaagtggcctccagtgcagcctctggccttattttatatatttaaatttttgataaagtttttcttactaaaagga

SEQ ID NO: 4234 - DNA, 2026 bp, Homo sapiens
  source 1..2026: mol_type = unassigned DNA
aattcaatcctcagccctccagggatccgaagcaggtcccggggagttagctgactataggtcaaagagtcagcattggggatggtttgtccagtcaatggacaactctgagggagaagggccagtagagggtggggccctggccctgagcatcctgcagggctcagcgcgggcctgacgacaccctcccttgaccctcgcggggtctcctttggtagcttctgcccagcgggggtcaagcggggtggagcggagctgctgggaggctgctggataggagaggggtcacggctgcggaagaggaggttcttcgggacacccgtggatggacacggcaaggaaagagcaaggctcaggatgatttatcctcttttcactgatgaggaatctgaggcccagagaacagtcatgaagtgtgatcagaccctgaggtctccaaaaagataatgtccttgcgaactccagggattctggcatcttgctgtacccaccccagcccacacggcaggatcctatccaagtcccttatccacccggacactcactttagcttttacaccctcaaggctgagaccctaaggacacgccctggatccaaggagtccctggcccctctgctaatatgcgccacctggactcccagagggaaagccggtcagcaccccacatgcattagcaccatgggccacccccaagccctaccccaggagaagctcgtggtggcaaaaagaacctaagcatttgaggcaggtcacccaagcttgaatctcagtctgcctctcatctgtgaccctggcgagccactcgtcctcaggaagccttcactttccctagtgcacggcgggcacacagctcaacgtgggactgtgaggatgggaaatgaggggtgccatgcaccctggaggaactcagtgaacagtggcaactgtcacttccctggggccctatggtccttcctttctccccagcctgtccacactagcatcttcctcaactcctggttttcagagggaaacacttatcggtcatctgctccacaggaaacaccaggccaaccacagctggggataaaatagcacaaccacaccctgccgtccagcgcctcccagcctgtgccccttcctagtaccaccagcaaccatcaatcccgtctcctcctgcctcctctcctgcaatccaccccgccacgactatcgccatggcagccctgatcgcagagaacttccgcttcctgtcacttttcttcaagagcaaggatgtgatgattttcaacggcctggtggcactgggcacggtgggcagccaggagctgttctctgtggtggccttccactgcccctgctcgccggcccggaactacctgtacgggctggcggccatcggcgtgcccgccctggtgctcttcatcattggcatcatcctcaacaaccacacctggaacctcgtggccgagtgccagcaccggaggaccaagaactgctccgccgcccccaccttcctccttctaagctccatcctgggacgtgcggctgtggcccctgtcacctggtctgtcatctccctgctgcgtggtgaggcttatgtctgtgctctcagtgagttcgtggacccttcctcactcacggccagggaagagcacttcccatcagcccacgccactgaaatcctggccaggttcccctgcaaggagaaccctgacaacctgtcagacttccgggaggaggtcagccgcaggctcaggtatgagtcccaggtaaggagctgtgcaaagggaagctcctcttccctagtggtggctggtgagaggtccggggatggcctagtgctaaagctggggttggtcctcaggggctgaggtctgtgggaaagcactagcgttaggtatcagggctggttaactggtgcatggtggggcaagggccagttccagacacaaataagacagttttatcaatttttttttttactgtaaatctcagttgtatatgaccaaattagttttaaacattaaaggaacattcttctg

SEQ ID NO: 4235 - DNA, 2218 bp, Homo sapiens
  source 1..2218: mol_type = unassigned DNA
gggggcgggtctatagtgggaaggggacgcgcgccctgcggcccggcctctagtcatcgccctcgcagcggcggccaacatcaccgccactgccacccctcccagactgtggacgggaggatggagtcgatggccgtcgctaccgacggcggggagaggccgggggtcccagcgggctcaggtctgtcggcttcccagcgtcgggcggagctgcgtcggagaaagctgctcatgaactcggaacagcgcatcaaccggatcatgggctttcacaggcccgggagcggcgcggaagaagaaagtcaaacaaaatcaaagcagcaggacagtgataaactgaactccctcagcgttccttccgtttcaaagcgagtagtgctgggtgattcagtcagtacaggaacaactgaccagcagggtggtgtggccgaggtaaaggggacccaactgggagacaaattggactcgttcattaaaccacctgagtgcagtagtgatgtcaaccttgagctccggcagcggaacagaggggacctgacagcggactcggtccagaggggttcccgccatggcctagagcagtacctttccagattcgaagaagcaatgaagctaaggaaacagctgattagtgaaaaacccagtcaagaggatggaaatacaacagaagaatttgactcttttcgaatatttagattggtgggatgtgctcttcttgctcttggagtcagagcttttgtttgcaaatacttgtccatatttgctccatttcttactttacaacttgcgtacatgggattatacaaatattttcccaagagtgaaaagaagataaagacaacagtactaacagctgcacttctattgtcgggaattcctgccgaagtgataaatcgatcaatggatacctatagcaaaatgggcgaagtcttcacagatctctgtgtctactttttcacttttatcttttgtcatgaactgcttgattattggggctctgaagtaccatgaagcctgtagaactgagaaggagaagcttacaaaaaaaaaaaaatcctcttctatattgcagtgtctctaaaggaggcaaattggtttacaccttcatgtaattcttttactttaggggttgtaaagctactttattagatatagaatggcagattctctgatttaaaagggctgagtttgtattattactgatatgaagaatagagtaccaatgtcattaattgatttttcttgttaatcagaattcctattctgtacctttcctctaacttctcagatttgtaattcttcttttgggagctgagctagtgcttttaggagaacagataaatgtggtctcagccagccctagagactgcttcttgtgtttgtgtcattctgtcctgagaaatgaagtcatctgaaaaataaaatgaaagaaactgaattgtctaatgttaactctgcacattgtaacttttcttgttgagttagtatcttaatttttactccagcacaagtatttaatcaaagaaaagattcatacatgtgaaattggaaggtatttataaaatttttattgctgtataccaaactcagaattggaactttttacatttgagtttcactttttagaagtatgttttaagcaagcaaaaacaaaatgggatgtgaagaattgaggcatgcaacccaatagcataaatgtcctttttccccccaaatatggtctagatgagttattataaacattgtttttatttttttgagacagagtttcgctcttgttgcccaggctagagtgcaatggcgccatctcggctcaccgcaacctccaccttcctggttcaagggattctcctgcctcagcctcccaagtagctgggattacaggcatgcaccaccacgcccagctaatttttatattctttagtaaagacagggtttctccatgttggtcaggctggtctcgaacttctgacctcaggtgatctgcccacctcggcctcccaaagtgctgggattacaggcgtgagccactgcacctggccttataaatatccttttaactaactcagtaactgccatattttgttgggttgtcttcttaaaagaatataagactaaagtgttaatgtcacttggtgttacatttccttacagatttttgtatagtctaatttggttaatccttgtgacattaaaaacacatacactttttaaaaaa

SEQ ID NO: 4236 - DNA, 1488 bp, Homo sapiens
  source 1..1488: mol_type = unassigned DNA
ggagagagccgccgagccgagccgagccccagctccagcaagagcgcgggcgggtggcccaggcacgcagcggtgaggaccgcggccacagctcggcgccaaccaccgcgggcctcccagccagccccgcggcggggcagccgcaggagccctggctgtggtcggggggcagtgggccatgctgggggcagtggaaggccccaggtggaagcaggcggaggacattagagacatctacgacttccgagatgttctgggcacgggggccttctcggaggtgatcctggcagaagataagaggacgcagaagctggtggccatcaaatgcattgccaaggaggccctggagggcaaggaaggcagcatggagaatgagattgctgtcctgcacaagatcaagcaccccaacattgtagccctggatgacatctatgagagtgggggccacctctacctcatcatgcagctggtgtcgggtggggagctctttgaccgtattgtggaaaaaggcttctacacggagcgggacgccagccgcctcatcttccaggtgctggatgctgtgaaatacctgcatgacctgggcattgtacaccgggatctcaagccagagaatctgctgtactacagcctggatgaagactccaaaatcatgatctccgactttggcctctccaagatggaggacccgggcagtgtgctctccaccgcctgtggaactccgggatacgtggcccctgaagtcctggcccagaagccctacagcaaggctgtggattgctggtccataggtgtcatcgcctacatcttgctctgcggttaccctcccttctatgacgagaatgatgccaaactctttgaacagattttgaaggccgagtacgagtttgactctccttactgggacgacatctctgactctgccaaagatttcatccggcacttgatggagaaggacccagagaaaagattcacctgtgagcaggccttgcagcacccatggattgcaggagatacagctctagataagaatatccaccagtcggtgagtgagcagatcaagaagaactttgccaagagcaagtggaagcaagccttcaatgccacggctgtggtgcggcacatgaggaaactgcagctgggcaccagccaggaggggcaggggcagacggcgagccatggggagctgctgacaccagtggctggggggccggcagctggctgttgctgtcgagactgctgcgtggagccgggcacagaactgtcccccacactgccccaccagctctagggccctggacctcgggtcatgatcctctgcgtgggagggcttgggggcagcctgctccccttccctccctgaaccgggagtttctctgccctgtcccctcctcacctgcttccctaccactcctcactgcattttccatacaaatgtttctattttattgttccttcttgtaataaagggaagataaaaccatcctt

SEQ ID NO: 4237 - DNA, 5322 bp, Homo sapiens
  source 1..5322: mol_type = unassigned DNA
tttccctgtaaaccttagaacccagctgttgccagggcaacggggcaatacctgtctctctagagatgaagttgccagggtaactgcatcctgtcattcgttcctggggaccatccggaatgcggcacccactggctgttaccatggcaactgcctttttgccccacttaatcccatcccgtctgctacaagggccccacagttggaggtgggggaggtgggaagagaaaagatcacttgtggacaaagtttgctctattccacctcctccaggccctccttgggtccatcaccccaggggtgctgggtccatcccacccccaggcccacacaggcttgcagtattgtgtgcggtatggtcagggcgtccgagagcaggtttcgcagtggaaggcaggcaggtgttggggaggcagttaccggggcaacgggaacagggcgttttggaggtggttgccatggggacctggatgctgacgaaggctcgcgaggctgtgagcagccacagtgccctgctcagaagccccgggctcgtcagtcaaaccggttctctgtttgcactcggcagcacgggcaggcaagtggtccctaggttcgggagcagagcagcagcgcctcagtcctggtcccccagtcccaagcctcacctgcctgcccagcgccaggatggccaccatcacctgcacccgcttcacggaagagtaccagctcttcgaggaattgggcaagggagccttctcggtggtgcgaaggtgtgtgaaggtgctggctggccaggagtatgctgccaagatcatcaacacaaagaagctgtcagccagagaccatcagaagctggagcgtgaagcccgcatctgccgcctgctgaagcaccccaacatcgtccgactacatgacagcatctcagaggagggacaccactacctgatcttcgacctggtcactggtggggaactgtttgaagatatcgtggcccgggagtattacagtgaggcggatgccagtcactgtatccagcagatcctggaggctgtgctgcactgccaccagatgggggtggtgcaccgggacctgaagcctgagaatctgttgctggcctccaagctcaagggtgccgcagtgaagctggcagactttggcctggccatagaggtggagggggagcagcaggcatggtttgggtttgcagggactcctggatatctctccccagaagtgctgcggaaggacccgtacgggaagcctgtggacctgtgggcttgtggggtcatcctgtacatcctgctggttgggtaccccccgttctgggatgaggaccagcaccgcctgtaccagcagatcaaagccggcgcctatgatttcccatcgccggaatgggacactgtcaccccggaagccaaggatctgatcaataagatgctgaccattaacccatccaaacgcatcacagctgccgaagcccttaagcacccctggatctcgcaccgctccaccgtggcatcctgcatgcacagacaggagaccgtggactgcctgaagaagttcaatgccaggaggaaactgaagggagccattctcaccacgatgctggccaccaggaacttctccggagggaagagtgggggaaacaagaagagcgatggtgtgaaggaatcctcagagagcaccaacaccaccatcgaggatgaagacaccaaagtgcggaaacaggaaattataaaagtgacagagcagctgattgaagccataagcaatggagattttgagtcctacacgaagatgtgcgaccctggcatgacagccttcgaacctgaggccctggggaacctggttgagggcctggacttccatcgattctattttgaaaacctgtggtcccggaacagcaagcccgtgcacaccaccatcctgaatccccacatccacctgatgggcgacgagtcagcctgcatcgcctacatccgcatcacgcagtacctggacgctggcggcatcccacgcaccgcccagtcggaggagacccgtgtctggcaccgccgggatggcaaatggcagatcgtccacttccacagatctggggcgccctccgtcctgccccactgagggaccaggctggggtcgctgcgttgctgtgccgcagagatccactctgtccgtggagtggagctgctggttctcccaggtggattttgctggaattctcccatgtcatcaccccaccaccgtcacttctgtacctgcatcaagaaaacctgcttgttcacaaaagtcatcgcaacttcagagcgaacggccacatctccccacctctcacccccaccctctcccctgccaggctggggcttcctcaggcatgggtgtccacagcactggccccctctccccagcctcagctgctgtccgcctgatctgtcttgggctgtaggctagaatgcccgggctggtgcccaccaggggctggggagaaggaggggtggcatgatgaggaaggcagcatccgtccgtccctctcccagacctctcctcttccagtgtccccggggaagggcagatgacactcccttccccctaagccaaccgcactgaaggagtggggagaagagcatacgccaggagcctcctgcctcaaagtgctcccctaagtcttcttcctcctgtgctgacctcagggtggtctgacccttccctcggtgtgggggatgtggccctctcaggtgcccctacttgctttctgcttccttctggtgaagtccacctccaacattaacctgcccaccccacccccgtcatccctggagaattccagctttgtcgtatctcagagagggaatctaattgtttttggggggcaaaagaaagcaacgtttaggtatcacttctacttggaccgcatgcctttttatagccaaatttctgtgtatttcgtaaatggatttcgcgttaatggatatttatgtaataactagacttctcagattattgtgagaagggtcaggttggaaggggtgtaggaagaggggtgaggggtagtttttttctgttctagtttttttttttttttttgtcatctctgaggtggaccttgtcacctgtggttattggggccaaggtggactcagctccggggagaagggcctctctgccatttcggtcccaaggtgagctgacacaggcgttccttttgggactgtggaagcatcagatgccagcactgactcaggaacagcaagtcagggcagagaggaggagggaggctgtcaggatggaaatacctggacttttctttgcttccctcgcaaactggggtcttctctaccgaacttcccaggatttcatctcaccatatctgtgtgccgcccccagcaccccccacccacctctggggggcccgtgagcgtgtgtcttcattgcctctctccccttggcgtctgatgaccacagcaaagcactgggaatttctactcttcatgcctcatcctgcagcctcgggttcgcattctctctttcttttcctctttccctctttccctgggattgactctgagtggaataccttggcacatccactaggatctactgtctgcactgttttctttgcatgactttatacgcagtaagtatgttgaaaacaaacaaaaagaagaaaacactcaacaaaaccaatctacatgttttggactaaaaaaaaaaatagaggttgtattctcagtgtccgactcggaattatgttgctgcctctctgtgcttttggcctctgtgtggccgtgttttgccagcatgagatactgtcccctctggaggattttaggggaggaagagccacgtccccagggattggaggaggctccggtaccctcgaccctcctgggtgttggttggagcagaactggtgaggatgtttgatccgagattttctgagctctccccaatcaccagctgtctgctgggttcttttctcaagtcctgctgcccaggcccaggtgagacaggcaacgccaggtctgcaggccaggagagatgctgcccaggcctcctggtttccaagctggtccatcactggcctctgtccttggcagagaccttgctgcccaggcccaggggcaggctcttggcctgccccaggcccagagggcttcccagtaaggcccagtgatcccattatcccaggggcaaaaccacctgtccccttttgagctgccagttccctacagccatccccagtcaagggtgagggtgtggccttcaccaggggctgctgtaattaccgagcaaggtctgagctcttcttcagcctcagttccctcattggttaaaagggttctttgttcccatccagccgatgaaggagcaaacgtctggctatgtgaagcctaatttacctgcaggaactggcagggatagtcactggctggactcctgtttacttctagacctggtcaggctccatcccctcccccacctgcccctgattcccctcgtcggtgcctgtcaactgcttttcagcagtggactgcaggggaaagagcagtgatttggggtgagtaggcttcaattcccagctctgaccagacttgctgtgtgaccttgggcaagttcctttccctctttggagcttggtttccctgccagaggaaactgagctggaggagcctgaggtcctgcctttcattggctgacacacctcctgtccactgtgtcactctccaagtgccagagaagtggaggcagatcgctaccccaggctgagatggcccccactgtgaaggccacgcctgtgggtgggcagccacctggtgccaccacagggcaccagggatgatcctgatgtggcaggcaggggagactcacagaaaaatctgcccagagcctaccctcaccagacaaactctgtgctcctccaaaacatcctttagatgcaaaataataataataataataataaataaataaataaaaatccaaacccaagtcaaaaccttggctccagcatgaaaacacgtttacaggaaagtgttctcctgggtttgtgcccaccatggtgcgaatcctgacccaaggcctcctgtctcccttcaaagggagacccttttgggggatgagtttgccagactccccgtgctggtttctttgttactatttgtttggggttttgttttagttctttttttttttcttttcttttttaaaaatatgtggctgtgaacttgaatgaacactgctcaaactttctgctattggggggggcgggtgggatgggaagaaggggcgtttgttttattcttggtgttttcagtgcaataaatagctacaaacttctgtgca

SEQ ID NO: 4238 - DNA, 1493 bp, Homo sapiens
  source 1..1493: mol_type = unassigned DNA
caggatggccaccatcacctgcacccgcttcacggaagagtaccagctcttcgaggaattgggcaagggagccttctcggtggtgcgaaggtgtgtgaaggtgctggctggccaggagtatgctgccaagatcatcaacacaaagaagctgtcagccagagaccatcagaagctggagcgtgaagcccgcatctgccgcctgctgaagcaccccaacatcgtccgactacatgacagcatctcagaggagggacaccactacctgatcttcgacctggtcactggtggggaactgtttgaagatatcgtggcccgggagtattacagtgaggcggatgccagtcactgtatccagcagatcctggaggctgtgctgcactgccaccagatgggggtggtgcaccgggacctgaagcctgagaatctgttgctggcctccaagctcaagggtgccgcagtgaagctggcagactttggcctggccatagaggtggagggggagcagcaggcatggtttgggtttgcagggactcctggatatctctccccagaagtgctgcggaaggacccgtacgggaagcctgtggacctgtgggcttgtggggtcatcctgtacatcctgctggttgggtaccccccgttctgggatgaggaccagcaccgcctgtaccagcagatcaaagccggcgcctatgatttcccatcgccggaatgggacactgtcaccccggaagccaaggatctgatcaataagatgctgaccattaacccatccaaacgcatcacagctgccgaagcccttaagcacccctggatctcgcaccgctccaccgtggcatcctgcatgcacagacaggagaccgtggactgcctgaagaagttcaatgccaggaggaaactgaagggagccattctcaccacgatgctggccaccaggaacttctccggagggaagagtgggggaaacaagaagagcgatggtgtgaagaaaagaaagtccagttccagcgttcagttaatggaatcctcagagagcaccaacaccaccatcgaggatgaagacaccaaagtgcggaaacaggaaattataaaagtgacagagcagctgattgaagccataagcaatggagattttgagtcctacacgaagatgtgcgaccctggcatgacagccttcgaacctgaggccctggggaacctggttgagggcctggacttccatcgattctattttgaaaacctgtggtcccggaacagcaagcccgtgcacaccaccatcctgaatccccacatccacctgatgggcgacgagtcagcctgcatcgcctacatccgcatcacgcagtacctggacgctggcggcatcccacgcaccgcccagtcggaggagacccgtgtctggcaccgccgggatggcaaatggcagatcgtccacttccacagatctggggcgccctccgtcctgccccactgagggaccaggctggggtcgc

SEQ ID NO: 4239 - DNA, 540 bp, Homo sapiens
  source 1..540: mol_type = unassigned DNA
aaaagatcacttgtggacaaagtttgctctattccacctcctccaggccctccttgggtccatcaccccaggggtgctgggtccatcccacccccaggcccacacaggcttgcagtattgtgtgcggtatggtcagggcgtccgagagcaggtttcgcagtggaaggcagcacgggcaggcaagtggtccctaggttcgggagcagagcagcagcgcctcagtcctggtcccccagtcccaagcctcacctgcctgcccagcgccaggatggccaccatcacctgcacccgcttcacggaagagtaccagctcttcgaggaattgggcaagggagccttctcggtggtgcgaaggtgtgtgaaggtgctggctggccaggagtatgctgccaagatcatcaacacaaagaagctgtcagccagagaccatcagaagctggagcgtgaagcccgcatctgccgcctgctgaagcaccccaacatcgtccgactacatgacagcatctcagaggagggacaccactacctgatcttcgacct

SEQ ID NO: 4240 - DNA, 1652 bp, Homo sapiens
  source 1..1652: mol_type = unassigned DNA
gccatggccaccacggtgacctgcacccgcttcaccgacgagtaccagctctacgaggatattggcaagggggctttctctgtggtccgacgctgtgtcaagctctgcaccggccatgagtatgcagccaagatcatcaacaccaagaagctgtcagccagagatcaccagaagctggagagagaggctcggatctgccgccttctgaagcattccaacatcgtgcgtctccacgacagcatctccgaggagggcttccactacctggtcttcgatctggtcactggtggggagctctttgaagacattgtggcgagagagtactacagcgaggctgatgccagtcactgtatccagcagatcctggaggccgttctccattgtcaccaaatgggggtcgtccacagagacctcaagccggagaacctgcttctggccagcaagtgcaaaggggctgcagtgaagctggcagacttcggcctagctatcgaggtgcagggggaccagcaggcatggtttggtttcgctggcacaccaggctacctgtcccctgaggtccttcgcaaagaggcgtatggcaagcctgtggacatctgggcatgtggggtgatcctgtacatcctgctcgtgggctacccacccttctgggacgaggaccagcacaagctgtaccagcagatcaaggctggtgcctatgacttcccgtcccctgagtgggacaccgtcactcctgaagccaaaaacctcatcaaccagatgctgaccatcaaccctgccaagcgcatcacagcccatgaggccctgaagcacccgtgggtctgccaacgctccacggtagcatccatgatgcacagacaggagactgtggagtgtctgaaaaagttcaatgccaggagaaagctcaagggagccatcctcaccaccatgctggccacacggaatttctcagccaagagtttactcaacaagaaagcagatggagtcaagccccagacgaatagcaccaaaaacagtgcagccgccaccagccccaaagggacgcttcctcctgccgccctggagcctcaaaccaccgtcatccataacccagtggacgggattaaggagtcttctgacagtgccaataccaccatagaggatgaagacgctaaagcccggaagcaggagatcattaagaccacggagcagctcatcgaggccgtcaacaacggtgactttgaggcctacgcgaaaatctgtgacccagggctgacctcgtttgagcctgaagcactgggcaacctggttgaagggatggacttccacagattctacttcgagaacctgctggccaagaacagcaagccgatccacacgaccatcctgaacccacacgtgcacgtcattggagaggatgccgcctgcatcgcttacatccggctcacgcagtacattgacgggcagggccggccccgcaccagccagtctgaggagacccgcgtgtggcaccgccgcgacggcaagtggcagaacgtgcacttccactgctcgggcgcgcctgtggccccgctgcagtgaagagctgcgccctggtttcgccggacagagttggtgtttggagcccgactgccctcgggcacacggcctgcctgtcgcatgtttgtgtctgcctc

SEQ ID NO: 4241 - DNA, 1448 bp, Homo sapiens
  source 1..1448: mol_type = unassigned DNA
gccatggccaccacggtgacctgcacccgcttcaccgacgagtaccagctctacgaggatattggcaagggggctttctctgtggtccgacgctgtgtcaagctctgcaccggccatgagtatgcagccaagatcatcaacaccaagaagctgtcagccagagatcaccagaagctggagagagaggctcggatctgccgccttctgaagcattccaacatcgtgcgtctccacgacagcatctccgaggagggcttccactacctggtcttcgatctggtcactggtggggagctctttgaagacattgtggcgagagagtactacagcgaggctgatgccagtcactgtatccagcagatcctggaggccgttctccattgtcaccaaatgggggtcgtccacagagacctcaagccggagaacctgcttctggccagcaagtgcaaaggggctgcagtgaagctggcagacttcggcctagctatcgaggtgcagggggaccagcaggcatggtttggtttcgctggcacaccaggctacctgtcccctgaggtccttcgcaaagaggcgtatggcaagcctgtggacatctgggcatgtggggtgatcctgtacatcctgctcgtgggctacccacccttctgggacgaggaccagcacaagctgtaccagcagatcaaggctggtgcctatgacttcccgtcccctgagtgggacaccgtcactcctgaagccaaaaacctcatcaaccagatgctgaccatcaaccctgccaagcgcatcacagcccatgaggccctgaagcacccgtgggtctgccaacgctccacggtagcatccatgatgcacagacaggagactgtggagtgtctgaaaaagttcaatgccaggagaaagctcaagggagccatcctcaccaccatgctggccacacggaatttctcagcccggaagcaggagatcattaagaccacggagcagctcatcgaggccgtcaacaacggtgactttgaggcctacgcgaaaatctgtgacccagggctgacctcgtttgagcctgaagcactgggcaacctggttgaagggatggacttccacagattctacttcgagaacctgctggccaagaacagcaagccgatccacacgaccatcctgaacccacacgtgcacgtcattggagaggatgccgcctgcatcgcttacatccggctcacgcagtacattgacgggcagggccggccccgcaccagccagtctgaggagacccgcgtgtggcaccgccgcgacggcaagtggcagaacgtgcacttccactgctcgggcgcgcctgtggccccgctgcagtgaagagctgcgccctggtttcgccggacagagttggtgtttggagcccgactgccctcgggcacacggcctgcctgtcgcatgtttgtgtctgcctc

SEQ ID NO: 4242 - DNA, 1577 bp, Homo sapiens
  source 1..1577: mol_type = unassigned DNA
gccatggccaccacggtgacctgcacccgcttcaccgacgagtaccagctctacgaggatattggcaagggggctttctctgtggtccgacgctgtgtcaagctctgcaccggccatgagtatgcagccaagatcatcaacaccaagaagctgtcagccagagatcaccagaagctggagagagaggctcggatctgccgccttctgaagcattccaacatcgtgcgtctccacgacagcatctccgaggagggcttccactacctggtcttcgatctggtcactggtggggagctctttgaagacattgtggcgagagagtactacagcgaggctgatgccagtcactgtatccagcagatcctggaggccgttctccattgtcaccaaatgggggtcgtccacagagacctcaagccggagaacctgcttctggccagcaagtgcaaaggggctgcagtgaagctggcagacttcggcctagctatcgaggtgcagggggaccagcaggcatggtttggtttcgctggcacaccaggctacctgtcccctgaggtccttcgcaaagaggcgtatggcaagcctgtggacatctgggcatgtggggtgatcctgtacatcctgctcgtgggctacccacccttctgggacgaggaccagcacaagctgtaccagcagatcaaggctggtgcctatgacttcccgtcccctgagtgggacaccgtcactcctgaagccaaaaacctcatcaaccagatgctgaccatcaaccctgccaagcgcatcacagcccatgaggccctgaagcacccgtgggtctgccaacgctccacggtagcatccatgatgcacagacaggagactgtggagtgtctgaaaaagttcaatgccaggagaaagctcaagggagccatcctcaccaccatgctggccacacggaatttctcagtgggcagacagaccaccgctccggccacaatgtccaccgcggcctccggcaccaccatggggctggtggaacaagccaagagtttactcaacaagaaagcagatggagtcaaggagcctcaaaccaccgtcatccataacccagtggacgggattaaggagtcttctgacagtgccaataccaccatagaggatgaagacgctaaagcccggaagcaggagatcattaagaccacggagcagctcatcgaggccgtcaacaacggtgactttgaggcctacgcattctacttcgagaacctgctggccaagaacagcaagccgatccacacgaccatcctgaacccacacgtgcacgtcattggagaggatgccgcctgcatcgcttacatccggctcacgcagtacattgacgggcagggccggccccgcaccagccagtctgaggagacccgcgtgtggcaccgccgcgacggcaagtggcagaacgtgcacttccactgctcgggcgcgcctgtggccccgctgcagtgaagagctgcgccctggtttcgccggacagagttggtgtttggagcccgactgccctcgggcacacggcctgcctgtcgcatgtttgtgtctgcctc

SEQ ID NO: 4243 - DNA, 2292 bp, Homo sapiens
  source 1..2292: mol_type = unassigned DNA
gtgcccgcgagcgggagccggagtcgccgccgcccgagcgcagccgagcgcacgccgagcccgtccgccgccgccatggccaccacggtgacctgcacccgcttcaccgacgagtaccagctctacgaggatattggcaagggggctttctctgtggtccgacgctgtgtcaagctctgcaccggccatgagtatgcagccaagatcatcaacaccaagaagctgtcagccagagatcaccagaagctggagagagaggctcggatctgccgccttctgaagcattccaacatcgtgcgtctccacgacagcatctccgaggagggcttccactacctggtcttcgatctggtcactggtggggagctctttgaagacattgtggcgagagagtactacagcgaggctgatgccagtcactgtatccagcagatcctggaggccgttctccattgtcaccaaatgggggtcgtccacagagacctcaagccggagaacctgcttctggccagcaagtgcaaaggggctgcagtgaagctggcagacttcggcctagctatcgaggtgcagggggaccagcaggcatggtttggtttcgctggcacaccaggctacctgtcccctgaggtccttcgcaaagaggcgtatggcaagcctgtggacatctgggcatgtggggtgatcctgtacatcctgctcgtgggctacccacccttctgggacgaggaccagcacaagctgtaccagcagatcaaggctggtgcctatgacttcccgtcccctgagtgggacaccgtcactcctgaagccaaaaacctcatcaaccagatgctgaccatcaaccctgccaagcgcatcacagcccatgaggccctgaagcacccgtgggtctgccaacgctccacggtagcatccatgatgcacagacaggagactgtggagtgtctgaaaaagttcaatgccaggagaaagctcaagggagccatcctcaccaccatgctggccacacggaatttctcagtgggcagacagaccaccgctccggccacaatgtccaccgcggcctccggcaccaccatggggctggtggaacaagccaagagtttactcaacaagaaagcagatggagtcaagccccagacgaatagcaccaaaaacagtgcagccgccaccagccccaaagggacgcttcctcctgccgccctggagcctcaaaccaccgtcatccataacccagtggacgggattaaggagtcttctgacagtgccaataccaccatagaggatgaagacgctaaagcccggaagcaggagatcattaagaccacggagcagctcatcgaggccgtcaacaacggtgactttgaggcctacgcgaaaatctgtgacccagggctgacctcgtttgagcctgaagcactgggcaacctggttgaagggatggacttccacagattctacttcgagaacctgctggccaagaacagcaagccgatccacacgaccatcctgaacccacacgtgcacgtcattggagaggatgccgcctgcatcgcttacatccggctcacgcagtacattgacgggcagggccggccccgcaccagccagtctgaggagacccgcgtgtggcaccgccgcgacggcaagtggcagaacgtgcacttccactgctcgggcgcgcctgtggccccgctgcagtgaagccaagggaggggcacagaatggggaacaggacacaggatcctaaactccaaggggactgtccaccgatgaacactcagagtggacaccatcttccgtccacgctgtgcccaggacagctgtccccatccatgaacacagggtaaacatctgccgggctccgcaccagtggctccctgggccatgggacagcggcagggctcaccacggacagcacgtggcccagcagccggccaccctggcgtcctggggcctcctcccctcctctccctctcaccttgtcacctccacggagctgcctgtctgggataatttggggattttttttctgggggataattcttttgcatgacccctaaagagcaagccacaccggtctgctagctaggtgtccgcggtgtggtggtggcggccgctggccagcgctgcaaggggtcggctgcccacggtgctggctggcctcccctcctctctctttttgctgagtttcattgtcttttctttctgagccttgtaagtgtacaaaaattattcttattttgttctgtctcgggaaactgcaaataaaagaaaaacaggacaaactgc

SEQ ID NO: 4244 - DNA, 1624 bp, Homo sapiens
  source 1..1624: mol_type = unassigned DNA
cgccgccgccatggccaccacggtgacctgcacccgcttcaccgacgagtaccagctctacgaggatattggcaagggggctttctctgtggtccgacgctgtgtcaagctctgcaccggccatgagtatgcagccaagatcatcaacaccaagaagctgtcagccagagatcaccagaagctggagagagaggctcggatctgccgccttctgaagcattccaacatcgtgcgtctccacgacagcatctccgaggagggcttccactacctggtcttcgatctggtcactggtggggagctctttgaagacattgtggcgagagagtactacagcgaggctgatgccagtcactgtatccagcagatcctggaggccgttctccattgtcaccaaatgggggtcgtccacagagacctcaagccggagaacctgcttctggccagcaagtgcaaaggggctgcagtgaagctggcagacttcggcctagctatcgaggtgcagggggaccagcaggcatggtttggtttcgctggcacaccaggctacctgtcccctgaggtccttcgcaaagaggcgtatggcaagcctgtggacatctgggcatgtggggtgatcctgtacatcctgctcgtgggctacccacccttctgggacgaggaccagcacaagctgtaccagcagatcaaggctggtgcctatgacttcccgtcccctgagtgggacaccgtcactcctgaagccaaaaacctcatcaaccagatgctgaccatcaaccctgccaagcgcatcacagcccatgaggccctgaagcacccgtgggtctgccaacgctccacggtagcatccatgatgcacagacaggagactgtggagtgtctgaaaaagttcaatgccaggagaaagctcaagggagccatcctcaccaccatgctggccacacggaatttctcagcagccaagagtttactcaacaagaaagcagatggagtcaaggagtcttctgacagtgccaataccaccatagaggatgaagacgctaaagcccggaagcaggagatcattaagaccacggagcagctcatcgaggccgtcaacaacggtgactttgaggcctacgcgaaaatctgtgacccagggctgacctcgtttgagcctgaagcactgggcaacctggttgaagggatggacttccacagattctacttcgagaacctgctggccaagaacagcaagccgatccacacgaccatcctgaacccacacgtgcacgtcattggagaggatgccgcctgcatcgcttacatccggctcacgcagtacattgacgggcagggccggccccgcaccagccagtctgaggagacccgcgtgtggcaccgccgcgacggcaagtggcagaacgtgcacttccactgctcgggcgcgcctgtggccccgctgcagtgaagagctgcgccctggtttcgccggacagagttggtgtttggagcccgactgccctcgggcacacggcctgcctgtcgcatgtttgtgtctgcctcgttccctcccctggtgcctgtgtctgcagaaaaacaagaccagatgtgatttgttaaaaaaaaacaaaaaaaaaaaaaa

SEQ ID NO: 4245 - DNA, 1895 bp, Homo sapiens
  source 1..1895: mol_type = unassigned DNA
gcggcgcgctcctggcgaggacggagcgagcagatctcgcgtgcgctcgccgcccggcgcagcccagcccggcccccgcctggcgccgcgagccgaggtgtctcccgcgcccgcgcccgtgtcgccgccgtgcccgcgagcgggagccggagtcgccgccgcccgagcgcagccgagcgcacgccgagcccgtccgccgccgccatggccaccacggtgacctgcacccgcttcaccgacgagtaccagctctacgaggatattggcaagggggctttctctgtggtccgacgctgtgtcaagctctgcaccggccatgagtatgcagccaagatcatcaacaccaagaagctgtcagccagagatcaccagaagctggagagagaggctcggatctgccgccttctgaagcattccaacatcgtgcgtctccacgacagcatctccgaggagggcttccactacctggtcttcgatctggtcactggtggggagctctttgaagacattgtggcgagagagtactacagcgaggctgatgccagtcactgtatccagcagatcctggaggccgttctccattgtcaccaaatgggggtcgtccacagagacctcaagccggagaacctgcttctggccagcaagtgcaaaggggctgcagtgaagctggcagacttcggcctagctatcgaggtgcagggggaccagcaggcatggtttggtttcgctggcacaccaggctacctgtcccctgaggtccttcgcaaagaggcgtatggcaagcctgtggacatctgggcatgtggggtgatcctgtacatcctgctcgtgggctacccacccttctgggacgaggaccagcacaagctgtaccagcagatcaaggctggtgcctatgacttcccgtcccctgagtgggacaccgtcactcctgaagccaaaaacctcatcaaccagatgctgaccatcaaccctgccaagcgcatcacagcccatgaggccctgaagcacccgtgggtctgccaacgctccacggtagcatccatgatgcacagacaggagactgtggagtgtctgaaaaagttcaatgccaggagaaagctcaagggagccatcctcaccaccatgctggccacacggaatttctcagcagccaagagtttactcaacaagaaagcagatggagtcaagccccagacgaatagcaccaaaaacagtgcagccgccaccagccccaaagggacgcttcctcctgccgccctggagtcttctgacagtgccaataccaccatagaggatgaagacgctaaagcccggaagcaggagatcattaagaccacggagcagctcatcgaggccgtcaacaacggtgactttgaggcctacgcgaaaatctgtgacccagggctgacctcgtttgagcctgaagcactgggcaacctggttgaagggatggacttccacagattctacttcgagaacctgctggccaagaacagcaagccgatccacacgaccatcctgaacccacacgtgcacgtcattggagaggatgccgcctgcatcgcttacatccggctcacgcagtacattgacgggcagggccggccccgcaccagccagtctgaggagacccgcgtgtggcaccgccgcgacggcaagtggcagaacgtgcacttccactgctcgggcgcgcctgtggccccgctgcagtgaagagctgcgccctggtttcgccggacagagttggtgtttggagcccgactgccctcgggcacacggcctgcctgtcgcatgtttgtgtctgcctcgttccctcccctggtgcctgtgtctgcagaaaaacaagaccagatgtgatttgttaaaaaaaaacaaaaaaaaaaaaaaaaaaa

SEQ ID NO: 4246 - DNA, 1557 bp, Homo sapiens
  source 1..1557: mol_type = unassigned DNA
atggccaccacggtgacctgcacccgcttcaccgacgagtaccagctctacgaggatattggcaagggggctttctctgtggtccgacgctgtgtcaagctctgcaccggccatgagtatgcagccaagatcatcaacaccaagaagctgtcagccagagatcaccagaagctggagagagaggctcggatctgccgccttctgaagcattccaacatcgtgcgtctccacgacagcatctccgaggagggcttccactacctggtcttcgatctggtcactggtggggagctctttgaagacattgtggcgagagagtactacagcgaggctgatgccagtcactgtatccagcagatcctggaggccgttctccattgtcaccaaatgggggtcgtccacagagacctcaagccggagaacctgcttctggccagcaagtgcaaaggggctgcagtgaagctggcagacttcggcctagctatcgaggtgcagggggaccagcaggcatggtttggtttcgctggcacaccaggctacctgtcccctgaggtccttcgcaaagaggcgtatggcaagcctgtggacatctgggcatgtggggtgatcctgtacatcctgctcgtgggctacccacccttctgggacgaggaccagcacaagctgtaccagcagatcaaggctggtgcctatgacttcccgtcccctgagtgggacaccgtcactcctgaagccaaaaacctcatcaaccagatgctgaccatcaaccctgccaagcgcatcacagcccatgaggccctgaagcacccgtgggtctgccaacgctccacggtagcatccatgatgcacagacaggagactgtggagtgtctgaaaaagttcaatgccaggagaaagctcaagggagccatcctcaccaccatgctggccacacggaatttctcagcagccaagagtttactcaacaagaaagcagatggagtcaagccccagacgaatagcaccaaaaacagtgcagccgccaccagccccaaagggacgcttcctcctgccgccctggagcctcaaaccaccgtcatccataacccagtggacgggattaaggagtcttctgacagtgccaataccaccatagaggatgaagacgctaaagcccggaagcaggagatcattaagaccacggagcagctcatcgaggccgtcaacaacggtgactttgaggcctacgcgaaaatctgtgacccagggctgacctcgtttgagcctgaagcactgggcaacctggttgaagggatggacttccacagattctacttcgagaacctgctggccaagaacagcaagccgatccacacgaccatcctgaacccacacgtgcacgtcattggagaggatgccgcctgcatcgcttacatccggctcacgcagtacattgacgggcagggccggccccgcaccagccagtctgaggagacccgcgtgtggcaccgccgcgacggcaagtggcagaacgtgcacttccactgctcgggcgcgcctgtggccccgctgcagtga

SEQ ID NO: 4247 - DNA, 4447 bp, Homo sapiens
  source 1..4447: mol_type = unassigned DNA
ccgtgcccgcgagcgggagccggagtcgccgccgcccgagcgcagccgagcgcacgccgagcccgtccgccgccgccatggccaccacggtgacctgcacccgcttcaccgacgagtaccagctctacgaggatattggcaagggggctttctctgtggtccgacgctgtgtcaagctctgcaccggccatgagtatgcagccaagatcatcaacaccaagaagctgtcagccagagatcaccagaagctggagagagaggctcggatctgccgccttctgaagcattccaacatcgtgcgtctccacgacagcatctccgaggagggcttccactacctggtcttcgatctggtcactggtggggagctctttgaagacattgtggcgagagagtactacagcgaggctgatgccagtcactgtatccagcagatcctggaggccgttctccattgtcaccaaatgggggtcgtccacagagacctcaagccggagaacctgcttctggccagcaagtgcaaaggggctgcagtgaagctggcagacttcggcctagctatcgaggtgcagggggaccagcaggcatggtttggtttcgctggcacaccaggctacctgtcccctgaggtccttcgcaaagaggcgtatggcaagcctgtggacatctgggcatgtggggtgatcctgtacatcctgctcgtgggctacccacccttctgggacgaggaccagcacaagctgtaccagcagatcaaggctggtgcctatgacttcccgtcccctgagtgggacaccgtcactcctgaagccaaaaacctcatcaaccagatgctgaccatcaaccctgccaagcgcatcacagcccatgaggccctgaagcacccgtgggtctgccaacgctccacggtagcatccatgatgcacagacaggagactgtggagtgtctgaaaaagttcaatgccaggagaaagctcaagggagccatcctcaccaccatgctggccacacggaatttctcagtgggcagacagaccaccgctccggccacaatgtccaccgcggcctccggcaccaccatggggctggtggaacaagccaagagtttactcaacaagaaagcagatggagtcaagccccagacgaatagcaccaaaaacagtgcagccgccaccagccccaaagggacgcttcctcctgccgccctggagcctcaaaccaccgtcatccataacccagtggacgggattaaggagtcttctgacagtgccaataccaccatagaggatgaagacgctaaagcccccagggtccccgacatcctgagctcagtgaggaggggctcgggagccccagaagccgaggggcccctgccctgcccatctccggctccctttagccccctgccagccccatcccccaggatctctgacatcctgaactctgtgagaaggggttcaggaaccccagaagccgagggccccctctcagcggggcccccgccctgcctgtctccggctctcctaggccccctgtcctccccgtcccccaggatctctgacatcctgaactctgtgaggaggggctcagggaccccagaagccgagggcccctcgccagtggggcccccgccctgcccatctccgactatccctggccccctgcccaccccatcccggaagcaggagatcattaagaccacggagcagctcatcgaggccgtcaacaacggtgactttgaggcctacgcgaaaatctgtgacccagggctgacctcgtttgagcctgaagcactgggcaacctggttgaagggatggacttccacagattctacttcgagaacctgctggccaagaacagcaagccgatccacacgaccatcctgaacccacacgtgcacgtcattggagaggatgccgcctgcatcgcttacatccggctcacgcagtacattgacgggcagggccggccccgcaccagccagtctgaggagacccgcgtgtggcaccgccgcgacggcaagtggcagaacgtgcacttccactgctcgggcgcgcctgtggccccgctgcagtgaagagctgcgccctggtttcgccggacagagttggtgtttggagcccgactgccctcgggcacacggcctgcctgtcgcatgtttgtgtctgcctcgttccctcccctggtgcctgtgtctgcagaaaaacaagaccagatgtgatttgttaaaaaaaaacaaaaaaaaaaaaaaaaaaaacaagatgacgacgacaaccacaaaaaaaattgacatcagatgaaatgaaaaaaaaaaaaaacaaaaaaaactaaaggaaggaaaaagctgtaaaaatcactggcattcgtggggccactccccacccaagctccacgtgtgtccgtctgtgctcctggcctctgggggaccagctgggacatgaacttgtctgccaggcccccgtcgcgtgctgaacggtgttagtttgtaggtaacgcacacaccccacacctaaggtgtctgcatcctcctgccaacgcatgggctccacgtggtgtgctcgctggctgtcgtgactgtcagctgtctcttgggaggggctgtgggggcccgctgggctgcctcctttcccgctagttgtgcctgagagttgctgttgttcctgctttcccttcccttcctttcatcccctgaagggctaggtgtgggttttccgtgcccggtatccccacacacccagcacggacaacccttcggcagagcccaggccggcccctcaccccctggagtattgaaactggagtcccgtccccaaggccttcagagatgcccctacacacccagggctccagctctggtccttctgggggagtaaagtgcaaagaggggcacagcttagttttgggcctctcgccgagcaagagacagcactgctggctacagctccaacacagccagctgtggcaagaggactctgcctgggctggcccccctcctgtgtgaggtgtctgtcccttctctgctggccagcagcagatgcactggcagctcccaaccctgtttccgcccctcggccctcccccagcctgttcggcttctctgcagcccgcaagggggagcagacttttgacaaaggactgcgggcctcgctcaagtccctgagcccccagctgaagctgggaggggaggccaggctttgtgtctgggcatattcgtctgctgatggggtttggggaagcctggggcttggggtttggtcgggtggtgcagctagtggcagagcgggatcagaggtggtggctgcccagcttctgggctgagacaagggtctgtgcaggggtttactgaagtgggagtgcctttggaatctgggccgggagcagaagggagcaaaagctacagtgggagccagcctagggcacatgggaggcgtgagggcagtgctgcccgtgcagtgtcaggtgtgccagtgccttggcgggctgcagtgcgtgtgagggcaccttctaggtgggccagggatgcagctatggagataaggcgggctggggacagaaacaggtgggcacagggcccaggacaccagcggatggagggcagggtctagccctgtgctcctgagcgtcggctgcctgggttcgaggcggtgggtccccggccccttgtgatggtgtgtaccatgggggagctcggggacagggcaagcccgagcatggtggggctgcagggtgggtctgaagccaggttgggtgggggtggtcacaagccctgactgcagagggtcaggggctcctgccccagtgcctgcccactttcaattcacattgttttcaacaaggattttctttatcttcccctacaaatcaagccaagggaggggcacagaatggggaacaggacacaggatcctaaactccaaggggactgtccaccgatgaacactcagagtggacaccatcttccgtccacgctgtgcccaggacagctgtccccatccatgaacacagggtaaacatctgccgggctccgcaccagtggctccctgggccatgggacagcggcagggctcaccacggacagcacgtggcccagcagccggccaccctggcgtcctggggcctcctcccctcctctccctctcaccttgtcacctccacggagctgcctgtctgggataatttggggattttttttctgggggataattcttttgcatgacccctaaagagcaagccacaccggtctgctagctaggtgtccgcggtgtggtggtggcggccgctggccagcgctgcaaggggtcggctgcccacggtgctggctggcctcccctcctctctctttttgctgagtttcattgtcttttctttctgagccttgtaagtgtacaaaaattattcttattttgttctgtctcgggaaactgcaaataaaagaaaaacaggaca

SEQ ID NO: 4248 - DNA, 2097 bp, Homo sapiens
  source 1..2097: mol_type = unassigned DNA
gcggcgcccgcgcctccccgcgcgtaggtgtgcggcgcgctcctggcgaggacggagcgagcagatctcgcgtgcgctcgccgcccggcgcagcccagcccggcccccgcctggcgccgcgagccgaggtgtctcccgcgcccgcgcccgtgtcgccgccgtgcccgcgagcgggagccggagtcgccgccgcccgagcgcagccgagcgcacgccgagcccgtccgccgccgccatggccaccacggtgacctgcacccgcttcaccgacgagtaccagctctacgaggatattggcaagggggctttctctgtggtccgacgctgtgtcaagctctgcaccggccatgagtatgcagccaagatcatcaacaccaagaagctgtcagccagagatcaccagaagctggagagagaggctcggatctgccgccttctgaagcattccaacatcgtgcgtctccacgacagcatctccgaggagggcttccactacctggtcttcgatctggtcactggtggggagctctttgaagacattgtggcgagagagtactacagcgaggctgatgccagtcactgtatccagcagatcctggaggccgttctccattgtcaccaaatgggggtcgtccacagagacctcaagccggagaacctgcttctggccagcaagtgcaaaggggctgcagtgaagctggcagacttcggcctagctatcgaggtgcagggggaccagcaggcatggtttggtttcgctggcacaccaggctacctgtcccctgaggtccttcgcaaagaggcgtatggcaagcctgtggacatctgggcatgtggggtgatcctgtacatcctgctcgtgggctacccacccttctgggacgaggaccagcacaagctgtaccagcagatcaaggctggtgcctatgacttcccgtcccctgagtgggacaccgtcactcctgaagccaaaaacctcatcaaccagatgctgaccatcaaccctgccaagcgcatcacagcccatgaggccctgaagcacccgtgggtctgccaacgctccacggtagcatccatgatgcacagacaggagactgtggagtgtctgaaaaagttcaatgccaggagaaagctcaagggagccatcctcaccaccatgctggccacacggaatttctcagtgggcagacagaccaccgctccggccacaatgtccaccgcggcctccggcaccaccatggggctggtggaacaagccaagagtttactcaacaagaaagcagatggagtcaagccccagacgaatagcaccaaaaacagtgcagccgccaccagccccaaagggacgcttcctcctgccgccctggagcctcaaaccaccgtcatccataacccagtggacgggattaaggagtcttctgacagtgccaataccaccatagaggatgaagacgctaaagcccggaagcaggagatcattaagaccacggagcagctcatcgaggccgtcaacaacggtgactttgaggcctacgcgaaaatctgtgacccagggctgacctcgtttgagcctgaagcactgggcaacctggttgaagggatggacttccacagattctacttcgagaacctgctggccaagaacagcaagccgatccacacgaccatcctgaacccacacgtgcacgtcattggagaggatgccgcctgcatcgcttacatccggctcacgcagtacattgacgggcagggccggccccgcaccagccagtctgaggagacccgcgtgtggcaccgccgcgacggcaagtggcagaacgtgcacttccactgctcgggcgcgcctgtggccccgctgcagtgaagagctgcgccctggtttcgccggacagagttggtgtttggagcccgactgccctcgggcacacggcctgcctgtcgcatgtttgtgtctgcctcgttccctcccctggtgcctgtgtctgcagaaaaacaagaccagatgtgatttgttaaaaaaaaacaaaaaaaaaaaaaaaaaaaacaagatgacgacgacaaccacaaaaaaaattgacatcagatgaaatgaaaaaa

SEQ ID NO: 4249 - DNA, 4142 bp, Homo sapiens
  source 1..4142: mol_type = unassigned DNA
aggtgtgcggcgcgctcctggcgaggacggagcgagcagatctcgcgtgcgctcgccgcccggcgcagcccagcccggcccccgcctggcgccgcgagccgaggtgtctcccgcgcccgcgcccgtgtcgccgccgtgcccgcgagcgggagccggagtcgccgccgcccgagcgcagccgagcgcacgccgagcccgtccgccgccgccatggccaccacggtgacctgcacccgcttcaccgacgagtaccagctctacgaggatattggcaagggggctttctctgtggtccgacgctgtgtcaagctctgcaccggccatgagtatgcagccaagatcatcaacaccaagaagctgtcagccagagatcaccagaagctggagagagaggctcggatctgccgccttctgaagcattccaacatcgtgcgtctccacgacagcatctccgaggagggcttccactacctggtcttcgatctggtcactggtggggagctctttgaagacattgtggcgagagagtactacagcgaggctgatgccagtcactgtatccagcagatcctggaggccgttctccattgtcaccaaatgggggtcgtccacagagacctcaagccggagaacctgcttctggccagcaagtgcaaaggggctgcagtgaagctggcagacttcggcctagctatcgaggtgcagggggaccagcaggcatggtttggtttcgctggcacaccaggctacctgtcccctgaggtccttcgcaaagaggcgtatggcaagcctgtggacatctgggcatgtggggtgatcctgtacatcctgctcgtgggctacccacccttctgggacgaggaccagcacaagctgtaccagcagatcaaggctggtgcctatgacttcccgtcccctgagtgggacaccgtcactcctgaagccaaaaacctcatcaaccagatgctgaccatcaaccctgccaagcgcatcacagcccatgaggccctgaagcacccgtgggtctgccaacgctccacggtagcatccatgatgcacagacaggagactgtggagtgtctgaaaaagttcaatgccaggagaaagctcaagggagccatcctcaccaccatgctggccacacggaatttctcagcagccaagagtttactcaacaagaaagcagatggagtcaagccccagacgaatagcaccaaaaacagtgcagccgccaccagccccaaagggacgcttcctcctgccgccctggagcctcaaaccaccgtcatccataacccagtggacgggattaaggagtcttctgacagtgccaataccaccatagaggatgaagacgctaaagcccggaagcaggagatcattaagaccacggagcagctcatcgaggccgtcaacaacggtgactttgaggcctacgcgaaaatctgtgacccagggctgacctcgtttgagcctgaagcactgggcaacctggttgaagggatggacttccacagattctacttcgagaacctgctggccaagaacagcaagccgatccacacgaccatcctgaacccacacgtgcacgtcattggagaggatgccgcctgcatcgcttacatccggctcacgcagtacattgacgggcagggccggccccgcaccagccagtctgaggagacccgcgtgtggcaccgccgcgacggcaagtggcagaacgtgcacttccactgctcgggcgcgcctgtggccccgctgcagtgaagagctgcgccctggtttcgccggacagagttggtgtttggagcccgactgccctcgggcacacggcctgcctgtcgcatgtttgtgtctgcctcgttccctcccctggtgcctgtgtctgcagaaaaacaagaccagatgtgatttgttaaaaaaaaacaaaaaaaaaaaaaaaaaaaacaagatgacgacgacaaccacaaaaaaaattgacatcagatgaaatgaaaaaaaaaaaaaacaaaaaaaactaaaggaaggaaaaagctgtaaaaatcactggcattcgtggggccactccccacccaagctccacgtgtgtccgtctgtgctcctggcctctgggggaccagctgggacatgaacttgtctgccaggcccccgtcgcgtgctgaacggtgttagtttgtaggtaacgcacacaccccacacctaaggtgtctgcatcctcctgccaacgcatgggctccacgtggtgtgctcgctggctgtcgtgactgtcagctgtctcttgggaggggctgtgggggcccgctgggctgcctcctttcccgctagttgtgcctgagagttgctgttgttcctgctttcccttcccttcctttcatcccctgaagggctaggtgtgggttttccgtgcccggtatccccacacacccagcacggacaacccttcggcagagcccaggccggcccctcaccccctggagtattgaaactggagtcccgtccccaaggccttcagagatgcccctacacacccagggctccagctctggtccttctgggggagtaaagtgcaaagaggggcacagcttagttttgggcctctcgccgagcaagagacagcactgctggctacagctccaacacagccagctgtggcaagaggactctgcctgggctggcccccctcctgtgtgaggtgtctgtcccttctctgctggccagcagcagatgcactggcagctcccaaccctgtttccgcccctcggccctcccccagcctgttcggcttctctgcagcccgcaagggggagcagacttttgacaaaggactgcgggcctcgctcaagtccctgagcccccagctgaagctgggaggggaggccaggctttgtgtctgggcatattcgtctgctgatggggtttggggaagcctggggcttggggtttggtcgggtggtgcagctagtggcagagcgggatcagaggtggtggctgcccagcttctgggctgagacaagggtctgtgcaggggtttactgaagtgggagtgcctttggaatctgggccgggagcagaagggagcaaaagctacagtgggagccagcctagggcacatgggaggcgtgagggcagtgctgcccgtgcagtgtcaggtgtgccagtgccttggcgggctgcagtgcgtgtgagggcaccttctaggtgggccagggatgcagctatggagataaggcgggctggggacagaaacaggtgggcacagggcccaggacaccagcggatggagggcagggtctagccctgtgctcctgagcgtcggctgcctgggttcgaggcggtgggtccccggccccttgtgatggtgtgtaccatgggggagctcggggacagggcaagcccgagcatggtggggctgcagggtgggtctgaagccaggttgggtgggggtggtcacaagccctgactgcagagggtcaggggctcctgccccagtgcctgcccactttcaattcacattgttttcaacaaggattttctttatcttcccctacaaatcaagccaagggaggggcacagaatggggaacaggacacaggatcctaaactccaaggggactgtccaccgatgaacactcagagtggacaccatcttccgtccacgctgtgcccaggacagctgtccccatccatgaacacagggtaaacatctgccgggctccgcaccagtggctccctgggccatgggacagcggcagggctcaccacggacagcacgtggcccagcagccggccaccctggcgtcctggggcctcctcccctcctctccctctcaccttgtcacctccacggagctgcctgtctgggataatttggggattttttttctgggggataattcttttgcatgacccctaaagagcaagccacaccggtctgctagctaggtgtccgcggtgtggtggtggcggccgctggccagcgctgcaaggggtcggctgcccacggtgctggctggcctcccctcctctctctttttgctgagtttcattgtcttttctttctgagccttgtaagtgtacaaaaattattcttattttgttctgtctcgggaaactgcaaataaaagaaaaacaggacaaactgc

SEQ ID NO: 4250 - DNA, 1856 bp, Homo sapiens
  source 1..1856: mol_type = unassigned DNA
agtcgccgccgcccgagcgcagccgagcgcacgccgagcccgtccgccgccgccatggccaccacggtgacctgcacccgcttcaccgacgagtaccagctctacgaggatattggcaagggggctttctctgtggtccgacgctgtgtcaagctctgcaccggccatgagtatgcagccaagatcatcaacaccaagaagctgtcagccagagatcaccagaagctggagagagaggctcggatctgccgccttctgaagcattccaacatcgtcactgtatccagcagatcctggaggccgttctccattgtcaccaaatgggggtcgtccacagagacctcaagccggagaacctgcttctggccagcaagtgcaaaggggctgcagtgaagctggcagacttcggcctagctatcgaggtgcagggggaccagcaggcatggtttggtttcgctggcacaccaggctacctgtcccctgaggtccttcgcaaagaggcgtatggcaagcctgtggacatctgggcatgtggggtgatcctgtacatcctgctcgtgggctacccacccttctgggacgaggaccagcacaagctgtaccagcagatcaaggctggtgcctatgacttcccgtcccctgagtgggacaccgtcactcctgaagccaaaaacctcatcaaccagatgctgaccatcaaccctgccaagcgcatcacagcccatgaggccctgaagcacccgtgggtctgccaacgctccacggtagcatccatgatgcacagacaggagactgtggagtgtctgaaaaagttcaatgccaggagaaagctcaagggagccatcctcaccaccatgctggccacacggaatttctcagtgggcagacagaccaccgctccggccacaatgtccaccgcggcctccggcaccaccatggggctggtggaacaagccaagagtttactcaacaagaaagcagatggagtcaagccccagacgaatagcaccaaaaacagtgcagccgccaccagccccaaagggacgcttcctcctgccgccctggagcctcaaaccaccgtcatccataacccagtggacgggattaaggagtcttctgacagtgccaataccaccatagaggatgaagacgctaaagcccggaagcaggagatcattaagaccacggagcagctcatcgaggccgtcaacaacggtgactttgaggcctacgcgtgagtccctggggctgggggggggctgtgcaggacaaggatgtgggacccttgggggggcctgctcagagtcaggggtccacggggcccctcctcacttggatttggcccccaggaaaatctgtgacccagggctgacctcgtttgagcctgaagcactgggcaacctggttgaagggatggacttccacagattctacttcgagaacctgctggccaagaacagcaagccgatccacacgaccatcctgaacccacacgtgcacgtcattggagaggatgccgcctgcatcgcttacatccggctcacgcagtacattgacgggcagggccggccccgcaccagccagtctgaggagacccgcgtgtggcaccgccgcgacggcaagtggcagaacgtgcacttccactgctcgggcgcgcctgtggccccgctgcagtgaagccaagggaggggcacagaatggggaacaggacacaggatcctaaactccaaggggactgtccaccgatgaacactcagagtggacaccatcttccgtccacgctgtgcccaggacagctgtccccatccatgaacacagggtaaacatctgccgggctccgcaccagtggctccctg

SEQ ID NO: 4251 - DNA, 5820 bp, Homo sapiens
  source 1..5820: mol_type = unassigned DNA
aaaggagggagtgcgagagatccacgaagggacaggcttggagtcgctagagggaggtgtgggaccagcgaggagggggcttcgccagggagggggtgctggcaggcggagggagcggcgggaggaggcgccggaggaggagacggaggcctggggacggcagaagaggcttcgcctgagccgagcgctctttctctcgccgcgccgtcttgaagccgcgcgggctcgtgagcagcgcgaggccgccaaggtgcctcgcttcgccggagccgctgccgcccgccggagggaagccggcctcgggcgcgcacgctcgtcggagccccggcgcgccccgcgcctgagcctgctgacagcggccgctgggctcaggctgtccgctctgggctccgcggcctcggccccgctgcactccacctccgccccctcggactccctcccctctgcttctactcctcctgctccagtgcggatcgtttcgcaactgcttgccactcgtcccgtgcctggctgtttttccatttcccggccccctcttcttgagtactttaccccctgcatttggggacagggactggaaaaggggcgggtggagcgtccagtggagaagaaggaagcgaggcccgcaggaggaggaggatcggcggactgtggggaggagaccccacgccaccctttctggtcatctcccctcccgccccgcccctgcgcacactccctcgcgggcgagctactttcggaccaggaaagtaagagcggccctgggtgacagcgccgcggggccagtcccggggttagccgcgcgtctgctcgcttctggtccgtcgcgctcccagccagggcacagcccggaccgaggatggcttcgaccacaacctgcaccaggttcacggacgagtatcagcttttcgaggagcttggaaagggggcattctcagtggtgagaagatgtatgaaaattcctactggacaagaatatgctgccaaaattatcaacaccaaaaagctttctgctagggatcatcagaaactagaaagagaagctagaatctgccgtcttttgaagcaccctaatattgtgcgacttcatgatagcatatcagaagagggctttcactacttggtgtttgatttagttactggaggtgaactgtttgaagacatagtggcaagagaatactacagtgaagctgatgccagtcattgtatacagcagattctagaaagtgttaatcattgtcacctaaatggcatagttcacagggacctgaagcctgagaatttgcttttagctagcaaatccaagggagcagctgtgaaattggcagactttggcttagccatagaagttcaaggggaccagcaggcgtggtttggttttgctggcacacctggatatctttctccagaagttttacgtaaagatccttatggaaagccagtggatatgtgggcatgtggtgtcattctctatattctacttgtggggtatccacccttctgggatgaagaccaacacagactctatcagcagatcaaggctggagcttatgattttccatcaccagaatgggacacggtgactcctgaagccaaagacctcatcaataaaatgcttactatcaaccctgccaaacgcatcacagcctcagaggcactgaagcacccatggatctgtcaacgttctactgttgcttccatgatgcacagacaggagactgtagactgcttgaagaaatttaatgctagaagaaaactaaagggtgccatcttgacaactatgctggctacaaggaatttctcagcagccaagagtttgttgaagaaaccagatggagtaaaggagtcaactgagagttcaaatacaacaattgaggatgaagatgtgaaagcacgaaagcaagagattatcaaagtcactgaacaactgatcgaagctatcaacaatggggactttgaagcctacacaaaaatctgtgacccaggccttactgcttttgaacctgaagctttgggtaatttagtggaagggatggattttcaccgattctactttgaaaatgctttgtccaaaagcaataaaccaatccacactattattctaaaccctcatgtacatctggtaggggatgatgccgcctgcatagcatatattaggctcacacagtacatggatggcagtggaatgccaaagacaatgcagtcagaagagactcgtgtgtggcaccgccgggatggaaagtggcagaatgttcattttcatcgctcggggtcaccaacagtacccatcaagtaaatatttccaggctgtcagcttctttgttaatacacccatgctaaatttcaacagtgccacttctgcattctctgttctcaaggcacctggatggtgaccctgggccgtcctctcctcctcttcatgcatgtttctgagtgcatgaagttgtgaaggtcctacatgtaatgcatatgtgatgcatcatcttatcatatattccttcctatacattgtttacacttcaactacggggatgttccacacaaacttaaattactgttggcaaaacaatagggggagattagacaaaaaaaaaaatccacaatattccaagtacaactcttcatcaagtttctctgttaatgccaagatttaacagacttaagaactattgttctctgaatgacagttgtaagagaaatgtaaattttttagaactctttgctgttaatctgttttggtttgtttggtttttttttttttttttaaggtaaaaaaaaaatacaccttcagtttcctggtgtgatcctggttaaaatggatgatttttcattgaaagttttgctgattaacaattaaagtgggatgatatgtgggcaaaatcacttatgaaagtagaagcaagaatcagttggtttgctaccacataaagccatgctgtttttggtcaaactgtgtaaactggaaaaattcacatcatttctgagtttaatcactttaggatatattcacattgttttggtgaatttgctgaattgaattgtttttctttctcaaatctgtgatctcttttctttatcctgtttctttgttcctttcgtttgctttcttatttttcttttgttccattcttttcttacttttttcccttttccttttttggggaggctggctagtagtgtgtgagaaaagaatagaagtgaaatttgcataatgaatgtaaaagggaaataaaagtcttttgaaggtagctatactagcacttttgatcatcttcagggcccacaaaaatgttgtcaagattttaaaggtttataattctgcttaagctctagtttggacttaggtatcctaactatgttggaggtatttgcattgtttaaagttaggataaaagcaagttcctcctgtgactgcaacgtcttactgattgggacagttgccaggaggataccaacttgatagcagagggggttttatgcaaacgcactcacctccgccttggggaatgaaagggtcacttctgcatcatcactagctagttttctagtgttagagaggcttacaaatgtttgccattctcataagtgttttgaacttgatctttgtgacttgtgcttttttagcttctctcttgaatcagagtatcattgtcttcctccaaggagttagaatttcccagtttaaaacaaaaagggaaatgtcctaggttttctttgtgcttctcatttttcctttgttgattcaattcctgtgatttttgttctcttccctgaagtgctttacagtgcatggaatctccatcattgttattttaacgatagtaattcacagtcctcagaagcctatttttaaagcagaagcaaaaaagaaaaacaaaataacaaaaacaacccttcctcttttctctcatctcacctctctgtgttgattactaatcatcttagatattattgctagtggatgtatggtagatgggttgaagcttttctgataattattacacaatttaaaacaacatatatatttaaaataaatatatacagtaaatatattgagccatgttaacctgccaatgagatctgtgaaaaaataatggcctcatttttctctttttaatttcttttacccttttgtgaagcagctatacgtggcatacatgtatttaaagaaaaaaaaatagatgtagagtgttttttttacacttttaacttagcatgtggtgttgaagtattactgtagatcaagtttgtcttccgcactaagatgtgaggaaattgtgatttgttctctccaccacaaatgaattacacatttattatcttctatcattttgaaacactgcagtttaccatgggacactgtatatatttcttgccataatggtaaaggactgattgatatatttaagagttaataaatttgtgatttctgctgacagtgcgtccatctttatttcttcagaagaggtactgtatgtatgcctgcatagtgctggccagtgtcaagggcagtgtgtcctactctggtctcatttagtacataacaatttgcacttggtgagaatggcaagttaattgttctctgtgagcaaaacaatggtctcttctgggaaaatgttgctgagaacaatatagttaacaactaagactcctaaaagcttctctaaactgtaccctccaatccagccttcacatggctgctttttttttttttttttaatacgaacctgtccttgtaacactttgatgttatcatttctgggatacaggcaagcaccccagctcctgctactccccagcttgaacttgagcatacatggatgctcagcttcttttgatttgctaaaaacatcacacttgctcacatgcctgtttatgctgttcatgttgtttatgtttcttacctagaataaatagtctcttcccctacttcttttcccgacttcttactttttcctaagattcagtgtacagcatcatgctccacagcaaaccttcctaggccctattctgggcttgccttccctctcaaaacctacataatagattgtatttacctctcctgtcaaccacattgttttgaaaatatatttctatttgtgtctcctctactgcagtataatgtctccatgggcaagaactgtgtattcatcattgcattcctaaacccaaaccaaggccaggaatggagatatcattgataaatagttgttgaattgaggccaagcccttttgataacagaagcctcaaggggtacccagatagtccttgttttaatgatgggttctctcaccactgtcttgatgctctgagcaagttacctcttccctctgaccctcagtttccatatttgtaaaatgagaataaacataccaacttaataaagatattgtgaggattaatgggtacagagtgactagaatgatatttgatagaaattaaatggtagcagtataactattctgatcactgacattaatattcctattgttattattctttgctcacgagggtatacaactcttgttttgctgttgggctgccctctttatgtaggtttactgttaatgctgaggatatactcggactcaaatgtctcagcagaaggctgagagacaccaaatgaagtggtcatctagctgaatgtaggaaaaatgaaatgtagtagcaaatcagtatattctaaggaaattttcaaggaatattaatcttcacccaaattttgaatttttatgtaaaaaattataatttaagggtaaacatagatgacacagctttcgagtgatttcattgaataaaattctactgacttctatgaa

SEQ ID NO: 4252 - DNA, 1940 bp, Homo sapiens
  source 1..1940: mol_type = unassigned DNA
atggcttcgaccacaacctgcaccaggttcacggacgagtatcagcttttcgaggagcttggaaagggggcattctcagtggtgagaagatgtatgaaaattcctactggacaagaatatgctgccaaaattatcaacaccaaaaagctttctgctagggatcatcagaaactagaaagagaagctagaatctgccgtcttttgaagcaccctaatattgtgcgacttcatgatagcatatcagaagagggctttcactacttggtgtttgatttagttactggaggtgaactgtttgaagacatagtggcaagagaatactacagtgaagctgatgccagtcattgtatacagcagattctagaaagtgttaatcattgtcacctaaatggcatagttcacagggacctgaagcctgagaatttgcttttagctagcaaatccaagggagcagctgtgaaattggcagactttggcttagccatagaagttcaaggggaccagcaggcgtggtttggttttgctggcacacctggatatctttctccagaagttttacgtaaagatccttatggaaagccagtggatatgtgggcatgtggtgtcattctctatattctacttgtggggtatccacccttctgggatgaagaccaacacagactctatcagcagatcaaggctggagcttatgattttccatcaccagaatgggacacggtgactcctgaagccaaagacctcatcaataaaatgcttactatcaaccctgccaaacgcatcacagcctcagaggcactgaagcacccatggatctgtcaacgttctactgttgcttccatgatgcacagacaggagactgtagactgcttgaagaaatttaatgctagaagaaaactaaagggtgccatcttgacaactatgctggctacaaggaatttctcagcagccaagagtttgttgaagaaaccagatggagtaaaggagtcaactgagagttcaaatacaacaattgaggatgaagatgtgaaagcacgaaagcaagagattatcaaagtcactgaacaactgatcgaagctatcaacaatggggactttgaagcctacacaaaaatctgtgacccaggccttactgcttttgaacctgaagctttgggtaatttagtggaagggatggattttcaccgattctactttgaaaatgctttgtccaaaagcaataaaccaatccacactattattctaaaccctcatgtacatctggtaggggatgatgccgcctgcatagcatatattaggctcacacagtacatggatggcagtggaatgccaaagacaatgcagtcagaagagactcgtgtgtggcaccgccgggatggaaagtggcagaatgttcattttcatcgctcggggtcaccaacagtacccatcaagccaccctgtattccaaatgggaaagaaaacttctcaggaggcacctctttgtggcaaaacatctaaggcctgaaaaccattcacatatgggtcttctaaatttcaacagtgccacttctgcattctctgttctcaaggcacctggatggtgaccctgggccgtcctctcctcctcttcatgcatgtttctgagtgcatgaagttgtgaaggtcctacatgtaatgcatatgtgatgcatcatcttatcatatattccttcctatacattgtttacacttcaactacggggatgttccacacaaacttaaattactgttggcaaaacaatagggggagattagacaaaaaaaaaaatccacaatattccaagtacaactcttcatcaagtttctctgttaatgccaagatttaacagacttaagaactattgttctctgaatgacagttgtaagagaaatgtaaattttttagaactctttgctgttaatctgttttggtttgtttg

SEQ ID NO: 4253 - DNA, 1642 bp, Homo sapiens
  source 1..1642: mol_type = unassigned DNA
gccgcgcgtctgctcgcttctggtccgtcgcgctcccagccagggcacagcccggaccgaggatggcttcgaccacaacctgcaccaggttcacggacgagtatcagcttttcgaggagcttggaaagggggcattctcagtggtgagaagatgtatgaaaattcctactggacaagaatatgctgccaaaattatcaacaccaaaaagctttctgctagggatcatcagaaactagaaagagaagctagaatctgccgtcttttgaagcaccctaatattgtgcgacttcatgatagcatatcagaagagggctttcactacttggtgtttgatttagttactggaggtgaactgtttgaagacatagtggcaagagaatactacagtgaagctgatgccagtcattgtatacagcagattctagaaagtgttaatcattgtcacctaaatggcatagttcacagggacctgaagcctgagaatttgcttttagctagcaaatccaagggagcagctgtgaaattggcagactttggcttagccatagaagttcaaggggaccagcaggcgtggtttggttttgctggcacacctggatatctttctccagaagttttacgtaaagatccttatggaaagccagtggatatgtgggcatgtggtgtcattctctatattctacttgtggggtatccacccttctgggatgaagaccaacacagactctatcagcagatcaaggctggagcttatgattttccatcaccagaatgggacacggtgactcctgaagccaaagacctcatcaataaaatgcttactatcaaccctgccaaacgcatcacagcctcagaggcactgaagcacccatggatctgtcaacgttctactgttgcttccatgatgcacagacaggagactgtagactgcttgaagaaatttaatgctagaagaaaactaaagggtgccatcttgacaactatgctggctacaaggaatttctcagcagccaagagtttgttgaagaaaccagatggagtaaaggagtcaactgagagttcaaatacaacaattgaggatgaagatgtgaaagcacgaaagcaagagattatcaaagtcactgaacaactgatcgaagctatcaacaatggggactttgaagcctacacaaaaatctgtgacccaggccttactgcttttgaacctgaagctttgggtaatttagtggaagggatggattttcaccgattctactttgaaaatgctttgtccaaaagcaataaaccaatccacactattattctaaaccctcatgtacatctggtaggggatgatgccgcctgcatagcatatattaggctcacacagtacatggatggcagtggaatgccaaagacaatgcagtcagaagagactcgtgtgtggcaccgccgggatggaaagtggcagaatgttcattttcatcgctcggggtcaccaacagtacccatcaagtaaatatttccaggctgtcagcttctttgttaatacacccatggtcagctccttctacttattccattgttaatagcatggtatatgttatttaacgctagtagttggttacactgatgaaaataaatgccttcacgggaaaggtt

SEQ ID NO: 4254 - DNA, 2696 bp, Homo sapiens
  source 1..2696: mol_type = unassigned DNA
gggctcaggctgtccgctctgggctccgcggcctcggccccgctgcactccacctccgccccctcggactccctcccctctgcttctactcctcctgctccagtgcggatcgtttcgcaactgcttgccactcgtcccgtgcctggctgtttttccatttcccggccccctcttcttgagtactttaccccctgcatttggggacagggactggaaaaggggcgggtggagcgtccagtggagaagaaggaagcgaggcccgcaggaggaggaggatcggcggactgtggggaggagaccccacgccaccctttctggtcatctcccctcccgccccgcccctgcgcacactccctcgcgggcgagctactttcggaccaggaaagtaagagcggccctgggtgacagcgccgcggggccagtcccggggttagccgcgcgtctgctcgcttctggtccgtcgcgctcccagccagggcacagcccggaccgaggatggcttcgaccacaacctgcaccaggttcacggacgagtatcagcttttcgaggagcttggaaagggggcattctcagtggtgagaagatgtatgaaaattcctactggacaagaatatgctgccaaaattatcaacaccaaaaagctttctgctagggatcatcagaaactagaaagagaagctagaatctgccgtcttttgaagcaccctaatattgtgcgacttcatgatagcatatcagaagagggctttcactacttggtgtttgatttagttactggaggtgaactgtttgaagacatagtggcaagagaatactacagtgaagctgatgccagtcattgtatacagcagattctagaaagtgttaatcattgtcacctaaatggcatagttcacagggacctgaagcctgagaatttgcttttagctagcaaatccaagggagcagctgtgaaattggcagactttggcttagccatagaagttcaaggggaccagcaggcgtggtttggttttgctggcacacctggatatctttctccagaagttttacgtaaagatccttatggaaagccagtggatatgtgggcatgtggtgtcattctctatattctacttgtggggtatccacccttctgggatgaagaccaacacagactctatcagcagatcaaggctggagcttatgattttccatcaccagaatgggacacggtgactcctgaagccaaagacctcatcaataaaatgcttactatcaaccctgccaaacgcatcacagcctcagaggcactgaagcacccatggatctgtcaacgttctactgttgcttccatgatgcacagacaggagactgtagactgcttgaagaaatttaatgctagaagaaaactaaagggtgccatcttgacaactatgctggctacaaggaatttctcagcagccaagagtttgttgaagaaaccagatggagtaaaggagccccaaactactgtaatccacaaccctgatggaaacaaggagtcaactgagagttcaaatacaacaattgaggatgaagatgtgaaagcacgaaagcaagagattatcaaagtcactgaacaactgatcgaagctatcaacaatggggactttgaagcctacacaaaaatctgtgacccaggccttactgcttttgaacctgaagctttgggtaatttagtggaagggatggattttcaccgattctactttgaaaatgctttgtccaaaagcaataaaccaatccacactattattctaaaccctcatgtacatctggtaggggatgatgccgcctgcatagcatatattaggctcacacagtacatggatggcagtggaatgccaaagacaatgcagtcagaagagactcgtgtgtggcaccgccgggatggaaagtggcagaatgttcattttcatcgctcggggtcaccaacagtacccatcaagtaaatatttccaggctgtcagcttctttgttaatacacccatggtcagctccttctacttattccattgttaatagcatggtatatgttatttaacgctagtagttggttacactgatgaaaataaatgccttcacgggaaaggtttatgattctctggaaagatcaatcagatcagccatttgtgggttgaaacttgctatagagcagtatatgataggtttagacaggacgagagactacgtgatcaaaatctcacagggttaaatctagaggacttgtataataaggcaaaatatttgtgacttcatcttctcaattgacagaagaaggggatatcagaggaaaacatagggaggagtttctaaaatggccaatatattatcaggagtttcatttcatagatgatcccctaaagctcagttagagagacagcatttaaaaggccattgtcaggtagtgcaatgtcattctcacctcaccactctacctcagatatcatttgcttttccagtcagcgattaggcacatatttattgtgaatcacctaggtgcttaatctgtgccagattcaacacaaagtacaagatattgctttcaagaaacatgtattctcatttagccaatcattgattctaaagaaaaaaatgatataataaagtttatcatcaacttcagaatacagtagagttaatgaacagtgtagtaaactgtttataacagttt

SEQ ID NO: 4255 - DNA, 5905 bp, Homo sapiens
  source 1..5905: mol_type = unassigned DNA
aaaggagggagtgcgagagatccacgaagggacaggcttggagtcgctagagggaggtgtgggaccagcgaggagggggcttcgccagggagggggtgctggcaggcggagggagcggcgggaggaggcgccggaggaggagacggaggcctggggacggcagaagaggcttcgcctgagccgagcgctctttctctcgccgcgccgtcttgaagccgcgcgggctcgtgagcagcgcgaggccgccaaggtgcctcgcttcgccggagccgctgccgcccgccggagggaagccggcctcgggcgcgcacgctcgtcggagccccggcgcgccccgcgcctgagcctgctgacagcggccgctgggctcaggctgtccgctctgggctccgcggcctcggccccgctgcactccacctccgccccctcggactccctcccctctgcttctactcctcctgctccagtgcggatcgtttcgcaactgcttgccactcgtcccgtgcctggctgtttttccatttcccggccccctcttcttgagtactttaccccctgcatttggggacagggactggaaaaggggcgggtggagcgtccagtggagaagaaggaagcgaggcccgcaggaggaggaggatcggcggactgtggggaggagaccccacgccaccctttctggtcatctcccctcccgccccgcccctgcgcacactccctcgcgggcgagctactttcggaccaggaaagtaagagcggccctgggtgacagcgccgcggggccagtcccggggttagccgcgcgtctgctcgcttctggtccgtcgcgctcccagccagggcacagcccggaccgaggatggcttcgaccacaacctgcaccaggttcacggacgagtatcagcttttcgaggagcttggaaagggggcattctcagtggtgagaagatgtatgaaaattcctactggacaagaatatgctgccaaaattatcaacaccaaaaagctttctgctagggatcatcagaaactagaaagagaagctagaatctgccgtcttttgaagcaccctaatattgtgcgacttcatgatagcatatcagaagagggctttcactacttggtgtttgatttagttactggaggtgaactgtttgaagacatagtggcaagagaatactacagtgaagctgatgccagtcattgtatacagcagattctagaaagtgttaatcattgtcacctaaatggcatagttcacagggacctgaagcctgagaatttgcttttagctagcaaatccaagggagcagctgtgaaattggcagactttggcttagccatagaagttcaaggggaccagcaggcgtggtttggttttgctggcacacctggatatctttctccagaagttttacgtaaagatccttatggaaagccagtggatatgtgggcatgtggtgtcattctctatattctacttgtggggtatccacccttctgggatgaagaccaacacagactctatcagcagatcaaggctggagcttatgattttccatcaccagaatgggacacggtgactcctgaagccaaagacctcatcaataaaatgcttactatcaaccctgccaaacgcatcacagcctcagaggcactgaagcacccatggatctgtcaacgttctactgttgcttccatgatgcacagacaggagactgtagactgcttgaagaaatttaatgctagaagaaaactaaagggtgccatcttgacaactatgctggctacaaggaatttctcagcagccaagagtttgttgaagaaaccagatggagtaaagaaaaggaagtccagttcgagtgttcagatgatggagtcaactgagagttcaaatacaacaattgaggatgaagatgtgaaagcacgaaagcaagagattatcaaagtcactgaacaactgatcgaagctatcaacaatggggactttgaagcctacacaaaaatctgtgacccaggccttactgcttttgaacctgaagctttgggtaatttagtggaagggatggattttcaccgattctactttgaaaatgctttgtccaaaagcaataaaccaatccacactattattctaaaccctcatgtacatctggtaggggatgatgccgcctgcatagcatatattaggctcacacagtacatggatggcagtggaatgccaaagacaatgcagtcagaagagactcgtgtgtggcaccgccgggatggaaagtggcagaatgttcattttcatcgctcggggtcaccaacagtacccatcaagccaccctgtattccaaatgggaaagaaaacttctcaggaggcacctctttgtggcaaaacatctaaggcctgaaaaccattcacatatgggtcttctaaatttcaacagtgccacttctgcattctctgttctcaaggcacctggatggtgaccctgggccgtcctctcctcctcttcatgcatgtttctgagtgcatgaagttgtgaaggtcctacatgtaatgcatatgtgatgcatcatcttatcatatattccttcctatacattgtttacacttcaactacggggatgttccacacaaacttaaattactgttggcaaaacaatagggggagattagacaaaaaaaaaaatccacaatattccaagtacaactcttcatcaagtttctctgttaatgccaagatttaacagacttaagaactattgttctctgaatgacagttgtaagagaaatgtaaattttttagaactctttgctgttaatctgttttggtttgtttggtttttttttttttttttaaggtaaaaaaaaaatacaccttcagtttcctggtgtgatcctggttaaaatggatgatttttcattgaaagttttgctgattaacaattaaagtgggatgatatgtgggcaaaatcacttatgaaagtagaagcaagaatcagttggtttgctaccacataaagccatgctgtttttggtcaaactgtgtaaactggaaaaattcacatcatttctgagtttaatcactttaggatatattcacattgttttggtgaatttgctgaattgaattgtttttctttctcaaatctgtgatctcttttctttatcctgtttctttgttcctttcgtttgctttcttatttttcttttgttccattcttttcttacttttttcccttttccttttttggggaggctggctagtagtgtgtgagaaaagaatagaagtgaaatttgcataatgaatgtaaaagggaaataaaagtcttttgaaggtagctatactagcacttttgatcatcttcagggcccacaaaaatgttgtcaagattttaaaggtttataattctgcttaagctctagtttggacttaggtatcctaactatgttggaggtatttgcattgtttaaagttaggataaaagcaagttcctcctgtgactgcaacgtcttactgattgggacagttgccaggaggataccaacttgatagcagagggggttttatgcaaacgcactcacctccgccttggggaatgaaagggtcacttctgcatcatcactagctagttttctagtgttagagaggcttacaaatgtttgccattctcataagtgttttgaacttgatctttgtgacttgtgcttttttagcttctctcttgaatcagagtatcattgtcttcctccaaggagttagaatttcccagtttaaaacaaaaagggaaatgtcctaggttttctttgtgcttctcatttttcctttgttgattcaattcctgtgatttttgttctcttccctgaagtgctttacagtgcatggaatctccatcattgttattttaacgatagtaattcacagtcctcagaagcctatttttaaagcagaagcaaaaaagaaaaacaaaataacaaaaacaacccttcctcttttctctcatctcacctctctgtgttgattactaatcatcttagatattattgctagtggatgtatggtagatgggttgaagcttttctgataattattacacaatttaaaacaacatatatatttaaaataaatatatacagtaaatatattgagccatgttaacctgccaatgagatctgtgaaaaaataatggcctcatttttctctttttaatttcttttacccttttgtgaagcagctatacgtggcatacatgtatttaaagaaaaaaaaatagatgtagagtgttttttttacacttttaacttagcatgtggtgttgaagtattactgtagatcaagtttgtcttccgcactaagatgtgaggaaattgtgatttgttctctccaccacaaatgaattacacatttattatcttctatcattttgaaacactgcagtttaccatgggacactgtatatatttcttgccataatggtaaaggactgattgatatatttaagagttaataaatttgtgatttctgctgacagtgcgtccatctttatttcttcagaagaggtactgtatgtatgcctgcatagtgctggccagtgtcaagggcagtgtgtcctactctggtctcatttagtacataacaatttgcacttggtgagaatggcaagttaattgttctctgtgagcaaaacaatggtctcttctgggaaaatgttgctgagaacaatatagttaacaactaagactcctaaaagcttctctaaactgtaccctccaatccagccttcacatggctgctttttttttttttttttaatacgaacctgtccttgtaacactttgatgttatcatttctgggatacaggcaagcaccccagctcctgctactccccagcttgaacttgagcatacatggatgctcagcttcttttgatttgctaaaaacatcacacttgctcacatgcctgtttatgctgttcatgttgtttatgtttcttacctagaataaatagtctcttcccctacttcttttcccgacttcttactttttcctaagattcagtgtacagcatcatgctccacagcaaaccttcctaggccctattctgggcttgccttccctctcaaaacctacataatagattgtatttacctctcctgtcaaccacattgttttgaaaatatatttctatttgtgtctcctctactgcagtataatgtctccatgggcaagaactgtgtattcatcattgcattcctaaacccaaaccaaggccaggaatggagatatcattgataaatagttgttgaattgaggccaagcccttttgataacagaagcctcaaggggtacccagatagtccttgttttaatgatgggttctctcaccactgtcttgatgctctgagcaagttacctcttccctctgaccctcagtttccatatttgtaaaatgagaataaacataccaacttaataaagatattgtgaggattaatgggtacagagtgactagaatgatatttgatagaaattaaatggtagcagtataactattctgatcactgacattaatattcctattgttattattctttgctcacgagggtatacaactcttgttttgctgttgggctgccctctttatgtaggtttactgttaatgctgaggatatactcggactcaaatgtctcagcagaaggctgagagacaccaaatgaagtggtcatctagctgaatgtaggaaaaatgaaatgtagtagcaaatcagtatattctaaggaaattttcaaggaatattaatcttcacccaaattttgaatttttatgtaaaaaattataatttaagggtaaacatagatgacacagctttcgagtgatttcattgaataaaattctactgacttctatgaa

SEQ ID NO: 4256 - DNA, 5914 bp, Homo sapiens
  source 1..5914: mol_type = unassigned DNA
aaaggagggagtgcgagagatccacgaagggacaggcttggagtcgctagagggaggtgtgggaccagcgaggagggggcttcgccagggagggggtgctggcaggcggagggagcggcgggaggaggcgccggaggaggagacggaggcctggggacggcagaagaggcttcgcctgagccgagcgctctttctctcgccgcgccgtcttgaagccgcgcgggctcgtgagcagcgcgaggccgccaaggtgcctcgcttcgccggagccgctgccgcccgccggagggaagccggcctcgggcgcgcacgctcgtcggagccccggcgcgccccgcgcctgagcctgctgacagcggccgctgggctcaggctgtccgctctgggctccgcggcctcggccccgctgcactccacctccgccccctcggactccctcccctctgcttctactcctcctgctccagtgcggatcgtttcgcaactgcttgccactcgtcccgtgcctggctgtttttccatttcccggccccctcttcttgagtactttaccccctgcatttggggacagggactggaaaaggggcgggtggagcgtccagtggagaagaaggaagcgaggcccgcaggaggaggaggatcggcggactgtggggaggagaccccacgccaccctttctggtcatctcccctcccgccccgcccctgcgcacactccctcgcgggcgagctactttcggaccaggaaagtaagagcggccctgggtgacagcgccgcggggccagtcccggggttagccgcgcgtctgctcgcttctggtccgtcgcgctcccagccagggcacagcccggaccgaggatggcttcgaccacaacctgcaccaggttcacggacgagtatcagcttttcgaggagcttggaaagggggcattctcagtggtgagaagatgtatgaaaattcctactggacaagaatatgctgccaaaattatcaacaccaaaaagctttctgctagggatcatcagaaactagaaagagaagctagaatctgccgtcttttgaagcaccctaatattgtgcgacttcatgatagcatatcagaagagggctttcactacttggtgtttgatttagttactggaggtgaactgtttgaagacatagtggcaagagaatactacagtgaagctgatgccagtcattgtatacagcagattctagaaagtgttaatcattgtcacctaaatggcatagttcacagggacctgaagcctgagaatttgcttttagctagcaaatccaagggagcagctgtgaaattggcagactttggcttagccatagaagttcaaggggaccagcaggcgtggtttggttttgctggcacacctggatatctttctccagaagttttacgtaaagatccttatggaaagccagtggatatgtgggcatgtggtgtcattctctatattctacttgtggggtatccacccttctgggatgaagaccaacacagactctatcagcagatcaaggctggagcttatgattttccatcaccagaatgggacacggtgactcctgaagccaaagacctcatcaataaaatgcttactatcaaccctgccaaacgcatcacagcctcagaggcactgaagcacccatggatctgtcaacgttctactgttgcttccatgatgcacagacaggagactgtagactgcttgaagaaatttaatgctagaagaaaactaaagggtgccatcttgacaactatgctggctacaaggaatttctcagcagccaagagtttgttgaagaaaccagatggagtaaaggagccccaaactactgtaatccacaaccctgatggaaacaaggagtcaactgagagttcaaatacaacaattgaggatgaagatgtgaaagcacgaaagcaagagattatcaaagtcactgaacaactgatcgaagctatcaacaatggggactttgaagcctacacaaaaatctgtgacccaggccttactgcttttgaacctgaagctttgggtaatttagtggaagggatggattttcaccgattctactttgaaaatgctttgtccaaaagcaataaaccaatccacactattattctaaaccctcatgtacatctggtaggggatgatgccgcctgcatagcatatattaggctcacacagtacatggatggcagtggaatgccaaagacaatgcagtcagaagagactcgtgtgtggcaccgccgggatggaaagtggcagaatgttcattttcatcgctcggggtcaccaacagtacccatcaagccaccctgtattccaaatgggaaagaaaacttctcaggaggcacctctttgtggcaaaacatctaaggcctgaaaaccattcacatatgggtcttctaaatttcaacagtgccacttctgcattctctgttctcaaggcacctggatggtgaccctgggccgtcctctcctcctcttcatgcatgtttctgagtgcatgaagttgtgaaggtcctacatgtaatgcatatgtgatgcatcatcttatcatatattccttcctatacattgtttacacttcaactacggggatgttccacacaaacttaaattactgttggcaaaacaatagggggagattagacaaaaaaaaaaatccacaatattccaagtacaactcttcatcaagtttctctgttaatgccaagatttaacagacttaagaactattgttctctgaatgacagttgtaagagaaatgtaaattttttagaactctttgctgttaatctgttttggtttgtttggtttttttttttttttttaaggtaaaaaaaaaatacaccttcagtttcctggtgtgatcctggttaaaatggatgatttttcattgaaagttttgctgattaacaattaaagtgggatgatatgtgggcaaaatcacttatgaaagtagaagcaagaatcagttggtttgctaccacataaagccatgctgtttttggtcaaactgtgtaaactggaaaaattcacatcatttctgagtttaatcactttaggatatattcacattgttttggtgaatttgctgaattgaattgtttttctttctcaaatctgtgatctcttttctttatcctgtttctttgttcctttcgtttgctttcttatttttcttttgttccattcttttcttacttttttcccttttccttttttggggaggctggctagtagtgtgtgagaaaagaatagaagtgaaatttgcataatgaatgtaaaagggaaataaaagtcttttgaaggtagctatactagcacttttgatcatcttcagggcccacaaaaatgttgtcaagattttaaaggtttataattctgcttaagctctagtttggacttaggtatcctaactatgttggaggtatttgcattgtttaaagttaggataaaagcaagttcctcctgtgactgcaacgtcttactgattgggacagttgccaggaggataccaacttgatagcagagggggttttatgcaaacgcactcacctccgccttggggaatgaaagggtcacttctgcatcatcactagctagttttctagtgttagagaggcttacaaatgtttgccattctcataagtgttttgaacttgatctttgtgacttgtgcttttttagcttctctcttgaatcagagtatcattgtcttcctccaaggagttagaatttcccagtttaaaacaaaaagggaaatgtcctaggttttctttgtgcttctcatttttcctttgttgattcaattcctgtgatttttgttctcttccctgaagtgctttacagtgcatggaatctccatcattgttattttaacgatagtaattcacagtcctcagaagcctatttttaaagcagaagcaaaaaagaaaaacaaaataacaaaaacaacccttcctcttttctctcatctcacctctctgtgttgattactaatcatcttagatattattgctagtggatgtatggtagatgggttgaagcttttctgataattattacacaatttaaaacaacatatatatttaaaataaatatatacagtaaatatattgagccatgttaacctgccaatgagatctgtgaaaaaataatggcctcatttttctctttttaatttcttttacccttttgtgaagcagctatacgtggcatacatgtatttaaagaaaaaaaaatagatgtagagtgttttttttacacttttaacttagcatgtggtgttgaagtattactgtagatcaagtttgtcttccgcactaagatgtgaggaaattgtgatttgttctctccaccacaaatgaattacacatttattatcttctatcattttgaaacactgcagtttaccatgggacactgtatatatttcttgccataatggtaaaggactgattgatatatttaagagttaataaatttgtgatttctgctgacagtgcgtccatctttatttcttcagaagaggtactgtatgtatgcctgcatagtgctggccagtgtcaagggcagtgtgtcctactctggtctcatttagtacataacaatttgcacttggtgagaatggcaagttaattgttctctgtgagcaaaacaatggtctcttctgggaaaatgttgctgagaacaatatagttaacaactaagactcctaaaagcttctctaaactgtaccctccaatccagccttcacatggctgctttttttttttttttttaatacgaacctgtccttgtaacactttgatgttatcatttctgggatacaggcaagcaccccagctcctgctactccccagcttgaacttgagcatacatggatgctcagcttcttttgatttgctaaaaacatcacacttgctcacatgcctgtttatgctgttcatgttgtttatgtttcttacctagaataaatagtctcttcccctacttcttttcccgacttcttactttttcctaagattcagtgtacagcatcatgctccacagcaaaccttcctaggccctattctgggcttgccttccctctcaaaacctacataatagattgtatttacctctcctgtcaaccacattgttttgaaaatatatttctatttgtgtctcctctactgcagtataatgtctccatgggcaagaactgtgtattcatcattgcattcctaaacccaaaccaaggccaggaatggagatatcattgataaatagttgttgaattgaggccaagcccttttgataacagaagcctcaaggggtacccagatagtccttgttttaatgatgggttctctcaccactgtcttgatgctctgagcaagttacctcttccctctgaccctcagtttccatatttgtaaaatgagaataaacataccaacttaataaagatattgtgaggattaatgggtacagagtgactagaatgatatttgatagaaattaaatggtagcagtataactattctgatcactgacattaatattcctattgttattattctttgctcacgagggtatacaactcttgttttgctgttgggctgccctctttatgtaggtttactgttaatgctgaggatatactcggactcaaatgtctcagcagaaggctgagagacaccaaatgaagtggtcatctagctgaatgtaggaaaaatgaaatgtagtagcaaatcagtatattctaaggaaattttcaaggaatattaatcttcacccaaattttgaatttttatgtaaaaaattataatttaagggtaaacatagatgacacagctttcgagtgatttcattgaataaaattctactgacttctatgaa

SEQ ID NO: 4257 - DNA, 5932 bp, Homo sapiens
  source 1..5932: mol_type = unassigned DNA
aaaggagggagtgcgagagatccacgaagggacaggcttggagtcgctagagggaggtgtgggaccagcgaggagggggcttcgccagggagggggtgctggcaggcggagggagcggcgggaggaggcgccggaggaggagacggaggcctggggacggcagaagaggcttcgcctgagccgagcgctctttctctcgccgcgccgtcttgaagccgcgcgggctcgtgagcagcgcgaggccgccaaggtgcctcgcttcgccggagccgctgccgcccgccggagggaagccggcctcgggcgcgcacgctcgtcggagccccggcgcgccccgcgcctgagcctgctgacagcggccgctgggctcaggctgtccgctctgggctccgcggcctcggccccgctgcactccacctccgccccctcggactccctcccctctgcttctactcctcctgctccagtgcggatcgtttcgcaactgcttgccactcgtcccgtgcctggctgtttttccatttcccggccccctcttcttgagtactttaccccctgcatttggggacagggactggaaaaggggcgggtggagcgtccagtggagaagaaggaagcgaggcccgcaggaggaggaggatcggcggactgtggggaggagaccccacgccaccctttctggtcatctcccctcccgccccgcccctgcgcacactccctcgcgggcgagctactttcggaccaggaaagtaagagcggccctgggtgacagcgccgcggggccagtcccggggttagccgcgcgtctgctcgcttctggtccgtcgcgctcccagccagggcacagcccggaccgaggatggcttcgaccacaacctgcaccaggttcacggacgagtatcagcttttcgaggagcttggaaagggggcattctcagtggtgagaagatgtatgaaaattcctactggacaagaatatgctgccaaaattatcaacaccaaaaagctttctgctagggatcatcagaaactagaaagagaagctagaatctgccgtcttttgaagcaccctaatattgtgcgacttcatgatagcatatcagaagagggctttcactacttggtgtttgatttagttactggaggtgaactgtttgaagacatagtggcaagagaatactacagtgaagctgatgccagtcattgtatacagcagattctagaaagtgttaatcattgtcacctaaatggcatagttcacagggacctgaagcctgagaatttgcttttagctagcaaatccaagggagcagctgtgaaattggcagactttggcttagccatagaagttcaaggggaccagcaggcgtggtttggttttgctggcacacctggatatctttctccagaagttttacgtaaagatccttatggaaagccagtggatatgtgggcatgtggtgtcattctctatattctacttgtggggtatccacccttctgggatgaagaccaacacagactctatcagcagatcaaggctggagcttatgattttccatcaccagaatgggacacggtgactcctgaagccaaagacctcatcaataaaatgcttactatcaaccctgccaaacgcatcacagcctcagaggcactgaagcacccatggatctgtcaacgttctactgttgcttccatgatgcacagacaggagactgtagactgcttgaagaaatttaatgctagaagaaaactaaagggtgccatcttgacaactatgctggctacaaggaatttctcagcagccaagagtttgttgaagaaaccagatggagtaaagataaacaacaaagccaacgtggtaaccagccccaaagaaaatattcctaccccagcgctggagtcaactgagagttcaaatacaacaattgaggatgaagatgtgaaagcacgaaagcaagagattatcaaagtcactgaacaactgatcgaagctatcaacaatggggactttgaagcctacacaaaaatctgtgacccaggccttactgcttttgaacctgaagctttgggtaatttagtggaagggatggattttcaccgattctactttgaaaatgctttgtccaaaagcaataaaccaatccacactattattctaaaccctcatgtacatctggtaggggatgatgccgcctgcatagcatatattaggctcacacagtacatggatggcagtggaatgccaaagacaatgcagtcagaagagactcgtgtgtggcaccgccgggatggaaagtggcagaatgttcattttcatcgctcggggtcaccaacagtacccatcaagccaccctgtattccaaatgggaaagaaaacttctcaggaggcacctctttgtggcaaaacatctaaggcctgaaaaccattcacatatgggtcttctaaatttcaacagtgccacttctgcattctctgttctcaaggcacctggatggtgaccctgggccgtcctctcctcctcttcatgcatgtttctgagtgcatgaagttgtgaaggtcctacatgtaatgcatatgtgatgcatcatcttatcatatattccttcctatacattgtttacacttcaactacggggatgttccacacaaacttaaattactgttggcaaaacaatagggggagattagacaaaaaaaaaaatccacaatattccaagtacaactcttcatcaagtttctctgttaatgccaagatttaacagacttaagaactattgttctctgaatgacagttgtaagagaaatgtaaattttttagaactctttgctgttaatctgttttggtttgtttggtttttttttttttttttaaggtaaaaaaaaaatacaccttcagtttcctggtgtgatcctggttaaaatggatgatttttcattgaaagttttgctgattaacaattaaagtgggatgatatgtgggcaaaatcacttatgaaagtagaagcaagaatcagttggtttgctaccacataaagccatgctgtttttggtcaaactgtgtaaactggaaaaattcacatcatttctgagtttaatcactttaggatatattcacattgttttggtgaatttgctgaattgaattgtttttctttctcaaatctgtgatctcttttctttatcctgtttctttgttcctttcgtttgctttcttatttttcttttgttccattcttttcttacttttttcccttttccttttttggggaggctggctagtagtgtgtgagaaaagaatagaagtgaaatttgcataatgaatgtaaaagggaaataaaagtcttttgaaggtagctatactagcacttttgatcatcttcagggcccacaaaaatgttgtcaagattttaaaggtttataattctgcttaagctctagtttggacttaggtatcctaactatgttggaggtatttgcattgtttaaagttaggataaaagcaagttcctcctgtgactgcaacgtcttactgattgggacagttgccaggaggataccaacttgatagcagagggggttttatgcaaacgcactcacctccgccttggggaatgaaagggtcacttctgcatcatcactagctagttttctagtgttagagaggcttacaaatgtttgccattctcataagtgttttgaacttgatctttgtgacttgtgcttttttagcttctctcttgaatcagagtatcattgtcttcctccaaggagttagaatttcccagtttaaaacaaaaagggaaatgtcctaggttttctttgtgcttctcatttttcctttgttgattcaattcctgtgatttttgttctcttccctgaagtgctttacagtgcatggaatctccatcattgttattttaacgatagtaattcacagtcctcagaagcctatttttaaagcagaagcaaaaaagaaaaacaaaataacaaaaacaacccttcctcttttctctcatctcacctctctgtgttgattactaatcatcttagatattattgctagtggatgtatggtagatgggttgaagcttttctgataattattacacaatttaaaacaacatatatatttaaaataaatatatacagtaaatatattgagccatgttaacctgccaatgagatctgtgaaaaaataatggcctcatttttctctttttaatttcttttacccttttgtgaagcagctatacgtggcatacatgtatttaaagaaaaaaaaatagatgtagagtgttttttttacacttttaacttagcatgtggtgttgaagtattactgtagatcaagtttgtcttccgcactaagatgtgaggaaattgtgatttgttctctccaccacaaatgaattacacatttattatcttctatcattttgaaacactgcagtttaccatgggacactgtatatatttcttgccataatggtaaaggactgattgatatatttaagagttaataaatttgtgatttctgctgacagtgcgtccatctttatttcttcagaagaggtactgtatgtatgcctgcatagtgctggccagtgtcaagggcagtgtgtcctactctggtctcatttagtacataacaatttgcacttggtgagaatggcaagttaattgttctctgtgagcaaaacaatggtctcttctgggaaaatgttgctgagaacaatatagttaacaactaagactcctaaaagcttctctaaactgtaccctccaatccagccttcacatggctgctttttttttttttttttaatacgaacctgtccttgtaacactttgatgttatcatttctgggatacaggcaagcaccccagctcctgctactccccagcttgaacttgagcatacatggatgctcagcttcttttgatttgctaaaaacatcacacttgctcacatgcctgtttatgctgttcatgttgtttatgtttcttacctagaataaatagtctcttcccctacttcttttcccgacttcttactttttcctaagattcagtgtacagcatcatgctccacagcaaaccttcctaggccctattctgggcttgccttccctctcaaaacctacataatagattgtatttacctctcctgtcaaccacattgttttgaaaatatatttctatttgtgtctcctctactgcagtataatgtctccatgggcaagaactgtgtattcatcattgcattcctaaacccaaaccaaggccaggaatggagatatcattgataaatagttgttgaattgaggccaagcccttttgataacagaagcctcaaggggtacccagatagtccttgttttaatgatgggttctctcaccactgtcttgatgctctgagcaagttacctcttccctctgaccctcagtttccatatttgtaaaatgagaataaacataccaacttaataaagatattgtgaggattaatgggtacagagtgactagaatgatatttgatagaaattaaatggtagcagtataactattctgatcactgacattaatattcctattgttattattctttgctcacgagggtatacaactcttgttttgctgttgggctgccctctttatgtaggtttactgttaatgctgaggatatactcggactcaaatgtctcagcagaaggctgagagacaccaaatgaagtggtcatctagctgaatgtaggaaaaatgaaatgtagtagcaaatcagtatattctaaggaaattttcaaggaatattaatcttcacccaaattttgaatttttatgtaaaaaattataatttaagggtaaacatagatgacacagctttcgagtgatttcattgaataaaattctactgacttctatgaa

SEQ ID NO: 4258 - DNA, 5947 bp, Homo sapiens
  source 1..5947: mol_type = unassigned DNA
aaaggagggagtgcgagagatccacgaagggacaggcttggagtcgctagagggaggtgtgggaccagcgaggagggggcttcgccagggagggggtgctggcaggcggagggagcggcgggaggaggcgccggaggaggagacggaggcctggggacggcagaagaggcttcgcctgagccgagcgctctttctctcgccgcgccgtcttgaagccgcgcgggctcgtgagcagcgcgaggccgccaaggtgcctcgcttcgccggagccgctgccgcccgccggagggaagccggcctcgggcgcgcacgctcgtcggagccccggcgcgccccgcgcctgagcctgctgacagcggccgctgggctcaggctgtccgctctgggctccgcggcctcggccccgctgcactccacctccgccccctcggactccctcccctctgcttctactcctcctgctccagtgcggatcgtttcgcaactgcttgccactcgtcccgtgcctggctgtttttccatttcccggccccctcttcttgagtactttaccccctgcatttggggacagggactggaaaaggggcgggtggagcgtccagtggagaagaaggaagcgaggcccgcaggaggaggaggatcggcggactgtggggaggagaccccacgccaccctttctggtcatctcccctcccgccccgcccctgcgcacactccctcgcgggcgagctactttcggaccaggaaagtaagagcggccctgggtgacagcgccgcggggccagtcccggggttagccgcgcgtctgctcgcttctggtccgtcgcgctcccagccagggcacagcccggaccgaggatggcttcgaccacaacctgcaccaggttcacggacgagtatcagcttttcgaggagcttggaaagggggcattctcagtggtgagaagatgtatgaaaattcctactggacaagaatatgctgccaaaattatcaacaccaaaaagctttctgctagggatcatcagaaactagaaagagaagctagaatctgccgtcttttgaagcaccctaatattgtgcgacttcatgatagcatatcagaagagggctttcactacttggtgtttgatttagttactggaggtgaactgtttgaagacatagtggcaagagaatactacagtgaagctgatgccagtcattgtatacagcagattctagaaagtgttaatcattgtcacctaaatggcatagttcacagggacctgaagcctgagaatttgcttttagctagcaaatccaagggagcagctgtgaaattggcagactttggcttagccatagaagttcaaggggaccagcaggcgtggtttggttttgctggcacacctggatatctttctccagaagttttacgtaaagatccttatggaaagccagtggatatgtgggcatgtggtgtcattctctatattctacttgtggggtatccacccttctgggatgaagaccaacacagactctatcagcagatcaaggctggagcttatgattttccatcaccagaatgggacacggtgactcctgaagccaaagacctcatcaataaaatgcttactatcaaccctgccaaacgcatcacagcctcagaggcactgaagcacccatggatctgtcaacgttctactgttgcttccatgatgcacagacaggagactgtagactgcttgaagaaatttaatgctagaagaaaactaaagggtgccatcttgacaactatgctggctacaaggaatttctcagcagccaagagtttgttgaagaaaccagatggagtaaagaaaaggaagtccagttcgagtgttcagatgatggagccccaaactactgtaatccacaaccctgatggaaacaaggagtcaactgagagttcaaatacaacaattgaggatgaagatgtgaaagcacgaaagcaagagattatcaaagtcactgaacaactgatcgaagctatcaacaatggggactttgaagcctacacaaaaatctgtgacccaggccttactgcttttgaacctgaagctttgggtaatttagtggaagggatggattttcaccgattctactttgaaaatgctttgtccaaaagcaataaaccaatccacactattattctaaaccctcatgtacatctggtaggggatgatgccgcctgcatagcatatattaggctcacacagtacatggatggcagtggaatgccaaagacaatgcagtcagaagagactcgtgtgtggcaccgccgggatggaaagtggcagaatgttcattttcatcgctcggggtcaccaacagtacccatcaagccaccctgtattccaaatgggaaagaaaacttctcaggaggcacctctttgtggcaaaacatctaaggcctgaaaaccattcacatatgggtcttctaaatttcaacagtgccacttctgcattctctgttctcaaggcacctggatggtgaccctgggccgtcctctcctcctcttcatgcatgtttctgagtgcatgaagttgtgaaggtcctacatgtaatgcatatgtgatgcatcatcttatcatatattccttcctatacattgtttacacttcaactacggggatgttccacacaaacttaaattactgttggcaaaacaatagggggagattagacaaaaaaaaaaatccacaatattccaagtacaactcttcatcaagtttctctgttaatgccaagatttaacagacttaagaactattgttctctgaatgacagttgtaagagaaatgtaaattttttagaactctttgctgttaatctgttttggtttgtttggtttttttttttttttttaaggtaaaaaaaaaatacaccttcagtttcctggtgtgatcctggttaaaatggatgatttttcattgaaagttttgctgattaacaattaaagtgggatgatatgtgggcaaaatcacttatgaaagtagaagcaagaatcagttggtttgctaccacataaagccatgctgtttttggtcaaactgtgtaaactggaaaaattcacatcatttctgagtttaatcactttaggatatattcacattgttttggtgaatttgctgaattgaattgtttttctttctcaaatctgtgatctcttttctttatcctgtttctttgttcctttcgtttgctttcttatttttcttttgttccattcttttcttacttttttcccttttccttttttggggaggctggctagtagtgtgtgagaaaagaatagaagtgaaatttgcataatgaatgtaaaagggaaataaaagtcttttgaaggtagctatactagcacttttgatcatcttcagggcccacaaaaatgttgtcaagattttaaaggtttataattctgcttaagctctagtttggacttaggtatcctaactatgttggaggtatttgcattgtttaaagttaggataaaagcaagttcctcctgtgactgcaacgtcttactgattgggacagttgccaggaggataccaacttgatagcagagggggttttatgcaaacgcactcacctccgccttggggaatgaaagggtcacttctgcatcatcactagctagttttctagtgttagagaggcttacaaatgtttgccattctcataagtgttttgaacttgatctttgtgacttgtgcttttttagcttctctcttgaatcagagtatcattgtcttcctccaaggagttagaatttcccagtttaaaacaaaaagggaaatgtcctaggttttctttgtgcttctcatttttcctttgttgattcaattcctgtgatttttgttctcttccctgaagtgctttacagtgcatggaatctccatcattgttattttaacgatagtaattcacagtcctcagaagcctatttttaaagcagaagcaaaaaagaaaaacaaaataacaaaaacaacccttcctcttttctctcatctcacctctctgtgttgattactaatcatcttagatattattgctagtggatgtatggtagatgggttgaagcttttctgataattattacacaatttaaaacaacatatatatttaaaataaatatatacagtaaatatattgagccatgttaacctgccaatgagatctgtgaaaaaataatggcctcatttttctctttttaatttcttttacccttttgtgaagcagctatacgtggcatacatgtatttaaagaaaaaaaaatagatgtagagtgttttttttacacttttaacttagcatgtggtgttgaagtattactgtagatcaagtttgtcttccgcactaagatgtgaggaaattgtgatttgttctctccaccacaaatgaattacacatttattatcttctatcattttgaaacactgcagtttaccatgggacactgtatatatttcttgccataatggtaaaggactgattgatatatttaagagttaataaatttgtgatttctgctgacagtgcgtccatctttatttcttcagaagaggtactgtatgtatgcctgcatagtgctggccagtgtcaagggcagtgtgtcctactctggtctcatttagtacataacaatttgcacttggtgagaatggcaagttaattgttctctgtgagcaaaacaatggtctcttctgggaaaatgttgctgagaacaatatagttaacaactaagactcctaaaagcttctctaaactgtaccctccaatccagccttcacatggctgctttttttttttttttttaatacgaacctgtccttgtaacactttgatgttatcatttctgggatacaggcaagcaccccagctcctgctactccccagcttgaacttgagcatacatggatgctcagcttcttttgatttgctaaaaacatcacacttgctcacatgcctgtttatgctgttcatgttgtttatgtttcttacctagaataaatagtctcttcccctacttcttttcccgacttcttactttttcctaagattcagtgtacagcatcatgctccacagcaaaccttcctaggccctattctgggcttgccttccctctcaaaacctacataatagattgtatttacctctcctgtcaaccacattgttttgaaaatatatttctatttgtgtctcctctactgcagtataatgtctccatgggcaagaactgtgtattcatcattgcattcctaaacccaaaccaaggccaggaatggagatatcattgataaatagttgttgaattgaggccaagcccttttgataacagaagcctcaaggggtacccagatagtccttgttttaatgatgggttctctcaccactgtcttgatgctctgagcaagttacctcttccctctgaccctcagtttccatatttgtaaaatgagaataaacataccaacttaataaagatattgtgaggattaatgggtacagagtgactagaatgatatttgatagaaattaaatggtagcagtataactattctgatcactgacattaatattcctattgttattattctttgctcacgagggtatacaactcttgttttgctgttgggctgccctctttatgtaggtttactgttaatgctgaggatatactcggactcaaatgtctcagcagaaggctgagagacaccaaatgaagtggtcatctagctgaatgtaggaaaaatgaaatgtagtagcaaatcagtatattctaaggaaattttcaaggaatattaatcttcacccaaattttgaatttttatgtaaaaaattataatttaagggtaaacatagatgacacagctttcgagtgatttcattgaataaaattctactgacttctatgaa

SEQ ID NO: 4259 - DNA, 1470 bp, Homo sapiens
  source 1..1470: mol_type = unassigned DNA
atggcttcgaccacaacctgcaccaggttcacggacgagtatcagcttttcgaggagcttggaaagggggcattctcagtggtgagaagatgtatgaaaattcctactggacaagaatatgctgccaaaattatcaacaccaaaaagctttctgctagggatcatcagaaactagaaagagaagctagaatctgccgtcttttgaagcaccctaatattgtgcgacttcatgatagcatatcagaagagggctttcactacttggtgtttgatttagttactggaggtgaactgtttgaagacatagtggcaagagaatactacagtgaagctgatgccagtcattgtatacagcagattctagaaagtgttaatcattgtcacctaaatggcatagttcacagggacctgaagcctgagaatttgcttttagctagcaaatccaagggagcagctgtgaaattggcagactttggcttagccatagaagttcaaggggaccagcaggcgtggtttggttttgctggcacacctggatatctttctccagaagttttacgtaaagatccttatggaaagccagtggatatgtgggcatgtggtgtcattctctatattctacttgtggggtatccacccttctgggatgaagaccaacacagactctatcagcagatcaaggctggagcttatgattttccatcaccagaatgggacacggtgactcctgaagccaaagacctcatcaataaaatgcttactatcaaccctgccaaacgcatcacagcctcagaggcactgaagcacccatggatctgtcaacgttctactgttgcttccatgatgcacagacaggagactgtagactgcttgaagaaatttaatgctagaagaaaactaaagggtgccatcttgacaactatgctggctacaaggaatttctcagcagccaagagtttgttgaagaaaccagatggagtaaagaaaaggaagtccagttcgagtgttcagatgatggagtcaactgagagttcaaatacaacaattgaggatgaagatgtgaaagcacgaaagcaagagattatcaaagtcactgaacaactgatcgaagctatcaacaatggggactttgaagcctacacaaaaatctgtgacccaggccttactgcttttgaacctgaagctttgggtaatttagtggaagggatggattttcaccgattctactttgaaaatgctttgtccaaaagcaataaaccaatccacactattattctaaaccctcatgtacatctggtaggggatgatgccgcctgcatagcatatattaggctcacacagtacatggatggcagtggaatgccaaagacaatgcagtcagaagagactcgtgtgtggcaccgccgggatggaaagtggcagaatgttcattttcatcgctcggggtcaccaacagtacccatcaagtaa

SEQ ID NO: 4260 - DNA, 2142 bp, Homo sapiens
  source 1..2142: mol_type = unassigned DNA
aagaaaactaaagggtgccatcttgacaactatgctggctacaaggaatttctcagcagccaagagtttgttgaagaaaccagatggagtaaaggagtcaactgagagttcaaatacaacaattgaggatgaagatgtgaaagcacgaaagcaagagattatcaaagtcactgaacaactgatcgaagctatcaacaatggggactttgaagcctacacaaaaatctgtgacccaggccttactgcttttgaacctgaagctttgggtaatttagtggaagggatggattttcaccgattctactttgaaaatgctttgtccaaaagcaataaaccaatccacactattattctaaaccctcatgtacatctggtaggggatgatgccgcctgcatagcatatattaggctcacacagtacatggatggcagtggaatgccaaagacaatgcagtcagaagagactcgtgtgtggcaccgccgggatggaaagtggcagaatgttcattttcatcgctcggggtcaccaacagtacccatcaagtaaatatttccaggctgtcagcttctttgttaatacacccatgctaaatttcaacagtgccacttctgcattctctgttctcaaggcacctggatggtgaccctgggccgtcctctcctcctcttcatgcatgtttctgagtgcatgaagttgtgaaggtcctacatgtaatgcatatgtgatgcatcatcttatcatatattccttcctatacattgtttacacttcaactacggggatgttccacacaaacttaaattactgttggcaaaacaatagggggagattagacaaaaaaaaaaatccacaatattccaagtacaactcttcatcaagtttctctgttaatgccaagatttaacagacttaagaactattgttctctgaatgacagttgtaagagaaatgtaaattttttagaactctttgctgttaatctgttttggtttgtttggtttttttttttttttttaaggtaaaaaaaaaatacaccttcagtttcctggtgtgatcctggttaaaatggatgatttttcattgaaagttttgctgattaacaattaaagtgggatgatatgtgggcaaaatcacttatgaaagtagaagcaagaatcagttggtttgctaccacataaagccatgctgtttttggtcaaactgtgtaaactggaaaaattcacatcatttctgagtttaatcactttaggatatattcacattgttttggtgaatttgctgaattgaattgtttttctttctcaaatctgtgatctcttttctttatcctgtttctttgttcctttcgtttgctttcttatttttcttttgttccattcttttcttacttttttcccttttccttttttggggaggctggctagtagtgtgtgagaaaagaatagaagtgaaatttgcataatgaatgtaaaagggaaataaaagtcttttgaaggtagctatactagcacttttgatcatcttcagggcccacaaaaatgttgtcaagattttaaaggtttataattctgcttaagctctagtttggacttaggtatcctaactatgttggaggtatttgcattgtttaaagttaggataaaagcaagttcctcctgtgactgcaacgtcttactgattgggacagttgccaggaggataccaacttgatagcagagggggttttatgcaaacgcactcacctccgccttggggaatgaaagggtcacttctgcatcatcactagctagttttctagtgttagagaggcttacaaatgtttgccattctcataagtgttttgaacttgatctttgtgacttgtgcttttttagcttctctcttgaatcagagtatcattgtcttcctccaaggagttagaatttcccagtttaaaacaaaaagggaaatgtcctaggttttctttgtgcttctcatttttcctttgttgattcaattcctgtgatttttgttctcttccctgaagtgctttacagtgcatggaatctccatcattgttattttaacgatagtaattcacagtcctcagaagcctatttttaaagcagaagcaaaaaagaaaaacaaaataacaaaaacaa

SEQ ID NO: 4261 - DNA, 5294 bp, Homo sapiens
  source 1..5294: mol_type = unassigned DNA
aactgcttgccactcgtcccgtgcctggctgtttttccatttcccggccccctcttcttgagtactttaccccctgcatttggggacagggactggaaaaggggcgggtggagcgtccagtggagaagaaggaagcgaggcccgcaggaggaggaggatcggcggactgtggggaggagaccccacgccaccctttctggtcatctcccctcccgccccgcccctgcgcacactccctcgcgggcgagctactttcggaccaggaaagtaagagcggccctgggtgacagcgccgcggggccagtcccggggttagccgcgcgtctgctcgcttctggtccgtcgcgctcccagccagggcacagcccggaccgaggatggcttcgaccacaacctgcaccaggttcacggacgagtatcagcttttcgaggagcttggaaagggggcattctcagtggtgagaagatgtatgaaaattcctactggacaagaatatgctgccaaaattatcaacaccaaaaagctttctgctagggatcatcagaaactagaaagagaagctagaatctgccgtcttttgaagcaccctaatattgtgcgacttcatgatagcatatcagaagagggctttcactacttggtgtttgatttagttactggaggtgaactgtttgaagacatagtggcaagagaatactacagtgaagctgatgccagtcattgtatacagcagattctagaaagtgttaatcattgtcacctaaatggcatagttcacagggacctgaagcctgagaatttgcttttagctagcaaatccaagggagcagctgtgaaattggcagactttggcttagccatagaagttcaaggggaccagcaggcgtggtttggttttgctggcacacctggatatctttctccagaagttttacgtaaagatccttatggaaagccagtggatatgtgggcatgtggtgtcattctctatattctacttgtggggtatccacccttctgggatgaagaccaacacagactctatcagcagatcaaggctggagcttatgattttccatcaccagaatgggacacggtgactcctgaagccaaagacctcatcaataaaatgcttactatcaaccctgccaaacgcatcacagcctcagaggcactgaagcacccatggatctgtcaacgttctactgttgcttccatgatgcacagacaggagactgtagactgcttgaagaaatttaatgctagaagaaaactaaagggtgccatcttgacaactatgctggctacaaggaatttctcagcagccaagagtttgttgaagaaaccagatggagtaaaggagtcaactgagagttcaaatacaacaattgaggatgaagatgtgaaagcacgaaagcaagagattatcaaagtcactgaacaactgatcgaagctatcaacaatggggactttgaagcctacacaaaaatctgtgacccaggccttactgcttttgaacctgaagctttgggtaatttagtggaagggatggattttcaccgattctactttgaaaatgctttgtccaaaagcaataaaccaatccacactattattctaaaccctcatgtacatctggtaggggatgatgccgcctgcatagcatatattaggctcacacagtacatggatggcagtggaatgccaaagacaatgcagtcagaagagactcgtgtgtggcaccgccgggatggaaagtggcagaatgttcattttcatcgctcggggtcaccaacagtacccatcaactaaatttcaacagtgccacttctgcattctctgttctcaaggcacctggatggtgaccctgggccgtcctctcctcctcttcatgcatgtttctgagtgcatgaagttgtgaaggtcctacatgtaatgcatatgtgatgcatcatcttatcatatattccttcctatacattgtttacacttcaactacggggatgttccacacaaacttaaattactgttggcaaaacaatagggggagattagacaaaaaaaaaaatccacaatattccaagtacaactcttcatcaagtttctctgttaatgccaagatttaacagacttaagaactattgttctctgaatgacagttgtaagagaaatgtaaattttttagaactctttgctgttaatctgttttggtttgtttggtttttttttttttttttaaggtaaaaaaaaaatacaccttcagtttcctggtgtgatcctggttaaaatggatgatttttcattgaaagttttgctgattaacaattaaagtgggatgatatgtgggcaaaatcacttatgaaagtagaagcaagaatcagttggtttgctaccacataaagccatgctgtttttggtcaaactgtgtaaactggaaaaattcacatcatttctgagtttaatcactttaggatatattcacattgttttggtgaatttgctgaattgaattgtttttctttctcaaatctgtgatctcttttctttatcctgtttctttgttcctttcgtttgctttcttatttttcttttgttccattcttttcttacttttttcccttttccttttttggggaggctggctagtagtgtgtgagaaaagaatagaagtgaaatttgcataatgaatgtaaaagggaaataaaagtcttttgaaggtagctatactagcacttttgatcatcttcagggcccacaaaaatgttgtcaagattttaaaggtttataattctgcttaagctctagtttggacttaggtatcctaactatgttggaggtatttgcattgtttaaagttaggataaaagcaagttcctcctgtgactgcaacgtcttactgattgggacagttgccaggaggataccaacttgatagcagagggggttttatgcaaacgcactcacctccgccttggggaatgaaagggtcacttctgcatcatcactagctagttttctagtgttagagaggcttacaaatgtttgccattctcataagtgttttgaacttgatctttgtgacttgtgcttttttagcttctctcttgaatcagagtatcattgtcttcctccaaggagttagaatttcccagtttaaaacaaaaagggaaatgtcctaggttttctttgtgcttctcatttttcctttgttgattcaattcctgtgatttttgttctcttccctgaagtgctttacagtgcatggaatctccatcattgttattttaacgatagtaattcacagtcctcagaagcctatttttaaagcagaagcaaaaaagaaaaacaaaataacaaaaacaacccttcctcttttctctcatctcacctctctgtgttgattactaatcatcttagatattattgctagtggatgtatggtagatgggttgaagcttttctgataattattacacaatttaaaacaacatatatatttaaaataaatatatacagtaaatatattgagccatgttaacctgccaatgagatctgtgaaaaaataatggcctcatttttctctttttaatttcttttacccttttgtgaagcagctatacgtggcatacatgtatttaaagaaaaaaaaatagatgtagagtgttttttttacacttttaacttagcatgtggtgttgaagtattactgtagatcaagtttgtcttccgcactaagatgtgaggaaattgtgatttgttctctccaccacaaatgaattacacatttattatcttctatcattttgaaacactgcagtttaccatgggacactgtatatatttcttgccataatggtaaaggactgattgatatatttaagagttaataaatttgtgatttctgctgacagtgcgtccatctttatttcttcagaagaggtactgtatgtatgcctgcatagtgctggccagtgtcaagggcagtgtgtcctactctggtctcatttagtacataacaatttgcacttggtgagaatggcaagttaattgttctctgtgagcaaaacaatggtctcttctgggaaaatgttgctgagaacaatatagttaacaactaagactcctaaaagcttctctaaactgtaccctccaatccagccttcacatggctgctttttttttttttttttaatacgaacctgtccttgtaacactttgatgttatcatttctgggatacaggcaagcaccccagctcctgctactccccagcttgaacttgagcatacatggatgctcagcttcttttgatttgctaaaaacatcacacttgctcacatgcctgtttatgctgttcatgttgtttatgtttcttacctagaataaatagtctcttcccctacttcttttcccgacttcttactttttcctaagattcagtgtacagcatcatgctccacagcaaaccttcctaggccctattctgggcttgccttccctctcaaaacctacataatagattgtatttacctctcctgtcaaccacattgttttgaaaatatatttctatttgtgtctcctctactgcagtataatgtctccatgggcaagaactgtgtattcatcattgcattcctaaacccaaaccaaggccaggaatggagatatcattgataaatagttgttgaattgaggccaagcccttttgataacagaagcctcaaggggtacccagatagtccttgttttaatgatgggttctctcaccactgtcttgatgctctgagcaagttacctcttccctctgaccctcagtttccatatttgtaaaatgagaataaacataccaacttaataaagatattgtgaggattaatgggtacagagtgactagaatgatatttgatagaaattaaatggtagcagtataactattctgatcactgacattaatattcctattgttattattctttgctcacgagggtatacaactcttgttttgctgttgggctgccctctttatgtaggtttactgttaatgctgaggatatactcggactcaaatgtctcagcagaaggctgagagacaccaaatgaagtggtcatctagctgaatgtaggaaaaatgaaatgtagtagcaaatcagtatattctaaggaaattttcaaggaatattaatcttcacccaaattttgaatttttatgtaaaaaattataatttaagggtaaacatagatgacacagctttcgagtgatttcattgaataaaattctactgacttctatgaa

SEQ ID NO: 4262 - DNA, 1820 bp, Homo sapiens
  source 1..1820: mol_type = unassigned DNA
atggccaccaccgccacctgcacccgtttcaccgacgactaccagctcttcgaggagcttggcaagggtgctttctctgtggtccgcaggtgtgtgaagaaaacctccacgcaggagtacgcagcaaaaatcatcaataccaagaagttgtctgcccgggatcaccagaaactagaacgtgaggctcggatatgtcgacttctgaaacatccaaacatcgtgcgcctccatgacagtatttctgaagaagggtttcactacctcgtgtttgaccttgttaccggcggggagctgtttgaagacattgtggccagagagtactacagtgaagcagatgccagccactgtatacatcagattctggagagtgttaaccacatccaccagcatgacatcgtccacagggacctgaagcctgagaacctgctgctggcgagtaaatgcaagggtgccgccgtcaagctggctgattttggcctagccatcgaagtacagggagagcagcaggcttggtttggttttgctggcaccccaggttacttgtcccctgaggtcttgaggaaagatccctatggaaaacctgtggatatctgggcctgcggggtcatcctgtatatcctcctggtgggctatcctcccttctgggatgaggatcagcacaagctgtatcagcagatcaaggctggagcctatgatttcccatcaccagaatgggacacggtaactcctgaagccaagaacttgatcaaccagatgctgaccataaacccagcaaagcgcatcacggctgaccaggctctcaagcacccgtgggtctgtcaacgatccacggtggcatccatgatgcatcgtcaggagactgtggagtgtttgcgcaagttcaatgcccggagaaaactgaagggtgccatcctcacgaccatgcttgtctccaggaacttctcagctgccaaaagcctattgaacaagaagtcggatggcggtgtcaagaaaaggaagtcgagttccagcgtgcacctaatgccacagagcaacaacaaaaacagtctcgtaagcccagcccaagagcccgcgcccttgcagacggccatggagccacaaaccactgtggtacacaacgctacagatgggatcaagggctccacagagagctgcaacaccaccacagaagatgaggacctcaaagtgcgaaaacaggagatcattaagattacagaacagctgattgaagccatcaacaatggggactttgaggcctacacgaagatttgtgatccaggcctcacttcctttgagcctgaggcccttggtaacctcgtggaggggatggatttccataagttttactttgagaatctcctgtccaagaacagcaagcctatccataccaccatcctaaacccacacgtccacgtgattggggaggacgcagcgtgcatcgcctacatccgcctcacccagtacatcgacgggcagggtcggcctcgcaccagccagtcagaagagacccgggtctggcaccgtcgggatggcaagtggctcaatgtccactatcactgctcaggggcccctgccgcaccgctgcagtgagctcagccacaggggctttaggagattccagccggaggtccaaccttcgcagccagtggctctggagggcctgagtgacagcggcagtcctgtttgtttgaggtttaaaacaattcaattacaaaagcggcagcagccaatgcacgcccctgcatgcagccctcccgcccgcccttcgtgtctgtctctgctgtaccgaggtgttttttacatttaagaaaaaaaaaaaa

SEQ ID NO: 4263 - DNA, 3720 bp, Homo sapiens
  source 1..3720: mol_type = unassigned DNA
agtctcgcggtgctgccgggctcagccccgtctcctcctcttgctccctcggccgggcggcggtgactgtgcaccgacgtcggcgcgggctgcaccgccgcgtccgcccgcccgccagcatggccaccaccgccacctgcacccgtttcaccgacgactaccagctcttcgaggagcttggcaagggtgctttctctgtggtccgcaggtgtgtgaagaaaacctccacgcaggagtacgcagcaaaaatcatcaataccaagaagttgtctgcccgggatcaccagaaactagaacgtgaggctcggatatgtcgacttctgaaacatccaaacatcgtgcgcctccatgacagtatttctgaagaagggtttcactacctcgtgtttgaccttgttaccggcggggagctgtttgaagacattgtggccagagagtactacagtgaagcagatgccagccactgtatacatcagattctggagagtgttaaccacatccaccagcatgacatcgtccacagggacctgaagcctgagaacctgctgctggcgagtaaatgcaagggtgccgccgtcaagctggctgattttggcctagccatcgaagtacagggagagcagcaggcttggtttggttttgctggcaccccaggttacttgtcccctgaggtcttgaggaaagatccctatggaaaacctgtggatatctgggcctgcggggtcatcctgtatatcctcctggtgggctatcctcccttctgggatgaggatcagcacaagctgtatcagcagatcaaggctggagcctatgatttcccatcaccagaatgggacacggtaactcctgaagccaagaacttgatcaaccagatgctgaccataaacccagcaaagcgcatcacggctgaccaggctctcaagcacccgtgggtctgtcaacgatccacggtggcatccatgatgcatcgtcaggagactgtggagtgtttgcgcaagttcaatgcccggagaaaactgaagggtgccatcctcacgaccatgcttgtctccaggaacttctcagttggcaggcagagctccgcccccgcctcgcctgccgcgagcgccgccggcctggccgggcaagctgccaaaagcctattgaacaagaagtcggatggcggtgtcaagaaaaggaagtcgagttccagcgtgcacctaatggagccacaaaccactgtggtacacaacgctacagatgggatcaagggctccacagagagctgcaacaccaccacagaagatgaggacctcaaagtgcgaaaacaggagatcattaagattacagaacagctgattgaagccatcaacaatggggactttgaggcctacacgaagatttgtgatccaggcctcacttcctttgagcctgaggcccttggtaacctcgtggaggggatggatttccataagttttactttgagaatctcctgtccaagaacagcaagcctatccataccaccatcctaaacccacacgtccacgtgattggggaggacgcagcgtgcatcgcctacatccgcctcacccagtacatcgacgggcagggtcggcctcgcaccagccagtcagaagagacccgggtctggcaccgtcgggatggcaagtggctcaatgtccactatcactgctcaggggcccctgccgcaccgctgcagtgagctcagccacaggggctttaggagattccagccggaggtccaaccttcgcagccagtggctctggagggcctgagtgacagcggcagtcctgtttgtttgaggtttaaaacaattcaattacaaaagcggcagcagccaatgcacgcccctgcatgcagccctcccgcccgcccttcgtgtctgtctctgctgtaccgaggtgttttttacatttaagaaaaaaaaaaaagaaaaaaagattgtttaaaaaaaaaaggaatccataccatgatgcgttttaaaaccaccgacagcccttgggttggcaagaaggcaggagtatgtatgaggtccatcctggcatgagcagtggctcacccaccggccttgaagaggtgagcttggcctctctggtccccatggacttagggggaccaggcaagaactctgacagagctttgggggccgtgatgtgattgcagctcctgaggtggcctgcttaccccaggtctaggaatgaacttctttggaacttgcataggcgcctagaatggggctgatgagaacatcgtgaccatcagacctacttgggagagaacgcagagctcccagcctgctgtggaggcagctgagaagtggtggcctcaggactgagagcccggacgttgctgtactgtcttgtttagtgtagaagggaagagaattggtgctgcagaagtgtacccgccatgaagccgatgagaaacctcgtgttagtctgacatgcactcactcatccatttctataggatgcacaatgcatgtgggccctaatattgaggccttatccctgcagctaggagggggaggggttgttgctgctttgcttcgtgttttcttctaacctggcaaggagagagccaggccctggtcagggctcccgtgccgcctttggcggttctgtttctgtgctgatctggaccatctttgtcttgccttttcacggtagtggtccccatgctgaccctcatctgggcctgggccctctgccaagtgcccctgtgggatgggaggagtgaggcagtgggagaagaggtggtggtcgtttctatgcattcaggctgcctttggggctgcctcccttcttattcttccttgctgcacgtccatctcttttcctgtctttgagattgacctgactgctctggcaagaagaagaggtgtccttacagaggcctctttactgaccaactgaagtatagacttactgctggacaatctgcatgggcatcacccctccccgcatgtaacccaaaagaggtgtccagagccaaggcttctaccttcattgtccctctctgtgctcaaggagttccattccaggaggaagagatctataccctaagcagatagcaaagaagataatggaggagcaattggtcatggccttggtttccctcaaaacaacgctgcagatttatctgcacaaacatctccacttttgggggaaaggtgggtagattccagttccctggactaccttcaggaggcacgagagctgggagaagaggcaaagctacaggtttacttgggagccagctgagaagagagcagactcacaggtgctggtgcttggatttagccaggctcctccgagcacctcatgcatgtcccagcccctgggccctagccctttcctgccctgcagtctgcagtgccagcacgcaaatcccttcaccacagggtttcgttttgctggcttgaagacaaatggtcttagaattcattgagacccatagcttcatatggctgctccagccccacttcttagcattcttactcctcttctggggctaatgtcagcatctatagacaatagactattaaaaaatcaccttttaaacaagaaacggaaggcatttgatgcagaatttttgcatgacaacatagaaataatttaaaaatagtgtttgttctgaatgttggtagacccttcatagctttgttacaatgaaaccttgaactgaaaatatttaataaaataacctttaaacagtc

SEQ ID NO: 4264 - DNA, 3812 bp, Homo sapiens
  source 1..3812: mol_type = unassigned DNA
ggtaaagtctcgcggtgctgccgggctcagccccgtctcctcctcttgctccctcggccgggcggcggtgactgtgcaccgacgtcggcgcgggctgcaccgccgcgtccgcccgcccgccagcatggccaccaccgccacctgcacccgtttcaccgacgactaccagctcttcgaggagcttggcaagggtgctttctctgtggtccgcaggtgtgtgaagaaaacctccacgcaggagtacgcagcaaaaatcatcaataccaagaagttgtctgcccgggatcaccagaaactagaacgtgaggctcggatatgtcgacttctgaaacatccaaacatcgtgcgcctccatgacagtatttctgaagaagggtttcactacctcgtgtttgaccttgttaccggcggggagctgtttgaagacattgtggccagagagtactacagtgaagcagatgccagccactgtatacatcagattctggagagtgttaaccacatccaccagcatgacatcgtccacagggacctgaagcctgagaacctgctgctggcgagtaaatgcaagggtgccgccgtcaagctggctgattttggcctagccatcgaagtacagggagagcagcaggcttggtttggttttgctggcaccccaggttacttgtcccctgaggtcttgaggaaagatccctatggaaaacctgtggatatctgggcctgcggggtcatcctgtatatcctcctggtgggctatcctcccttctgggatgaggatcagcacaagctgtatcagcagatcaaggctggagcctatgatttcccatcaccagaatgggacacggtaactcctgaagccaagaacttgatcaaccagatgctgaccataaacccagcaaagcgcatcacggctgaccaggctctcaagcacccgtgggtctgtcaacgatccacggtggcatccatgatgcatcgtcaggagactgtggagtgtttgcgcaagttcaatgcccggagaaaactgaagggtgccatcctcacgaccatgcttgtctccaggaacttctcagctgccaaaagcctattgaacaagaagtcggatggcggtgtcaagccacagagcaacaacaaaaacagtctcgtaagcccagcccaagagcccgcgcccttgcagacggccatggagccacaaaccactgtggtacacaacgctacagatgggatcaagggctccacagagagctgcaacaccaccacagaagatgaggacctcaaagctgccccgctccgcactgggaatggcagctcggtgcctgaaggacggagctcccgggacagaacagccccctctgcaggcatgcagccccagccttctctctgctcctcagccatgcgaaaacaggagatcattaagattacagaacagctgattgaagccatcaacaatggggactttgaggcctacacgaagatttgtgatccaggcctcacttcctttgagcctgaggcccttggtaacctcgtggaggggatggatttccataagttttactttgagaatctcctgtccaagaacagcaagcctatccataccaccatcctaaacccacacgtccacgtgattggggaggacgcagcgtgcatcgcctacatccgcctcacccagtacatcgacgggcagggtcggcctcgcaccagccagtcagaagagacccgggtctggcaccgtcgggatggcaagtggctcaatgtccactatcactgctcaggggcccctgccgcaccgctgcagtgagctcagccacaggggctttaggagattccagccggaggtccaaccttcgcagccagtggctctggagggcctgagtgacagcggcagtcctgtttgtttgaggtttaaaacaattcaattacaaaagcggcagcagccaatgcacgcccctgcatgcagccctcccgcccgcccttcgtgtctgtctctgctgtaccgaggtgttttttacatttaagaaaaaaaaaaaagaaaaaaagattgtttaaaaaaaaaaggaatccataccatgatgcgttttaaaaccaccgacagcccttgggttggcaagaaggcaggagtatgtatgaggtccatcctggcatgagcagtggctcacccaccggccttgaagaggtgagcttggcctctctggtccccatggacttagggggaccaggcaagaactctgacagagctttgggggccgtgatgtgattgcagctcctgaggtggcctgcttaccccaggtctaggaatgaacttctttggaacttgcataggcgcctagaatggggctgatgagaacatcgtgaccatcagacctacttgggagagaacgcagagctcccagcctgctgtggaggcagctgagaagtggtggcctcaggactgagagcccggacgttgctgtactgtcttgtttagtgtagaagggaagagaattggtgctgcagaagtgtacccgccatgaagccgatgagaaacctcgtgttagtctgacatgcactcactcatccatttctataggatgcacaatgcatgtgggccctaatattgaggccttatccctgcagctaggagggggaggggttgttgctgctttgcttcgtgttttcttctaacctggcaaggagagagccaggccctggtcagggctcccgtgccgcctttggcggttctgtttctgtgctgatctggaccatctttgtcttgccttttcacggtagtggtccccatgctgaccctcatctgggcctgggccctctgccaagtgcccctgtgggatgggaggagtgaggcagtgggagaagaggtggtggtcgtttctatgcattcaggctgcctttggggctgcctcccttcttattcttccttgctgcacgtccatctcttttcctgtctttgagattgacctgactgctctggcaagaagaagaggtgtccttacagaggcctctttactgaccaactgaagtatagacttactgctggacaatctgcatgggcatcacccctccccgcatgtaacccaaaagaggtgtccagagccaaggcttctaccttcattgtccctctctgtgctcaaggagttccattccaggaggaagagatctataccctaagcagatagcaaagaagataatggaggagcaattggtcatggccttggtttccctcaaaacaacgctgcagatttatctgcacaaacatctccacttttgggggaaaggtgggtagattccagttccctggactaccttcaggaggcacgagagctgggagaagaggcaaagctacaggtttacttgggagccagctgagaagagagcagactcacaggtgctggtgcttggatttagccaggctcctccgagcacctcatgcatgtcccagcccctgggccctagccctttcctgccctgcagtctgcagtgccagcacgcaaatcccttcaccacagggtttcgttttgctggcttgaagacaaatggtcttagaattcattgagacccatagcttcatatggctgctccagccccacttcttagcattcttactcctcttctggggctaatgtcagcatctatagacaatagactattaaaaaatcaccttttaaacaagaaacggaaggcatttgatgcagaatttttgcatgacaacatagaaataatttaaaaatagtgtttgttctgaatgttggtagacccttcatagctttgttacaatgaaaccttgaactgaaaatatttaataaaataacctttaaacagtc

SEQ ID NO: 4265 - DNA, 3563 bp, Homo sapiens
  source 1..3563: mol_type = unassigned DNA
ggtgactgtgcaccgacgtcggcgcgggctgcaccgccgcgtccgcccgcccgccagcatggccaccaccgccacctgcacccgtttcaccgacgactaccagctcttcgaggagcttggcaagggtgctttctctgtggtccgcaggtgtgtgaagaaaacctccacgcaggagtacgcagcaaaaatcatcaataccaagaagttgtctgcccgggatcaccagaaactagaacgtgaggctcggatatgtcgacttctgaaacatccaaacatcgtgcgcctccatgacagtatttctgaagaagggtttcactacctcgtgtttgaccttgttaccggcggggagctgtttgaagacattgtggccagagagtactacagtgaagcagatgccagccactgtatacatcagattctggagagtgttaaccacatccaccagcatgacatcgtccacagggacctgaagcctgagaacctgctgctggcgagtaaatgcaagggtgccgccgtcaagctggctgattttggcctagccatcgaagtacagggagagcagcaggcttggtttggttttgctggcaccccaggttacttgtcccctgaggtcttgaggaaagatccctatggaaaacctgtggatatctgggcctgcggggtcatcctgtatatcctcctggtgggctatcctcccttctgggatgaggatcagcacaagctgtatcagcagatcaaggctggagcctatgatttcccatcaccagaatgggacacggtaactcctgaagccaagaacttgatcaaccagatgctgaccataaacccagcaaagcgcatcacggctgaccaggctctcaagcacccgtgggtctgtcaacgatccacggtggcatccatgatgcatcgtcaggagactgtggagtgtttgcgcaagttcaatgcccggagaaaactgaagggtgccatcctcacgaccatgcttgtctccaggaacttctcagctgccaaaagcctattgaacaagaagtcggatggcggtgtcaaggagccacaaaccactgtggtacacaacgctacagatgggatcaagggctccacagagagctgcaacaccaccacagaagatgaggacctcaaagtgcgaaaacaggagatcattaagattacagaacagctgattgaagccatcaacaatggggactttgaggcctacacgaagatttgtgatccaggcctcacttcctttgagcctgaggcccttggtaacctcgtggaggggatggatttccataagttttactttgagaatctcctgtccaagaacagcaagcctatccataccaccatcctaaacccacacgtccacgtgattggggaggacgcagcgtgcatcgcctacatccgcctcacccagtacatcgacgggcagggtcggcctcgcaccagccagtcagaagagacccgggtctggcaccgtcgggatggcaagtggctcaatgtccactatcactgctcaggggcccctgccgcaccgctgcagtgagctcagccacaggggctttaggagattccagccggaggtccaaccttcgcagccagtggctctggagggcctgagtgacagcggcagtcctgtttgtttgaggtttaaaacaattcaattacaaaagcggcagcagccaatgcacgcccctgcatgcagccctcccgcccgcccttcgtgtctgtctctgctgtaccgaggtgttttttacatttaagaaaaaaaaaaaagaaaaaaagattgtttaaaaaaaaaaggaatccataccatgatgcgttttaaaaccaccgacagcccttgggttggcaagaaggcaggagtatgtatgaggtccatcctggcatgagcagtggctcacccaccggccttgaagaggtgagcttggcctctctggtccccatggacttagggggaccaggcaagaactctgacagagctttgggggccgtgatgtgattgcagctcctgaggtggcctgcttaccccaggtctaggaatgaacttctttggaacttgcataggcgcctagaatggggctgatgagaacatcgtgaccatcagacctacttgggagagaacgcagagctcccagcctgctgtggaggcagctgagaagtggtggcctcaggactgagagcccggacgttgctgtactgtcttgtttagtgtagaagggaagagaattggtgctgcagaagtgtacccgccatgaagccgatgagaaacctcgtgttagtctgacatgcactcactcatccatttctataggatgcacaatgcatgtgggccctaatattgaggccttatccctgcagctaggagggggaggggttgttgctgctttgcttcgtgttttcttctaacctggcaaggagagagccaggccctggtcagggctcccgtgccgcctttggcggttctgtttctgtgctgatctggaccatctttgtcttgccttttcacggtagtggtccccatgctgaccctcatctgggcctgggccctctgccaagtgcccctgtgggatgggaggagtgaggcagtgggagaagaggtggtggtcgtttctatgcattcaggctgcctttggggctgcctcccttcttattcttccttgctgcacgtccatctcttttcctgtctttgagattgacctgactgctctggcaagaagaagaggtgtccttacagaggcctctttactgaccaactgaagtatagacttactgctggacaatctgcatgggcatcacccctccccgcatgtaacccaaaagaggtgtccagagccaaggcttctaccttcattgtccctctctgtgctcaaggagttccattccaggaggaagagatctataccctaagcagatagcaaagaagataatggaggagcaattggtcatggccttggtttccctcaaaacaacgctgcagatttatctgcacaaacatctccacttttgggggaaaggtgggtagattccagttccctggactaccttcaggaggcacgagagctgggagaagaggcaaagctacaggtttacttgggagccagctgagaagagagcagactcacaggtgctggtgcttggatttagccaggctcctccgagcacctcatgcatgtcccagcccctgggccctagccctttcctgccctgcagtctgcagtgccagcacgcaaatcccttcaccacagggtttcgttttgctggcttgaagacaaatggtcttagaattcattgagacccatagcttcatatggctgctccagccccacttcttagcattcttactcctcttctggggctaatgtcagcatctatagacaatagactattaaaaaatcaccttttaaacaagaaacggaaggcatttgatgcagaatttttgcatgacaacatagaaataatttaaaaatagtgtttgttctgaatgttggtagacccttcatagctttgttacaatgaaaccttgaactgaaaatatttaataaaataacctttaaacagtc

SEQ ID NO: 4266 - DNA, 1822 bp, Homo sapiens
  source 1..1822: mol_type = unassigned DNA
gtcggcgcgggctgcaccgccgcgtccgcccgcccgccagcatggccaccaccgccacctgcacccgtttcaccgacgactaccagctcttcgaggagcttggcaagggtgctttctctgtggtccgcaggtgtgtgaagaaaacctccacgcaggagtacgcagcaaaaatcatcaataccaagaagttgtctgcccgggatcaccagaaactagaacgtgaggctcggatatgtcgacttctgaaacatccaaacatcgtgcgcctccatgacagtatttctgaagaagggtttcactacctcgtgtttgaccttgttaccggcggggagctgtttgaagacattgtggccagagagtactacagtgaagcagatgccagccactgtatacatcagattctggagagtgttaaccacatccaccagcatgacatcgtccacagggacctgaagcctgagaacctgctgctggcgagtaaatgcaagggtgccgccgtcaagctggctgattttggcctagccatcgaagtacagggagagcagcaggcttggtttggttttgctggcaccccaggttacttgtcccctgaggtcttgaggaaagatccctatggaaaacctgtggatatctgggcctgcggggtcatcctgtatatcctcctggtgggctatcctcccttctgggatgaggatcagcacaagctgtatcagcagatcaaggctggagcctatgatttcccatcaccagaatgggacacggtaactcctgaagccaagaacttgatcaaccagatgctgaccataaacccagcaaagcgcatcacggctgaccaggctctcaagcacccgtgggtctgtcaacgatccacggtggcatccatgatgcatcgtcaggagactgtggagtgtttgcgcaagttcaatgcccggagaaaactgaagggtgccatcctcacgaccatgcttgtctccaggaacttctcagttggcaggcagagctccgcccccgcctcgcctgccgcgagcgccgccggcctggccgggcaagctgccaaaagcctattgaacaagaagtcggatggcggtgtcaaggagccacaaaccactgtggtacacaacgctacagatgggatcaagggctccacagagagctgcaacaccaccacagaagatgaggacctcaaagtgcgaaaacaggagatcattaagattacagaacagctgattgaagccatcaacaatggggactttgaggcctacacgaagatttgtgatccaggcctcacttcctttgagcctgaggcccttggtaacctcgtggaggggatggatttccataagttttactttgagaatctcctgtccaagaacagcaagcctatccataccaccatcctaaacccacacgtccacgtgattggggaggacgcagcgtgcatcgcctacatccgcctcacccagtacatcgacgggcagggtcggcctcgcaccagccagtcagaagagacccgggtctggcaccgtcgggatggcaagtggctcaatgtccactatcactgctcaggggcccctgccgcaccgctgcagtgagctcagccacaggggctttaggagattccagccggaggtccaaccttcgcagccagtggctctggagggcctgagtgacagcggcagtcctgtttgtttgaggtttaaaacaattcaattacaaaagcggcagcagccaatgcacgcccctgcatgcagccctcccgcccgcccttcgtgtctgtctctgctgtaccgaggtgttttttacatttaagaaaaaaaaaaaa

SEQ ID NO: 4267 - DNA, 3743 bp, Homo sapiens
  source 1..3743: mol_type = unassigned DNA
ggtaaagtctcgcggtgctgccgggctcagccccgtctcctcctcttgctccctcggccgggcggcggtgactgtgcaccgacgtcggcgcgggctgcaccgccgcgtccgcccgcccgccagcatggccaccaccgccacctgcacccgtttcaccgacgactaccagctcttcgaggagcttggcaagggtgctttctctgtggtccgcaggtgtgtgaagaaaacctccacgcaggagtacgcagcaaaaatcatcaataccaagaagttgtctgcccgggatcaccagaaactagaacgtgaggctcggatatgtcgacttctgaaacatccaaacatcgtgcgcctccatgacagtatttctgaagaagggtttcactacctcgtgtttgaccttgttaccggcggggagctgtttgaagacattgtggccagagagtactacagtgaagcagatgccagccactgtatacatcagattctggagagtgttaaccacatccaccagcatgacatcgtccacagggacctgaagcctgagaacctgctgctggcgagtaaatgcaagggtgccgccgtcaagctggctgattttggcctagccatcgaagtacagggagagcagcaggcttggtttggttttgctggcaccccaggttacttgtcccctgaggtcttgaggaaagatccctatggaaaacctgtggatatctgggcctgcggggtcatcctgtatatcctcctggtgggctatcctcccttctgggatgaggatcagcacaagctgtatcagcagatcaaggctggagcctatgatttcccatcaccagaatgggacacggtaactcctgaagccaagaacttgatcaaccagatgctgaccataaacccagcaaagcgcatcacggctgaccaggctctcaagcacccgtgggtctgtcaacgatccacggtggcatccatgatgcatcgtcaggagactgtggagtgtttgcgcaagttcaatgcccggagaaaactgaagggtgccatcctcacgaccatgcttgtctccaggaacttctcagctgccaaaagcctattgaacaagaagtcggatggcggtgtcaaggagccacaaaccactgtggtacacaacgctacagatgggatcaagggctccacagagagctgcaacaccaccacagaagatgaggacctcaaagctgccccgctccgcactgggaatggcagctcggtgcctgaaggacggagctcccgggacagaacagccccctctgcaggcatgcagccccagccttctctctgctcctcagccatgcgaaaacaggagatcattaagattacagaacagctgattgaagccatcaacaatggggactttgaggcctacacgaagatttgtgatccaggcctcacttcctttgagcctgaggcccttggtaacctcgtggaggggatggatttccataagttttactttgagaatctcctgtccaagaacagcaagcctatccataccaccatcctaaacccacacgtccacgtgattggggaggacgcagcgtgcatcgcctacatccgcctcacccagtacatcgacgggcagggtcggcctcgcaccagccagtcagaagagacccgggtctggcaccgtcgggatggcaagtggctcaatgtccactatcactgctcaggggcccctgccgcaccgctgcagtgagctcagccacaggggctttaggagattccagccggaggtccaaccttcgcagccagtggctctggagggcctgagtgacagcggcagtcctgtttgtttgaggtttaaaacaattcaattacaaaagcggcagcagccaatgcacgcccctgcatgcagccctcccgcccgcccttcgtgtctgtctctgctgtaccgaggtgttttttacatttaagaaaaaaaaaaaagaaaaaaagattgtttaaaaaaaaaaggaatccataccatgatgcgttttaaaaccaccgacagcccttgggttggcaagaaggcaggagtatgtatgaggtccatcctggcatgagcagtggctcacccaccggccttgaagaggtgagcttggcctctctggtccccatggacttagggggaccaggcaagaactctgacagagctttgggggccgtgatgtgattgcagctcctgaggtggcctgcttaccccaggtctaggaatgaacttctttggaacttgcataggcgcctagaatggggctgatgagaacatcgtgaccatcagacctacttgggagagaacgcagagctcccagcctgctgtggaggcagctgagaagtggtggcctcaggactgagagcccggacgttgctgtactgtcttgtttagtgtagaagggaagagaattggtgctgcagaagtgtacccgccatgaagccgatgagaaacctcgtgttagtctgacatgcactcactcatccatttctataggatgcacaatgcatgtgggccctaatattgaggccttatccctgcagctaggagggggaggggttgttgctgctttgcttcgtgttttcttctaacctggcaaggagagagccaggccctggtcagggctcccgtgccgcctttggcggttctgtttctgtgctgatctggaccatctttgtcttgccttttcacggtagtggtccccatgctgaccctcatctgggcctgggccctctgccaagtgcccctgtgggatgggaggagtgaggcagtgggagaagaggtggtggtcgtttctatgcattcaggctgcctttggggctgcctcccttcttattcttccttgctgcacgtccatctcttttcctgtctttgagattgacctgactgctctggcaagaagaagaggtgtccttacagaggcctctttactgaccaactgaagtatagacttactgctggacaatctgcatgggcatcacccctccccgcatgtaacccaaaagaggtgtccagagccaaggcttctaccttcattgtccctctctgtgctcaaggagttccattccaggaggaagagatctataccctaagcagatagcaaagaagataatggaggagcaattggtcatggccttggtttccctcaaaacaacgctgcagatttatctgcacaaacatctccacttttgggggaaaggtgggtagattccagttccctggactaccttcaggaggcacgagagctgggagaagaggcaaagctacaggtttacttgggagccagctgagaagagagcagactcacaggtgctggtgcttggatttagccaggctcctccgagcacctcatgcatgtcccagcccctgggccctagccctttcctgccctgcagtctgcagtgccagcacgcaaatcccttcaccacagggtttcgttttgctggcttgaagacaaatggtcttagaattcattgagacccatagcttcatatggctgctccagccccacttcttagcattcttactcctcttctggggctaatgtcagcatctatagacaatagactattaaaaaatcaccttttaaacaagaaacggaaggcatttgatgcagaatttttgcatgacaacatagaaataatttaaaaatagtgtttgttctgaatgttggtagacccttcatagctttgttacaatgaaaccttgaactgaaaatatttaataaaataacctttaaacagtc

SEQ ID NO: 4268 - DNA, 3818 bp, Homo sapiens
  source 1..3818: mol_type = unassigned DNA
ggtaaagtctcgcggtgctgccgggctcagccccgtctcctcctcttgctccctcggccgggcggcggtgactgtgcaccgacgtcggcgcgggctgcaccgccgcgtccgcccgcccgccagcatggccaccaccgccacctgcacccgtttcaccgacgactaccagctcttcgaggagcttggcaagggtgctttctctgtggtccgcaggtgtgtgaagaaaacctccacgcaggagtacgcagcaaaaatcatcaataccaagaagttgtctgcccgggatcaccagaaactagaacgtgaggctcggatatgtcgacttctgaaacatccaaacatcgtgcgcctccatgacagtatttctgaagaagggtttcactacctcgtgtttgaccttgttaccggcggggagctgtttgaagacattgtggccagagagtactacagtgaagcagatgccagccactgtatacatcagattctggagagtgttaaccacatccaccagcatgacatcgtccacagggacctgaagcctgagaacctgctgctggcgagtaaatgcaagggtgccgccgtcaagctggctgattttggcctagccatcgaagtacagggagagcagcaggcttggtttggttttgctggcaccccaggttacttgtcccctgaggtcttgaggaaagatccctatggaaaacctgtggatatctgggcctgcggggtcatcctgtatatcctcctggtgggctatcctcccttctgggatgaggatcagcacaagctgtatcagcagatcaaggctggagcctatgatttcccatcaccagaatgggacacggtaactcctgaagccaagaacttgatcaaccagatgctgaccataaacccagcaaagcgcatcacggctgaccaggctctcaagcacccgtgggtctgtcaacgatccacggtggcatccatgatgcatcgtcaggagactgtggagtgtttgcgcaagttcaatgcccggagaaaactgaagggtgccatcctcacgaccatgcttgtctccaggaacttctcagctgccaaaagcctattgaacaagaagtcggatggcggtgtcaagaaaaggaagtcgagttccagcgtgcacctaatgccacagagcaacaacaaaaacagtctcgtaagcccagcccaagagcccgcgcccttgcagacggccatggagccacaaaccactgtggtacacaacgctacagatgggatcaagggctccacagagagctgcaacaccaccacagaagatgaggacctcaaaggctcggtgcctgaaggacggagctcccgggacagaacagccccctctgcaggcatgcagccccagccttctctctgctcctcagccatgcgaaaacaggagatcattaagattacagaacagctgattgaagccatcaacaatggggactttgaggcctacacgaagatttgtgatccaggcctcacttcctttgagcctgaggcccttggtaacctcgtggaggggatggatttccataagttttactttgagaatctcctgtccaagaacagcaagcctatccataccaccatcctaaacccacacgtccacgtgattggggaggacgcagcgtgcatcgcctacatccgcctcacccagtacatcgacgggcagggtcggcctcgcaccagccagtcagaagagacccgggtctggcaccgtcgggatggcaagtggctcaatgtccactatcactgctcaggggcccctgccgcaccgctgcagtgagctcagccacaggggctttaggagattccagccggaggtccaaccttcgcagccagtggctctggagggcctgagtgacagcggcagtcctgtttgtttgaggtttaaaacaattcaattacaaaagcggcagcagccaatgcacgcccctgcatgcagccctcccgcccgcccttcgtgtctgtctctgctgtaccgaggtgttttttacatttaagaaaaaaaaaaaagaaaaaaagattgtttaaaaaaaaaaggaatccataccatgatgcgttttaaaaccaccgacagcccttgggttggcaagaaggcaggagtatgtatgaggtccatcctggcatgagcagtggctcacccaccggccttgaagaggtgagcttggcctctctggtccccatggacttagggggaccaggcaagaactctgacagagctttgggggccgtgatgtgattgcagctcctgaggtggcctgcttaccccaggtctaggaatgaacttctttggaacttgcataggcgcctagaatggggctgatgagaacatcgtgaccatcagacctacttgggagagaacgcagagctcccagcctgctgtggaggcagctgagaagtggtggcctcaggactgagagcccggacgttgctgtactgtcttgtttagtgtagaagggaagagaattggtgctgcagaagtgtacccgccatgaagccgatgagaaacctcgtgttagtctgacatgcactcactcatccatttctataggatgcacaatgcatgtgggccctaatattgaggccttatccctgcagctaggagggggaggggttgttgctgctttgcttcgtgttttcttctaacctggcaaggagagagccaggccctggtcagggctcccgtgccgcctttggcggttctgtttctgtgctgatctggaccatctttgtcttgccttttcacggtagtggtccccatgctgaccctcatctgggcctgggccctctgccaagtgcccctgtgggatgggaggagtgaggcagtgggagaagaggtggtggtcgtttctatgcattcaggctgcctttggggctgcctcccttcttattcttccttgctgcacgtccatctcttttcctgtctttgagattgacctgactgctctggcaagaagaagaggtgtccttacagaggcctctttactgaccaactgaagtatagacttactgctggacaatctgcatgggcatcacccctccccgcatgtaacccaaaagaggtgtccagagccaaggcttctaccttcattgtccctctctgtgctcaaggagttccattccaggaggaagagatctataccctaagcagatagcaaagaagataatggaggagcaattggtcatggccttggtttccctcaaaacaacgctgcagatttatctgcacaaacatctccacttttgggggaaaggtgggtagattccagttccctggactaccttcaggaggcacgagagctgggagaagaggcaaagctacaggtttacttgggagccagctgagaagagagcagactcacaggtgctggtgcttggatttagccaggctcctccgagcacctcatgcatgtcccagcccctgggccctagccctttcctgccctgcagtctgcagtgccagcacgcaaatcccttcaccacagggtttcgttttgctggcttgaagacaaatggtcttagaattcattgagacccatagcttcatatggctgctccagccccacttcttagcattcttactcctcttctggggctaatgtcagcatctatagacaatagactattaaaaaatcaccttttaaacaagaaacggaaggcatttgatgcagaatttttgcatgacaacatagaaataatttaaaaatagtgtttgttctgaatgttggtagacccttcatagctttgttacaatgaaaccttgaactgaaaatatttaataaaataacctttaaacagtc

SEQ ID NO: 4269 - DNA, 3908 bp, Homo sapiens
  source 1..3908: mol_type = unassigned DNA
ggtaaagtctcgcggtgctgccgggctcagccccgtctcctcctcttgctccctcggccgggcggcggtgactgtgcaccgacgtcggcgcgggctgcaccgccgcgtccgcccgcccgccagcatggccaccaccgccacctgcacccgtttcaccgacgactaccagctcttcgaggagcttggcaagggtgctttctctgtggtccgcaggtgtgtgaagaaaacctccacgcaggagtacgcagcaaaaatcatcaataccaagaagttgtctgcccgggatcaccagaaactagaacgtgaggctcggatatgtcgacttctgaaacatccaaacatcgtgcgcctccatgacagtatttctgaagaagggtttcactacctcgtgtttgaccttgttaccggcggggagctgtttgaagacattgtggccagagagtactacagtgaagcagatgccagccactgtatacatcagattctggagagtgttaaccacatccaccagcatgacatcgtccacagggacctgaagcctgagaacctgctgctggcgagtaaatgcaagggtgccgccgtcaagctggctgattttggcctagccatcgaagtacagggagagcagcaggcttggtttggttttgctggcaccccaggttacttgtcccctgaggtcttgaggaaagatccctatggaaaacctgtggatatctgggcctgcggggtcatcctgtatatcctcctggtgggctatcctcccttctgggatgaggatcagcacaagctgtatcagcagatcaaggctggagcctatgatttcccatcaccagaatgggacacggtaactcctgaagccaagaacttgatcaaccagatgctgaccataaacccagcaaagcgcatcacggctgaccaggctctcaagcacccgtgggtctgtcaacgatccacggtggcatccatgatgcatcgtcaggagactgtggagtgtttgcgcaagttcaatgcccggagaaaactgaagggtgccatcctcacgaccatgcttgtctccaggaacttctcagttggcaggcagagctccgcccccgcctcgcctgccgcgagcgccgccggcctggccgggcaagctgccaaaagcctattgaacaagaagtcggatggcggtgtcaagaaaaggaagtcgagttccagcgtgcacctaatgccacagagcaacaacaaaaacagtctcgtaagcccagcccaagagcccgcgcccttgcagacggccatggagccacaaaccactgtggtacacaacgctacagatgggatcaagggctccacagagagctgcaacaccaccacagaagatgaggacctcaaagctgccccgctccgcactgggaatggcagctcggtgcctgaaggacggagctcccgggacagaacagccccctctgcaggcatgcagccccagccttctctctgctcctcagccatgcgaaaacaggagatcattaagattacagaacagctgattgaagccatcaacaatggggactttgaggcctacacgaagatttgtgatccaggcctcacttcctttgagcctgaggcccttggtaacctcgtggaggggatggatttccataagttttactttgagaatctcctgtccaagaacagcaagcctatccataccaccatcctaaacccacacgtccacgtgattggggaggacgcagcgtgcatcgcctacatccgcctcacccagtacatcgacgggcagggtcggcctcgcaccagccagtcagaagagacccgggtctggcaccgtcgggatggcaagtggctcaatgtccactatcactgctcaggggcccctgccgcaccgctgcagtgagctcagccacaggggctttaggagattccagccggaggtccaaccttcgcagccagtggctctggagggcctgagtgacagcggcagtcctgtttgtttgaggtttaaaacaattcaattacaaaagcggcagcagccaatgcacgcccctgcatgcagccctcccgcccgcccttcgtgtctgtctctgctgtaccgaggtgttttttacatttaagaaaaaaaaaaaagaaaaaaagattgtttaaaaaaaaaaggaatccataccatgatgcgttttaaaaccaccgacagcccttgggttggcaagaaggcaggagtatgtatgaggtccatcctggcatgagcagtggctcacccaccggccttgaagaggtgagcttggcctctctggtccccatggacttagggggaccaggcaagaactctgacagagctttgggggccgtgatgtgattgcagctcctgaggtggcctgcttaccccaggtctaggaatgaacttctttggaacttgcataggcgcctagaatggggctgatgagaacatcgtgaccatcagacctacttgggagagaacgcagagctcccagcctgctgtggaggcagctgagaagtggtggcctcaggactgagagcccggacgttgctgtactgtcttgtttagtgtagaagggaagagaattggtgctgcagaagtgtacccgccatgaagccgatgagaaacctcgtgttagtctgacatgcactcactcatccatttctataggatgcacaatgcatgtgggccctaatattgaggccttatccctgcagctaggagggggaggggttgttgctgctttgcttcgtgttttcttctaacctggcaaggagagagccaggccctggtcagggctcccgtgccgcctttggcggttctgtttctgtgctgatctggaccatctttgtcttgccttttcacggtagtggtccccatgctgaccctcatctgggcctgggccctctgccaagtgcccctgtgggatgggaggagtgaggcagtgggagaagaggtggtggtcgtttctatgcattcaggctgcctttggggctgcctcccttcttattcttccttgctgcacgtccatctcttttcctgtctttgagattgacctgactgctctggcaagaagaagaggtgtccttacagaggcctctttactgaccaactgaagtatagacttactgctggacaatctgcatgggcatcacccctccccgcatgtaacccaaaagaggtgtccagagccaaggcttctaccttcattgtccctctctgtgctcaaggagttccattccaggaggaagagatctataccctaagcagatagcaaagaagataatggaggagcaattggtcatggccttggtttccctcaaaacaacgctgcagatttatctgcacaaacatctccacttttgggggaaaggtgggtagattccagttccctggactaccttcaggaggcacgagagctgggagaagaggcaaagctacaggtttacttgggagccagctgagaagagagcagactcacaggtgctggtgcttggatttagccaggctcctccgagcacctcatgcatgtcccagcccctgggccctagccctttcctgccctgcagtctgcagtgccagcacgcaaatcccttcaccacagggtttcgttttgctggcttgaagacaaatggtcttagaattcattgagacccatagcttcatatggctgctccagccccacttcttagcattcttactcctcttctggggctaatgtcagcatctatagacaatagactattaaaaaatcaccttttaaacaagaaacggaaggcatttgatgcagaatttttgcatgacaacatagaaataatttaaaaatagtgtttgttctgaatgttggtagacccttcatagctttgttacaatgaaaccttgaactgaaaatatttaataaaataacctttaaacagtc

SEQ ID NO: 4270 - DNA, 1618 bp, Homo sapiens
  source 1..1618: mol_type = unassigned DNA
cgacttctgaaacatccaaacatcgtgcgcctccatgacagtatttctgaagaagggtttcactacctcgtgtttgaccttgttaccggcggggagctgtttgaagacattgtggccagagagtactacagtgaagcagatgccagccactgtatacatcagattctggagagtgttaaccacatccaccagcatgacatcgtccacagggacctgaagcctgagaacctgctgctggcgagtaaatgcaagggtgccgccgtcaagctggctgattttggcctagccatcgaagtacagggagagcagcaggcttggtttggttttgctggcaccccaggttacttgtcccctgaggtcttgaggaaagatccctatggaaaacctgtggatatctgggcctgcggggtcatcctgtatatcctcctggtgggctatcctcccttctgggatgaggatcagcacaagctgtatcagcagatcaaggctggagcctatgatttcccatcaccagaatgggacacggtaactcctgaagccaagaacttgatcaaccagatgctgaccataaacccagcaaagcgcatcacggctgaccaggctctcaagcacccgtgggtctgtcaacgatccacggtggcatccatgatgcatcgtcaggagactgtggagtgtttgcgcaagttcaatgcccggagaaaactgaagggtgccatcctcacgaccatgcttgtctccaggaacttctcagctgccaaaagcctattgaacaagaagtcggatggcggtgtcaagccacagagcaacaacaaaaacagtctcgtaagcccagcccaagagcccgcgcccttgcagacggccatggagccacaaaccactgtggtacacaacgctacagatgggatcaagggctccacagagagctgcaacaccaccacagaagatgaggacctcaaagtgcgaaaacaggagatcattaagattacagaacagctgattgaagccatcaacaatggggactttgaggcctacacgaagatttgtgatccaggcctcacttcctttgagcctgaggcccttggtaacctcgtggaggggatggatttccataagttttactttgagaatctcctgtccaagaacagcaagcctatccataccaccatcctaaacccacacgtccacgtgattggggaggacgcagcgtgcatcgcctacatccgcctcacccagtacatcgacgggcagggtcggcctcgcaccagccagtcagaagagacccgggtctggcaccgtcgggatggcaagtggctcaatgtccactatcactgctcaggggcccctgccgcaccgctgcagtgagctcagccacaggggctttaggagattccagccggaggtccaaccttcgcagccagtggctctggagggcctgagtgacagcggcagtcctgtttgtttgaggtttaaaacaattcaattacaaaagcggcagcagccaatgcacgcccctgcatgcagccctcccgcccgcccttcgtgtctgtctctgctgtaccgaggtgttttttacatttaagaaaaaaaaaaaagaaaaaaagattgtttaaaaaaaaaa

SEQ ID NO: 4271 - DNA, 1224 bp, Homo sapiens
  source 1..1224: mol_type = unassigned DNA
gtatcagcagatcaaggctggagcctatgatttcccatcaccagaatgggacacggtaactcctgaagccaagaacttgatcaaccagatgctgaccataaacccagcaaagcgcatcacggctgaccaggctctcaagcacccgtgggtctgtcaacgatccacggtggcatccatgatgcatcgtcaggagactgtggagtgtttgcgcaagttcaatgcccggagaaaactgaagggtgccatcctcacgaccatgcttgtctccaggaacttctcagctgccaaaagcctattgaacaagaagtcggatggcggtgtcaagccacagagcaacaacaaaaacagtctcgtaagcccagcccaagagcccgcgcccttgcagacggccatggagccacaaaccactgtggtacacaacgctacagatgggatcaagggctccacagagagctgcaacaccaccacagaagatgaggacctcaaagctgccccgctccgcactgggaatggcagctcggtgcctgaaggacggagctcccgggacagaacagccccctctgcaggcatgcagccccagccttctctctgctcctcagccatgcgaaaacaggagatcattaagattacagaacagctgattgaagccatcaacaatggggactttgaggcctacacgaagatttgtgatccaggcctcacttcctttgagcctgaggcccttggtaacctcgtggaggggatggatttccataagttttactttgagaatctcctgtccaagaacagcaagcctatccataccaccatcctaaacccacacgtccacgtgattggggaggacgcagcgtgcatcgcctacatccgcctcacccagtacatcgacgggcagggtcggcctcgcaccagccagtcagaagagacccgggtctggcaccgtcgggatggcaagtggctcaatgtccactatcactgctcaggggcccctgccgcaccgctgcagtgagctcagccacaggggctttaggagattccagccggaggtccaaccttcgcagccagtggctctggagggcctgagtgacagcggcagtcctgtttgtttgaggtttaaaacaattcaattacaaaagcggcagcagccaatgcacgcccctgcatgcagccctcccgcccgcccttcgtgtctgtctctgctgtaccgaggtgttttttacatttaag

SEQ ID NO: 4272 - DNA, 1092 bp, Homo sapiens
  source 1..1092: mol_type = unassigned DNA
aaagtctcgcggtgctgccgggctcagccccgtctcctcctcttgctccctcggccgggcggcggtgactgtgcaccgacgtcggcgcgggctgcaccgccgcgtccgcccgcccgccagcatggccaccaccgccacctgcacccgtttcaccgacgactaccagctcttcgaggagcttggcaagggtgctttctctgtggtccgcaggtgtgtgaagaaaacctccacgcaggagtacgcagcaaaaatcatcaataccaagaagttgtctgcccgggatcaccagaaactagaacgtgaggctcggatatgtcgacttctgaaacatccaaacatcgcaacgatccacggtggcatccatgatgcatcgtcaggagactgtggagtgtttgcgcaagttcaatgcccggagaaaactgaagggtgccatcctcacgaccatgcttgtctccaggaacttctcagctgccaaaagcctattgaacaagaagtcggatggcggtgtcaagccacagagcaacaacaaaaacagtctcgtaagcccagcccaagagcccgcgcccttgcagacggccatggagccacaaaccactgtggtacacaacgctacagatgggatcaagggctccacagagagctgcaacaccaccacagaagatgaggacctcaaagctcggtgcctgaaggacggagctcccgggacagaacagccccctctgcaggcatgcagccccagccttctctctgctcctcagccattacgtctgtgctggaggatgcctttgtctgctgcttttcctcccaccatctatccttgcagagtttctaagcacaaccctcttcgcccgtggggccccagtcaggtcatccagatgggtctggtggggttggagagggtgtgtgtgttgtgggtgcacacctgcctgctgcttttggaagccgatcgaactccttgcttcccttaacctgctgcttgctcacctggagctgtggcctagcggggctgacggctgtggggccccctcctggatgtgcctttggctgcgctgccctgtcccaactgtgctgcttggctgtgctggcccggct

SEQ ID NO: 4273 - DNA, 1362 bp, Homo sapiens
  source 1..1362: mol_type = unassigned DNA
cggcccgggaggcggaggcgcgggggaggaggccccgcttggctcctcagccccggatgctgcatgacttcatccttccgccggctcccctgctgaggtagggccggtccggcagcaagcccgccgcccgcgccccgccgcagtcccgctcccgccccgcgcccaccccgcgcccgccatgtccgagatcctgccctacagcgaagacaagatgggccgcttcggcgcagaccccgagggctccgacctctccttcagctgccgcctgcaggacaccaactccttcttcgcgggcaaccaggccaagcgaccccccaagctgggccagatcggccgagccaagcgagtggtgatcgaggatgaccggatagacgacgtgctgaaggggatgggggagaagccgccgtccggagtgtagacgcgccggctcgggcggcgggctccgggcccagcctcgcagcggccaggagcgcgggccggcgatgcggctgccggcgcccccccgccccggcccaggcgcccgcgggcgggggctgcagggccgtgccgccgccgccgccaggcactccggagctgtccgcttcagcaccacggcggccgcggtagcggcggcgcggacccgcccggaacccgccgccgcgctcatgcactttaaaacctcgggccgcagccccaccccgcacaccggaacggacacggagacccgcggcccccagcccccggcccgccccctcccgcacggctcccctgccccgcccccctccggccagtctggtctgcagaccgggcggccgccggtgtcggaccgcgcgcggccagggatgtttggctgcgtacttgcatgagctttccacccacttgagcccagtcctccgggccgttcctcgcccccacccctgtctggcgtgaccccagcctcagcctctttctaagggacttcctcagcacatttgtatttttatatccgactctttgtttactggctctgctcatggttcctgccctcccctcagtctcggccacgctcttctgcgcctggcagataggatgggtgttgaggctgggatgagacaagcccccgacacggttaccaaccacatggccagtctgcccaggcctgaccccaggaggctttctggcagaccccttctccccaaggtatcatcaccttccaagggcccagatccgattttaccttggacccctgcgtcttgcccctgggaacccaaatggggactgctctgaacctttggatgacatctgtggccccggagatgttctcaacccaggggtgcccttcgtaaatgttcctccatcctcactgtaccaggagtgtgtgaataaacacagaccccctctgtg

SEQ ID NO: 4274 - DNA, 12240 bp, Homo sapiens
  source 1..12240: mol_type = unassigned DNA
aagctccagcatccggagccgccctagccggcaccgcggcagccacagcctgggagagagaaaggaaagagggagggcggcgggaaaggctcggcgcgggaggagggcgggtgaggagggaaggagcgagggggagggagcctctctcctcagcggtgcagctagtctccctccagcgggcggcgactccgggttccccctcgcgccctctcgcagaggctcgcccccttccccgcccaccgtccctgcgagcgcgggcggcggcggtgggcgtgtgcgcgcgtgaaggacgccgcctctctctcgctcctgcgttcgcaggcggcggctggcggccggcttctcgctcgggcagcggcggcggcggcggcggcggcttccggagtcccgctgcgaagatgctcaaagtcacggtgccctcctgctccgcctcgtcctgctcttcggtcaccgccagtgcggccccggggaccgcgagcctcgtcccggattactggatcgacggctccaacagggatgcgctgagcgatttcttcgaggtggagtcggagctgggacggggtgctacatccattgtgtacagatgcaaacagaaggggacccagaagccttatgctctcaaagtgttaaagaaaacagtggacaaaaaaatcgtaagaactgagataggagttcttcttcgcctctcacatccaaacattataaaacttaaagagatatttgaaacccctacagaaatcagtctggtcctagaactcgtcacaggaggagaactgtttgataggattgtggaaaagggatattacagtgagcgagatgctgcagatgccgttaaacaaatcctggaggcagttgcttatctacatgaaaatgggattgtccatcgtgatctcaaaccagagaatcttctttatgcaactccagccccagatgcaccactcaaaatcgctgattttggactctctaaaattgtggaacatcaagtgctcatgaagacagtatgtggaaccccagggtactgcgcacctgaaattcttagaggttgtgcctatggacctgaggtggacatgtggtctgtaggaataatcacctacatcttactttgtggatttgaaccattctatgatgaaagaggcgatcagttcatgttcaggagaattctgaattgtgaatattactttatctccccctggtgggatgaagtatctctaaatgccaaggacttggtcagaaaattaattgttttggatccaaagaaacggctgactacatttcaagctctccagcatccgtgggtcacaggtaaagcagccaattttgtacacatggataccgctcaaaagaagctccaagaattcaatgcccggcgtaagcttaaggcagcggtgaaggctgtggtggcctcttcgcgcctgggaagtgccagcagcagccatggcagcatccaggagagccacaaggctagccgagacccttctccaatccaagatggcaacgaggacatgaaagctattccagaaggagagaaaattcaaggcgatggggcccaagccgcagttaagggggcacaggctgagctgatgaaggtgcaagccttagagaaagttaaaggtgcagatataaatgctgaagaggcccccaaaatggtgcccaaggcagtggaggatgggataaaggtggctgacctggaactagaggagggcctagcagaggagaagctgaagactgtggaggaggcagcagctcccagagaagggcaaggaagctctgctgtgggttttgaagttccacagcaagatgtgatcctgccagagtactaaacagcttccttcagatctggaagccaaacaccggcattttatgtactttgtccttcagcaagaaaggtgtggaagcatgatatgtactatagtgattctgtttttgaggtgcaaaaaacatacatatataccagttggtaattctaacttcaatgcatgtgactgctttatgaaaataatagtgtcttctatggcatgtaatggatacctaataccgatgagttaaatcttgcaagttaacacaacgtaacacttaaaagcatacattttcagcaaccagtggcacatatttgaagtgaatagtagcaaattgtttttgctttgaaaatctagccatcctacatcctttggatttcttcacaaggcagtaattcctttgaactactgcttagctaatactaggtagtgctaaaagacatgttcccataacttttacaacattttactttttatcattgatgtgttcaaactgtttacaaggagatgcttatagatgatagttgtacatatgtgcaaaaaaaaatccacttgcaatggtaagaaattgaagtatccttaaaggccatgaagccatatgtccctaaagcctgtgtggagaatgctttattttattcttatttatatacactatattaataataaccaaaatgttctaagattctgccattttacaaccctggaggaagtaatttacaaactcacgctgagttccattctttccttcacctgctctccaataagatgactttctgatagacaaagcttagggtgtaataaacagggaagaaaagaaggtaagactgtacttaaactgatgaagataagattgattccttttcattttccagataaaattgtatttactcatgaatttatacaactttacagataagaacattttaatggataaactctataattaccaagttgcaaatatttagaaaattctatttcacaggttagtgccaaaatgtcttcatagagtaggaataatattccattttaagattattcattattgactttaatagagtaagaaaacattattgtttatcaaagctctttttttatccaattgatggttatctacacatatcacttataaactaaagttatttatgaaaagctagtatgtctttttctcgtatttggaatgaaagtacccacattttacaatgtagtgttgagaatgtggctgccaataaatttagcacaatgcaatttatttaccttaaaaaacaaacaaaaacaaaaataaagaaaaatactgatttcaaatcagactcttaaaaagctggaacattagacctgatattttattatgatttttcccagaataagtttaatttctctttgactttcatagaaacactttccccttatagaaattgcactatctccaatttatttctagtttgagttgaaatgaatattttatcagattaattatgtgtcacatttttggtgggttttctcaattttaaaaaagaattcattttaaaaaataattattttcagagaccaaataaagacaataaaaatgactatcacataaaaatccttgttaaaaaagagatcttaaattatgttggctctccctcaaaactattaaattagaaaacgaaactaaagctccagtttgtagaggctgttggacctcagtagacattcttcttttcaatcacaaatctctctctactactgttctcatgggaagaaaacaaggtaggacttcttatctttcatagtttaagaatctgacaggtcactgatatggagcccctgaagaagcacatcatctgggctcagaagattattttttgttttgttttatttgtactatctagtagagagcacttttcttattccctctttccttccttcctcatttaattattccctctcagaattcccatgttgtccattataaggggctcgctatttttaacctttaagaatgtcttctttgttaagcattaagatttccatttaagaggatcaatttcctgttgtactttttaccatgagactgaaacacacacacacacacacacacacacacacacacacacacacgtgttggaagagcaaagagagggaagggggtctttttagaaagtggcacttggcgcttagctgaaagatcagaacacatcattcctccctgcccacccccatattgttccaagggcagttgttacattatttcaacactagagtagggcggactgcattgtttggccctgagaactatagaaacaacgttgcaaataccatgcccaatgtgtattttagaatttactcatttaaatgagtgcatattaccattcctccatgtgagtactcgagttgataattccctctatctttttaaacccataaactacatttttaaaaaaatcaatgggagttttaaattttgactcatgttaaagataagattctgataatgactatatagtgactaatttcattgtttcagtaggaaacaaatcaaactttcaaaaatgttggtcatttcagtcaaattattcaaagatttcatatacatacatcctaagttaggataattatgttaacatttttgaaagaacagccaatgtttatattgcttgttaaaatggaatgtattgtctatctcaaagattacttagctaaataatagtagacaaatggagatttaatttcacaaaatacttcataacatcactcctaattggcaatatagtcacaaagcaaaagaattcaaatttcagcaaacaataaattacattttacattttagagctaacacttatcacattacattatgggtttttattttgagataagttcagctacatagcataaactaggtttttttttataaccatgaaggacagtcttgaattatttcccccattaacaaagtctaattggaatccagtattttttctcaaactgtaatttcacttgtcccaggacacataaataggtaaaaattagaataatatcgtggtagaagttaattgtccagaacaagtgcattatataaatataatgcaagcacatgtcatttaagattttctattagtcacattttaagaaaaatagatgaaagtatagtatttttaatccaattcatccaaattattctatcgatatatagtcaatattaaaatttaatgtgatattttgaattctttatttttatactgttttcaaaatcaagagtgtatgttaggcctttgggacatcaagtgctcaatagtcacatgtggctagtggctaccatattagacagcactagtctagagtactttttattttaagcaaagtgacacttgaagttctatgcttagatttaagtggcctcagttttcacattgaggagctggtgggaggccacaaagaaagtgtttcagaaatgttacacactgagtaaaagcttattgaccactcctgcccattcatttacttcagaggagaaatgattcctaacatgacttcaaagaacgggcattactaaattatctactgaccaatccctctgattcctgatgggccctggagtcttgactacagcctagagtctcctgagtactgccatgatgccaatagcattcttgcttaccaaaatctactctcagccaactatgtgtcttcattcaggaagaactgcacatagaatctgattttgaggcctggattaagcttcatgccatccttgtatcacaggcaatatgtctttctggaaatctaatgaaccataccaaatctgcatgatgaagattgtgtaatgatggtgatatcatgccagttatcctcaaagtgggaatatgaccattagctggcattttttaagatttccttagaagggtttaatcaacactgccattacacatggatttaacaaaagacttttgaaaattttttacatactgattttagaataatcctcaaggttctatagtcatttttagtggaagacttaaaaagaaaggaacaatttttactgtgacttcaatttcatagtattttaaacatattttgtaattcagaatgtttagcaatccctatgtcctgtttcacatgcatggtaactgatggtgggttgcctacaggctgaagatttggagagagccattttgtttcataaatcagtttttattgcacagaagcagctggttgtatttcaagttggaaaaagaaaagtaaatgccagaaaaggcaaaggataaacttagtaagccatttattttgttttagaattgtttttgcaaagcaaatttttttaaaaaaaggtcaacaaagtgaatcagcactagcattttcttgatggttgactcaatgtataattaacaaatatacatagcagagtcaattaatcatagtgccattatgtcacttatttgtcattgcaaagtattcagtcatgttgtctagatttactttagatggtgcaaaatttccagatagtaacctatgtaaaaggatttgtaatttccttgtaattcctgcctattagtccatattctgatttccttatgttcatcactgatatgttcctgatcagggtcattgctagtagttgagcatttactggttgaacattgtttaatggttagatgttatgtgtgtctgcatttaaaaaaattgtgtacatgttatttcactattggtattacaatattcataaccacatgataaacagaaatgtacccaataatttcctataaaatttttcaaagtccttttattcccctgacacactcagggtgaatttttgtctccttggcaaataagaaaaaaaaggagagagaccactggagagatatcagcaaaccacccacagtaaccaagttcagtatttcctctttctatattttgaccaatatattaagagcaaattttgtcattattactccttgtggctattacctgagatcagataatataatctcagctcataaagcttggccatgtctatacttatcttggagagcaataacaaacttgattaatttgtttggttatttaaaattccaactttcataaatgctctgtgatgtactcaagacgattgggttgtgtgatactaacttccttcaagaactcagtctgttccctgttgtctggttcagaggtccaccagggcaaaatagaagccttgccgagaaagtgaactgtcttactccttcaaaggaatcagatgttgctctagagaagactccaggcatctacctggttgagctcaaatgaggcaagtgggagaaaacctcttctcatcctctgattgaaagtgatacaatttgaatattggtatattgtcattggtcagtaatggaaaaatgagattccaccagtgggttactcttttcttgtcttggtttgctatgccttatcccagatcagtgttttgttccatccctatggtcatctctaaagccctgacaggagcatcccagactggagaaatgcagcgtatctgtggcccagaattttgtttgatactctaaacagcaatgcaaagactgcaaaatcacactattctaaacagttgttttcagctcattttgaagattgacctggaaaacatatagatacagaatatatacatttaatcgttgcttgtgattcattgtgtcaaaataacatttaattttcactctgattaatctttattttccatttaaaagattatttcaggctacttaaatacaagaccttgcattctaatttttgaaagcggttgttttccctgagctctctctcaactttgacagtttgtgaatgataaaaagttactaggtttgtcctttccttgatagatgtagagcagttcatctgttttgtaaaggtacagttaagcataactataggctgggcgtgatagttcatgcctgtaatcccaacactttgggaggccgaggttggcagatcacctgaggtcaggagtttgagaccagcctggccaacgtggtgaaacccctaatacaaaaattagctgggcatggtggcacgctcctgtaatctcagctactcaggaggctgaggcaggagaatctcttgaacccgggaggcagaggttgcagtgagccaagatcatgccactgcactccagcctggacaacaagagcgaaactccgtcaaaaaaaaatatatatatatgaccataaattgaaaactatcatctcatactgcctccttttaacctgacctattttatatacctacaatacagttaatatgcagcagcgtagagaacaaatagcatattcataatttgtaattttgtttttctttttacggcacccttaagtctcagtaatattttaaaagtcctctataagccaaaagaacgttgtaacatatccatttattaaggagttaggcctaaacatagtaatagtagtccattccatgtccaacagatgttgctgtgtttctttcaacatttttcaatgtcttgtgagtttagtgagtgggtacagctgagttggggtttaggtgatttcttatgcccaatgaactaaaggtatcagtaaaagattattagtaaacaaattagttatttatgctcttacttgaatgtcagtcattcattttatctctcgtctttgagatacacacattaaaacttatgtgcatatttttttaaagagtaatttccacataattccccaagaactgaactcaaatctccaaaaatttttcagaactcaagcaaccaatgattcacagagcaaatctaccaaagccccatttttattggaacacaggcatgctcatttatgtacatattgtttgtggctgcttttatgttgtcaaggcagagttgagtactttcaacagagaccatatggactgcaaagcctaaaatgtgtatctggacccttacagtaaaacaatgaccctgggttttcatggcaccccaatgcctttttggtgacttgcaggaatacagattcctatattccagtttgtttttttttttttctccttagcttaaggttcgtattcccatttgcttctgagaaagttaggaaaattttgttttatgttgcagatgctctcacaacaataattgtgctggagatagatacaacttagtgaaattttcctacagaactaaaaacgcaaaattgcatcactcctgaagaaaagaaatttagagtatgaattgagttggttgagagtagaattaaaaagatttctagcactttgagcatgttttagaaatttgatccttacatttaaaattatgtaaatgacatctttcactggcatttgctcacatttaagtcaatctacagctgttacttactaagctaagaaataagaagatccctatggttctgaatctctcataatattctgaagtaatttatatcaattgaattttcattaatcattttaggaaatattatgttttattttgtggcattatatgacaatgactttctcaacaatagctcagggaatacgcaaacagccagctcttttatgtaagaaagccattttctaatccccacgctttcctgagtgttacgtattttatttctttgaaaagagagggccttgagtaaatgctttcgtttgctttccttacatatttagaaatccaagaagggcccttgtcttagtctatttctgtcacagagaaattgttcattccaaaatatccaccttaagggaagctagtgaccgagatatggagaaaaacataggcattcatgacctttgtgtttccgtttgactttcaacatctgtaaccaaaaggtcacaaatgaaatatttagtagaaagtgcaatatcaatttattaggagtacctaaaattataactctaaataatatacagcaatattattgctctattattacagcaatcaataatataatatagccactaggatacactcgctgtagaactcagaacaaaagatatcaatcttctgccagtccgcatcattatgtgtagcagagactttactggaatgagtgaggggaaagataacaaaatgtagattaggattccacattctcccctgcccatcttcttgattgctcagtttgaagacgatcattgatggacaaatactttagaaatgaatgaagtcaatagctaatgtttctcccagaaactaaacaacatagtttaggggatattaggcctacattctaatcacattgtaaggaagtgattttctaattttgaagcttcccaggagcagccccctccaggaacaattttccctgtgaactttcactgagaaactattatatgccatggaggagtcaaagatgaattaaatccaatgctatcctccaggagtgagctttgtagttggagagaaaagccaaccttatagatacaacctgtacatatataacctatgctgcatttaggcagatgataagccctaggaatggaaagagggaaaagctcccttttgccaggaatgatgaaggaaagctttatggaaacacaggctgtatgtgaaagatgggtgaatctttgcaggtagggaagaagtagggggcatgtctggctgagaaccggcctgatcatagagtggaaaaatgaaaggcagaggtgaaggaagaatactaaatgtgaaaggctgaaatacacagggaagtgttgccagtgtgcaacagaatctcatctcgtgcaaaattgaattagacttccttactccttccttactctgggtaggtccatgtgcagcctttcctcagagcatctagcctgacatacttggctcatctgctgtgcttctaagccaaataaaaatcatcaaacacatcgaagatatttttgggagtcaccaggttaaagcaaagcctcagtcactgaaagcaaaaactgaattggccaggtctccactgacaaaacagagtaaatgatagtatgacagataatttcaagttttccaagactccaatttctgaaaaatgtctcatgactccaaaaaatcacgtacttcctaaaatgttgccagtggaggaccgaatcaaggttattgctgacctcattttttcaaccttttcagttatttgacctgaataggcaatcccccaggatttctgattgaattctacctgaaagtttagattttaaaagacaacctgtaggaagctaagtctcaggcaacaaaatttaaaaccatcagaacttgtttctccaaacatcaacctgctcctgtcaagtcctttttcatctctcccttttgtccctttacatactgttttgtaagttccttttgatatcatttattgcaggcagtatttttacatccatcttcaagaaacttgggagacatttagacatttagtatgtgtacttttagttgtcttgcctctttatttcagataatgcctgtgattagtgaatggcggcattattcctgaagacaaatgaaggaagatagggagcaagattgactgtcatttgaatgatggaagagaagtagaattactgtgaggttacaaaaatcgtaagttagcagacattgagaaaggaaaacttcctacttgggcttttcaggcttatgtgacattatctggatgtgttttctagtctttcctaaaggagaaatttttattcctgggttgctgaaagctttctggactaaaaggatataagcagctcaatagcagcatagaggattagattaatggaacagcactgcatacaggaaagctacatctccaatagtttaggctgcaagtcagtagccaaacacaagagcatgtaagatttggaggacaaagtataaatattttaagtttacacaaccaagattataggctaccttcccaacttctaatttgaagagcactgaaaatggagctgtgaacacttcatttttaaaacctgacaatatggtgctattgactacttaatacaaagatatattacaatatttttaggtaaatgtattaagtctggcctgggcataaatgtacatacagaaaatgtttgtagagaattcatcaaaatcatgcccatttgctgttgtagagctacagtattcttcaatggtggtgactgaccagtgagtttctacttcttacagatgggacacaacagtcatgggctgtctcagctgcccaaagcctgaggcagaccacatgagagctgtggcttcttcttggattcaggttggataacccaattcagtaattaaatatgtaaattttggggggggttggggggtgttttctaggaacttgaagagtacgtgacattataaaaaatgggtgttggaagactaattgtagaaatttgacctgagggccaatgttacttggtgtaagttcactcagacagacatgtcagaacatgcccaaagaagcctatatcttgctgctgggaaatgtaaagcagttggcatgtagaatacgataataaatcatttaagaaaccaccaaaa

SEQ ID NO: 4275 - DNA, 557 bp, Homo sapiens
  source 1..557: mol_type = unassigned DNA
agtgccaccagcagcgacgacagcatttattccaactgaagacttcactcaaaggcggcggctggcggccggcttctcgctcgggcagcggcggcggcggcggcggcggcttccggagtcccgctgcgaagatgctcaaagtcacggtgccctcctgctccgcctcgtcctgctcttcggtcaccgccagtgcggccccggggaccgcgagcctcgtcccggattactggatcgacggctccaacagggatgcgctgagcgatttcttcgaggtggagtcggagctgggacggggtgctacatccattgtgtacagatgcaaacagaaggggacccagaagccttatgctctcaaagtgttaaagaaaacagtggacaaaaaaatcgtaagaactgagataggagttcttcttcgcctctcacatccaaacattataaaacttaaagagatatttgaaacccctacagaaatcagtctggtcctagaactcgtcacaggaggagaactgtttgataggattgtggaaaagggatattacagtgagcgagatgctgca

SEQ ID NO: 4276 - DNA, 1640 bp, Homo sapiens
  source 1..1640: mol_type = unassigned DNA
cccggacccaggtgctgccagggcggcggctggcggccggcttctcgctcgggcagcggcggcggcggcggcggcggcttccggagtcccgctgcgaagatgctcaaagtcacggtgccctcctgctccgcctcgtcctgctcttcggtcaccgccagtgcggccccggggaccgcgagcctcgtcccggattactggatcgacggctccaacagggatgcgctgagcgatttcttcgaggtggagtcggagctgggacggggtgctacatccattgtgtacagatgcaaacagaaggggacccagaagccttatgctctcaaagtgttaaagaaaacagtggacaaaaaaatcgtaagaactgagataggagttcttcttcgcctctcacatccaaacattataaaacttaaagagatatttgaaacccctacagaaatcagtctggtcctagaactcgtcacaggaggagaactgtttgataggattgtggaaaagggatattacagtgagcgagatgctgcagatgccgttaaacaaatcctggaggcagttgcttatctacatgaaaatgggattgtccatcgtgatctcaaaccagagaatcttctttatgcaactccagccccagatgcaccactcaaaatcgctgattttggactctctaaaattgtggaacatcaagtgctcatgaagacagtatgtggaaccccagggtactgcgcacctgaaattcttagaggttgtgcctatggacctgaggtggacatgtggtctgtaggaataatcacctacatcttactttgtggatttgaaccattctatgatgaaagaggcgatcagttcatgttcaggagaattctgaattgtgaatattactttatctccccctggtgggatgaagtatctctaaatgccaaggacttggtcagaaaattaattgttttggatccaaagaaacggctgactacatttcaagctctccagcatccgtgggtcacaggtaaagcagccaattttgtacacatggataccgctcaaaagaagctccaagaattcaatgcccggcgtaagcttaaggcagcggtgaaggctgtggtggcctcttcgcgcctgggaagtgccagcagcagccatggcagcatccaggagagccacaaggctagccgagacccttctccaatccaagatggcaacgaggacatgaaagctattccagaaggagagaaaattcaaggcgatggggcccaagccgcagttaagggggcacaggctgagctgatgaaggtgcaagccttagagaaagttaaaggtgcagatataaatgctgaagaggcccccaaaatggtgcccaaggcagtggaggatgggataaaggtggctgacctggaactagaggagggcctagcagaggagaagctgaagactgtggaggaggcagcagctcccagagaagggcaaggaagctctgctgtgggttttgaagttccacagcaagatgtgatcctgccagagtactaaacagcttccttcagatctggaagccaaacaccggcattttatgtactttgtccttcagcaagaaaggtgtggaagcatgatatgtactatagtgattctgtttttgaggtgcaaaaaac

SEQ ID NO: 4277 - DNA, 8298 bp, Homo sapiens
  source 1..8298: mol_type = unassigned DNA
ccgttttcgaagccctccacgctgcggccgctatcccctccggaccatggccgacgacgacgtgctgttcgaggatgtgtacgagctgtgcgaggtgatcggaaagggtcccttcagtgttgtacgacgatgtatcaacagagaaactgggcaacaatttgctgtaaaaattgttgatgtagccaagttcacatcaagtccagggttaagtacagaagatctaaagcgggaagccagtatctgtcatatgctgaaacatccacacattgtagagttattggagacatatagctcagatggaatgctttacatggttttcgaatttatggatggagcagatctgtgttttgaaatcgtaaagcgagctgacgctggttttgtgtacagtgaagctgtagccagccattatatgagacagatactggaagctctacgctactgccatgataataacataattcacagggatgtgaagccccactgtgttctccttgcctcaaaagaaaactcggcacctgttaaacttggaggctttggggtagctattcaattaggggagtctggacttgtagctggaggacgtgttggaacacctcattttatggcaccagaagtggtcaaaagagagccttacggaaagcctgtagacgtctgggggtgcggtgtgatcctttttatcctgctcagtggttgtttgcctttttacggaaccaaggaaagattgtttgaaggcattattaaaggaaaatataagatgaatccaaggcagtggagccatatctctgaaagtgccaaagacctagtacgtcgcatgctgatgctggatccagctgaaaggatcactgtttatgaagcactgaatcacccatggcttaaggagcgggatcgttacgcctacaagattcatcttccagaaacagtagagcagctgaggaaattcaatgcaaggaggaaactaaagggtgcagtactagccgctgtgtcaagtcacaaattcaactcattctatggggatccccctgaagagttaccagatttctccgaagaccctacctcctcagtgcttcttattgtttcacgagcagtctcacaggtgctggacagcctggaagagattcatgcgcttacagactgcagtgaaaaggacctagattttctacacagtgttttccaggatcagcatcttcacacactactagatctgtatgacaaaattaacacaaagtcttcaccacaaatcaggaatcctccaagcgatgcagtacagagagccaaagaggtattggaagaaatttcatgttaccctgagaataacgacgcaaaggaactaaagcgtattttaacacaacctcatttcatggccttacttcagactcacgacgtagtggcacatgaagtttacagtgatgaagcattgagggtcacacctcctcccacctctccctatttaaacggcgattctccagaaagtgctaacggagacatggatatggagaatgtgaccagagttcggctggtacagtttcaaaagaacacagatgaaccaatgggaatcactttaaaaatgaatgaactaaatcattgtattgttgcaagaattatgcatgggggcatgattcacaggcaaggtacacttcatgttggtgatgaaattcgagaaatcaatggcatcagtgtggctaaccaaacagtggaacaactgcaaaaaatgcttagggaaatgcgggggagtattaccttcaagattgtgccaagttaccgcactcagtcttcgtcctgtgagagagattccccttccacttccagacagtccccagctaatggtcatagcagcactaacaattctgtttcggacttgccatcaactacccaaccaaaaggacgacagatctatgtaagagcacaatttgaatatgatccagccaaggatgacctcatcccctgtaaagaagctggcattcgattcagagttggtgacatcatccagattattagtaaggatgatcataattggtggcagggtaaactggaaaactccaaaaatggaactgcaggtctcattccttctcctgaacttcaggaatggcgagtagcttgcattgccatggagaagaccaaacaggagcagcaggccagctgtacttggtttggcaagaaaaagaagcagtacaaagataaatatttggcaaagcacaatgcagatcttgtcacatatgaagaagtagtaaaactgccagcattcaagaggaaaacactagtcttattaggcgcacatggtgttgggagaagacacataaaaaacactctcatcacaaagcacccagaccggtttgcgtaccctattccacatacaaccagacctccaaagaaagacgaagaaaatggaaagaattattactttgtatctcatgaccaaatgatgcaagacatctctaataacgagtacttggagtacggcagccacgaggatgcgatgtatgggacaaaactggagaccatccggaagatccacgagcaggggctgattgcaatactggacgtggagcctcaggcactgaaggtcctgagaactgcagagtttgctccttttgttgttttcattgctgcaccaactattactccaggtttaaatgaggatgaatctcttcagcgtctgcagaaggagtctgacatcttacagagaacatatgcacactacttcgatctcacaattatcaacaatgaaattgatgagacaatcagacatctggaggaagctgttgagctcgtgtgcacagccccacagtgggtccctgtctcctgggtctattaggcctctccccagatatctgagcataactgggagcacctcatttgtggaaaagcctctttgttatcggccttgtgtcagcaggtcatggtccctagagactacctagttgtagtgtgacctacatttataattattgtcatgtccgaatagataggaggagaaaaacaattacacactaatttaaagagacagtatcttttttaatcagttctcctaaactttaataaaatgtatctttaaatgtatgtattattcaatcctttggaatgttatatttttggaaatcatagctttttatttccaaggcccctaaaaactgcacaaaatagatgctgctttctataatctattttaataataataaacaatgattctgttaccttgactgggggtggaacactacattctttttagagtctgattttatggattggaatattgggatatctttctttcctttatttatttgaaataattagtgtagtgattacaaaacagtcataaatttttaaaggccttttttctctctttttttttttttagaatagtatttttttttaagtcctttatgtaacatccagataatgtgatactgtctctttgaagcaccctgtaaaccttttagagatttgaagttgggtcttgactcttaatgcatgtggacagtcgcgagcgtttatgctgtcggtgtgtctgtgttggacaaaacaatctgtaatctacagcaaagtacattctacattccgttcatggggcacacccaggggaataagaataaaatgctattatgactaagttgtaaacctatgcacatcccttgcattttgggcaactttataaaaaaaaagaaactgatttttattaataataatcatgtagtgaaatgtgtttgtaattttgtctcaatttaatttgttgtaaggtggggtggggggaattgctggtttcaccatttcagatctgtgttgtctaagagtattaacgttttaattaagcaaagaaatgatttttaatctgtatgtaattgttttaaagcacccattttaagagaaaatactgtgcaatgaagaaaccagtttaggcatttgctataaactgaaatattccaaaagaatcatctataacagccctgtaaattcctttaaaatgataactaacaggacagtttgaccaattttttttaaatatacttccttttatgtgttcaataattaaatgcctttgggtccttcatttcattatagatttgttcaggcttccaagctgataatctttacaattgtataatttgttagatgctcattgaacctttgaaggcccaggagtgagtatcagttggcagggtgacaaagtagcctgccagagcacagctggaccacgtctgactcgcacagagccatgcgcccaagggccacgggtgtactggaggccacctgtggtctctccttcctcttgctgtatcccttggcacaggggaatcatctgtccttgttgctttagagacattaaccatctcataactcttccatgaagtcacattcttccaatacaggagattcgggctggggttctcagactctttgccagaggtcagtagaatgtttttcattagcatgtgagggtgtgaagtgcttatattaacctgtgatccttgaaaacataccatcattttttgcttcttgtaggttagatggccttgtcactttgtgccttggcaggatgtgcagggtgtgttctgagctgaacagctcctcttaaaggaccaaacagagaaggcattagtatacttcttttacattgtcaacaccatacccgcctccgccccccaccgcctattattaaatggtggcgatttttttttttctgatgttgttctttgccagtgaccagatgagtctgcaacttactaacaaggtattgagtgaactacttctgtatgggccccacagtggggtgaccaagccaccaaaccagagataagctcaacagtggtctcacactagatagagagagaaaccttcaaagagttgggtagggctgtgttagaactgattcgaatctgatagatgccaaggccagacagtcgttcctggtatggtactgaccacaatttcgggctcttagtgtgaaggtgcgcactctacctcttttctggtgaagcacaaagacaactacaactaacacatgggaaacagaaacttccctccctctagtggaaacccccacgcccccacttgccctttgagcccacatctccagagatgctgatgatgcctgtcttaagccatctgccatatttataaaggtggattaagcagaggaggagaaaagcaatgccaacttaaatgtctgtggccccacaattcacaagcactgtagcactcatcctcagtggctttatacgtcctctgagaagcacacaggcaggcatcattcttgccatcattccgatggtgaaatccctgcatgcagaactcattgacttctcaaagatgttacctgttccattccactaatacatgtcttctctaaagcagtgtctttatgacctagctgcatatacttacatttctgaattcagagtaatttcagtacattgctgctgctgctgctgctgctgctgctgctgctgctgctgctgctgctgctactgctacattacaattgtccactaagcaatcagagaaaattgctaaaagcttctttactgcttccattccatcagcagaacctttttttttctttctttcttttaaagaccagaatgaatgtttagagtactaaatcttattagtggtcaattgaagtattggagagccacattttgaaggttctctcccccacccaactccattccccacagcaagaaagggagtgtttttatatgttgaattctttgttaaaaagatgaaatgtcctgattttccagtcacaagacagtaattactttgcacatacagcatatcccattttaatgctaaaaagggaaatgtcactcaatttaattcatctggaagtttcccagtgtcaagataacattgtagcctttttaaatgcaattaaatgtatctcttgtcaggtgagatgatttaaaatctttgctcagagaggaaaacaaatggttgacctacttcttgctatttgcattcagaaggcatcgtcccagcccatcctattggtggcagaatatctaaagatgtcgcaaagtcccccactgcagtagaaatgcaggaggtgttcctgttccccgtccaattccttcttaggctgctagagacagccagtgggccaagccttcccctgtgctccaggcaggcctgggctgcagctactgttacctttttacagcctttgatctgatcgctgcagagttcttttgtttttaaatcacttgtatttgtctcttcattaaggcttcaagtttatttcttgaaaaagtttagtcaattgaaccaccctccaggaagattcccagcgtggaaactgcccctgaaaaacaaggcagcccaaagccagctctcttttgtcccccactgatgtcatgtcctttttttttttcatttcaggccagtttcttaacttggggcaaagagaatgtgttgctaaagctaccaagaaaactgcttgattaacaaattcttaatagaaatgcctcccacactgtctctttgaaaagagaaggcaccttggaatcggcattccaaaaccaagctccttgtcatcctcatccctcctccttcttgcttcctattatcaaactcgtgtgtgtttcttgttttctcagaactgaacacagcctcctaattccatcctcttgactagggcttacaatactgagagcgattacaggctgtaataagttaaaggtccctgagcgtggctttcttgttctgcgcctctaattaattcttctattaaaagatgctttccttctcactgcagcttacagaaaggctacaagctttaatcacagatcatttcatttgccagagcctttccttttctaactcctttagaaataagatttccctctctgtttggaatctctggatacaggactctcctccaagctcatggcttgattggctttgcctgtgcacacacacatcagtttgccttaaacttggagctatggggagtcccagattttccagcttagtgggtgaagtttagctgtcacctacatccaggaagtgggggaaaagggaaaaaaagaggatattcaccaccatgttcccatccggtctttcccctgccttgctttgtgcagcaggtgggcagacagagcccacagaaacagaagtagaaagagggccgcaccatctctggggccagcactcctaagtcttagctctttgtgggaatagaaaatcctgagctcccaccacctctcgtctgaccctccatcaactccctcgaacctgtgcaaatggactgagcaaaagaaaatggaaagagatgtttgtcaccacacaggagacctcctttctggccccaagcacaactccatctctgcgtatgctcagaaactcagaatttagctgctacttatgtgttagctccattctctctggtgtgtgactgagagaacacgccagtgttcttactgacagaggcttaggggtgaccctctctggacccagaggaagtacaacctctgtagcgagaattgtccttgggaacagaaacaggcattcctccacagtgagtggctccccctattttttttttatttggaagagaccaagaattgggggaattgatttccagtcttagctgtttcccggaatgtcatctgtgcaggcaggtaggcggctgccgggtgcagcaggcagcgtgactgatgtgaaggccgcccaatcctcacgtgctaagacccgagtatcgtgtttaattgcagtgtaggcacgtcgccattcaaactcagttctggggtggttttgcataaagttttgccaacgtgttcttttttctgtatgtattattgcctttttataaaaggtgttgaagtattgtctcagtgataaaaagagagagatgttaatggttgttgtatatttcaccgtatccaattgtaagtatttgcagggtacagcagagccttagcttgcaagagcgtttgtgcaggaggtgtccctcaacacccaggagctgaagggattggaaaggtttggattctttgtaaatgtcctgcttttctttctctctgtgtgtatctatttacatgccttagcacacgccctcccatcctgatccctttgccctgtcgccggaacaaccagaatgctggtgcgctgccggcacagtacaagttgatgaaaccctaatcagttatcttgtgtgacaggggaagaagagaaactccatagtattccttgtagaatatacatacctgtaggatgctgtgtaatgggaaaccatagaattgggcttttgtcatttcaaagttggagaaatgtatgaataaaatgtataaaacatgaaaa

SEQ ID NO: 4278 - DNA, 8262 bp, Homo sapiens
  source 1..8262: mol_type = unassigned DNA
ccgttttcgaagccctccacgctgcggccgctatcccctccggaccatggccgacgacgacgtgctgttcgaggatgtgtacgagctgtgcgaggtgatcggaaagggtcccttcagtgttgtacgacgatgtatcaacagagaaactgggcaacaatttgctgtaaaaattgttgatgtagccaagttcacatcaagtccagggttaagtacagaagatctaaagcgggaagccagtatctgtcatatgctgaaacatccacacattgtagagttattggagacatatagctcagatggaatgctttacatggttttcgaatttatggatggagcagatctgtgttttgaaatcgtaaagcgagctgacgctggttttgtgtacagtgaagctgtagccagccattatatgagacagatactggaagctctacgctactgccatgataataacataattcacagggatgtgaagccccactgtgttctccttgcctcaaaagaaaactcggcacctgttaaacttggaggctttggggtagctattcaattaggggagtctggacttgtagctggaggacgtgttggaacacctcattttatggcaccagaagtggtcaaaagagagccttacggaaagcctgtagacgtctgggggtgcggtgtgatcctttttatcctgctcagtggttgtttgcctttttacggaaccaaggaaagattgtttgaaggcattattaaaggaaaatataagatgaatccaaggcagtggagccatatctctgaaagtgccaaagacctagtacgtcgcatgctgatgctggatccagctgaaaggatcactgtttatgaagcactgaatcacccatggcttaaggagcgggatcgttacgcctacaagattcatcttccagaaacagtagagcagctgaggaaattcaatgcaaggaggaaactaaagggtgcagtactagccgctgtgtcaagtcacaaattcaactcattctatggggatccccctgaagagttaccagatttctccgaagaccctacctcctcagtgcttcttattgtttcacgagcagtctcacaggtgctggacagcctggaagagattcatgcgcttacagactgcagtgaaaaggacctagattttctacacagtgttttccaggatcagcatcttcacacactactagatctgtatgacaaaattaacacaaagtcttcaccacaaatcaggaatcctccaagcgatgcagtacagagagccaaagaggtattggaagaaatttcatgttaccctgagaataacgacgcaaaggaactaaagcgtattttaacacaacctcatttcatggccttacttcagactcacgacgtagtggcacatgaagtttacagtgatgaagcattgagggtcacacctcctcccacctctccctatttaaacggcgattctccagaaagtgctaacggagacatggatatggagaatgtgaccagagttcggctggtacagtttcaaaagaacacagatgaaccaatgggaatcactttaaaaatgaatgaactaaatcattgtattgttgcaagaattatgcatgggggcatgattcacaggcaaggtacacttcatgttggtgatgaaattcgagaaatcaatggcatcagtgtggctaaccaaacagtggaacaactgcaaaaaatgcttagggaaatgcgggggagtattaccttcaagattgtgccaagttaccgcactcagtcttcgtcctgtgagagagattccccttccacttccagacagtccccagctaatggtcatagcagcactaacaattctgtttcgatctatgtaagagcacaatttgaatatgatccagccaaggatgacctcatcccctgtaaagaagctggcattcgattcagagttggtgacatcatccagattattagtaaggatgatcataattggtggcagggtaaactggaaaactccaaaaatggaactgcaggtctcattccttctcctgaacttcaggaatggcgagtagcttgcattgccatggagaagaccaaacaggagcagcaggccagctgtacttggtttggcaagaaaaagaagcagtacaaagataaatatttggcaaagcacaatgcagatcttgtcacatatgaagaagtagtaaaactgccagcattcaagaggaaaacactagtcttattaggcgcacatggtgttgggagaagacacataaaaaacactctcatcacaaagcacccagaccggtttgcgtaccctattccacatacaaccagacctccaaagaaagacgaagaaaatggaaagaattattactttgtatctcatgaccaaatgatgcaagacatctctaataacgagtacttggagtacggcagccacgaggatgcgatgtatgggacaaaactggagaccatccggaagatccacgagcaggggctgattgcaatactggacgtggagcctcaggcactgaaggtcctgagaactgcagagtttgctccttttgttgttttcattgctgcaccaactattactccaggtttaaatgaggatgaatctcttcagcgtctgcagaaggagtctgacatcttacagagaacatatgcacactacttcgatctcacaattatcaacaatgaaattgatgagacaatcagacatctggaggaagctgttgagctcgtgtgcacagccccacagtgggtccctgtctcctgggtctattaggcctctccccagatatctgagcataactgggagcacctcatttgtggaaaagcctctttgttatcggccttgtgtcagcaggtcatggtccctagagactacctagttgtagtgtgacctacatttataattattgtcatgtccgaatagataggaggagaaaaacaattacacactaatttaaagagacagtatcttttttaatcagttctcctaaactttaataaaatgtatctttaaatgtatgtattattcaatcctttggaatgttatatttttggaaatcatagctttttatttccaaggcccctaaaaactgcacaaaatagatgctgctttctataatctattttaataataataaacaatgattctgttaccttgactgggggtggaacactacattctttttagagtctgattttatggattggaatattgggatatctttctttcctttatttatttgaaataattagtgtagtgattacaaaacagtcataaatttttaaaggccttttttctctctttttttttttttagaatagtatttttttttaagtcctttatgtaacatccagataatgtgatactgtctctttgaagcaccctgtaaaccttttagagatttgaagttgggtcttgactcttaatgcatgtggacagtcgcgagcgtttatgctgtcggtgtgtctgtgttggacaaaacaatctgtaatctacagcaaagtacattctacattccgttcatggggcacacccaggggaataagaataaaatgctattatgactaagttgtaaacctatgcacatcccttgcattttgggcaactttataaaaaaaaagaaactgatttttattaataataatcatgtagtgaaatgtgtttgtaattttgtctcaatttaatttgttgtaaggtggggtggggggaattgctggtttcaccatttcagatctgtgttgtctaagagtattaacgttttaattaagcaaagaaatgatttttaatctgtatgtaattgttttaaagcacccattttaagagaaaatactgtgcaatgaagaaaccagtttaggcatttgctataaactgaaatattccaaaagaatcatctataacagccctgtaaattcctttaaaatgataactaacaggacagtttgaccaattttttttaaatatacttccttttatgtgttcaataattaaatgcctttgggtccttcatttcattatagatttgttcaggcttccaagctgataatctttacaattgtataatttgttagatgctcattgaacctttgaaggcccaggagtgagtatcagttggcagggtgacaaagtagcctgccagagcacagctggaccacgtctgactcgcacagagccatgcgcccaagggccacgggtgtactggaggccacctgtggtctctccttcctcttgctgtatcccttggcacaggggaatcatctgtccttgttgctttagagacattaaccatctcataactcttccatgaagtcacattcttccaatacaggagattcgggctggggttctcagactctttgccagaggtcagtagaatgtttttcattagcatgtgagggtgtgaagtgcttatattaacctgtgatccttgaaaacataccatcattttttgcttcttgtaggttagatggccttgtcactttgtgccttggcaggatgtgcagggtgtgttctgagctgaacagctcctcttaaaggaccaaacagagaaggcattagtatacttcttttacattgtcaacaccatacccgcctccgccccccaccgcctattattaaatggtggcgatttttttttttctgatgttgttctttgccagtgaccagatgagtctgcaacttactaacaaggtattgagtgaactacttctgtatgggccccacagtggggtgaccaagccaccaaaccagagataagctcaacagtggtctcacactagatagagagagaaaccttcaaagagttgggtagggctgtgttagaactgattcgaatctgatagatgccaaggccagacagtcgttcctggtatggtactgaccacaatttcgggctcttagtgtgaaggtgcgcactctacctcttttctggtgaagcacaaagacaactacaactaacacatgggaaacagaaacttccctccctctagtggaaacccccacgcccccacttgccctttgagcccacatctccagagatgctgatgatgcctgtcttaagccatctgccatatttataaaggtggattaagcagaggaggagaaaagcaatgccaacttaaatgtctgtggccccacaattcacaagcactgtagcactcatcctcagtggctttatacgtcctctgagaagcacacaggcaggcatcattcttgccatcattccgatggtgaaatccctgcatgcagaactcattgacttctcaaagatgttacctgttccattccactaatacatgtcttctctaaagcagtgtctttatgacctagctgcatatacttacatttctgaattcagagtaatttcagtacattgctgctgctgctgctgctgctgctgctgctgctgctgctgctgctgctgctactgctacattacaattgtccactaagcaatcagagaaaattgctaaaagcttctttactgcttccattccatcagcagaacctttttttttctttctttcttttaaagaccagaatgaatgtttagagtactaaatcttattagtggtcaattgaagtattggagagccacattttgaaggttctctcccccacccaactccattccccacagcaagaaagggagtgtttttatatgttgaattctttgttaaaaagatgaaatgtcctgattttccagtcacaagacagtaattactttgcacatacagcatatcccattttaatgctaaaaagggaaatgtcactcaatttaattcatctggaagtttcccagtgtcaagataacattgtagcctttttaaatgcaattaaatgtatctcttgtcaggtgagatgatttaaaatctttgctcagagaggaaaacaaatggttgacctacttcttgctatttgcattcagaaggcatcgtcccagcccatcctattggtggcagaatatctaaagatgtcgcaaagtcccccactgcagtagaaatgcaggaggtgttcctgttccccgtccaattccttcttaggctgctagagacagccagtgggccaagccttcccctgtgctccaggcaggcctgggctgcagctactgttacctttttacagcctttgatctgatcgctgcagagttcttttgtttttaaatcacttgtatttgtctcttcattaaggcttcaagtttatttcttgaaaaagtttagtcaattgaaccaccctccaggaagattcccagcgtggaaactgcccctgaaaaacaaggcagcccaaagccagctctcttttgtcccccactgatgtcatgtcctttttttttttcatttcaggccagtttcttaacttggggcaaagagaatgtgttgctaaagctaccaagaaaactgcttgattaacaaattcttaatagaaatgcctcccacactgtctctttgaaaagagaaggcaccttggaatcggcattccaaaaccaagctccttgtcatcctcatccctcctccttcttgcttcctattatcaaactcgtgtgtgtttcttgttttctcagaactgaacacagcctcctaattccatcctcttgactagggcttacaatactgagagcgattacaggctgtaataagttaaaggtccctgagcgtggctttcttgttctgcgcctctaattaattcttctattaaaagatgctttccttctcactgcagcttacagaaaggctacaagctttaatcacagatcatttcatttgccagagcctttccttttctaactcctttagaaataagatttccctctctgtttggaatctctggatacaggactctcctccaagctcatggcttgattggctttgcctgtgcacacacacatcagtttgccttaaacttggagctatggggagtcccagattttccagcttagtgggtgaagtttagctgtcacctacatccaggaagtgggggaaaagggaaaaaaagaggatattcaccaccatgttcccatccggtctttcccctgccttgctttgtgcagcaggtgggcagacagagcccacagaaacagaagtagaaagagggccgcaccatctctggggccagcactcctaagtcttagctctttgtgggaatagaaaatcctgagctcccaccacctctcgtctgaccctccatcaactccctcgaacctgtgcaaatggactgagcaaaagaaaatggaaagagatgtttgtcaccacacaggagacctcctttctggccccaagcacaactccatctctgcgtatgctcagaaactcagaatttagctgctacttatgtgttagctccattctctctggtgtgtgactgagagaacacgccagtgttcttactgacagaggcttaggggtgaccctctctggacccagaggaagtacaacctctgtagcgagaattgtccttgggaacagaaacaggcattcctccacagtgagtggctccccctattttttttttatttggaagagaccaagaattgggggaattgatttccagtcttagctgtttcccggaatgtcatctgtgcaggcaggtaggcggctgccgggtgcagcaggcagcgtgactgatgtgaaggccgcccaatcctcacgtgctaagacccgagtatcgtgtttaattgcagtgtaggcacgtcgccattcaaactcagttctggggtggttttgcataaagttttgccaacgtgttcttttttctgtatgtattattgcctttttataaaaggtgttgaagtattgtctcagtgataaaaagagagagatgttaatggttgttgtatatttcaccgtatccaattgtaagtatttgcagggtacagcagagccttagcttgcaagagcgtttgtgcaggaggtgtccctcaacacccaggagctgaagggattggaaaggtttggattctttgtaaatgtcctgcttttctttctctctgtgtgtatctatttacatgccttagcacacgccctcccatcctgatccctttgccctgtcgccggaacaaccagaatgctggtgcgctgccggcacagtacaagttgatgaaaccctaatcagttatcttgtgtgacaggggaagaagagaaactccatagtattccttgtagaatatacatacctgtaggatgctgtgtaatgggaaaccatagaattgggcttttgtcatttcaaagttggagaaatgtatgaataaaatgtataaaacatgaaaa

SEQ ID NO: 4279 - DNA, 2494 bp, Homo sapiens
  source 1..2494: mol_type = unassigned DNA
gccgccgccacctccctccgcggcgatcctcgctccatggtcctgccgcggccccctctgtagcccgagctgctccgcgacgcgacggagccggcctcggacagagggagcggtcgcggcctcgcggcccgcgcgggctgacgagcggagagcgcgacgccgcgcggtccccgaggatccgcacgccgggcagcgcggcccgagcagcgcgagaagcagcgggcgggcgggcggcgccgggcccgggccgccctcgctcccgcgccccggccccgccgcccgcgccggggcggtcgcctgcagaggaaggcgccgcagtctctgggcctcgcggccccactcgagcgtcctcggcaccgagggctcgcgggtcctgaggggaggaggcgatcccggggctgggcactgagctcttgggcgcccccacccccgttttcgaagccctccacgctgcggccgctatcccctccggaccatggccgacgacgacgtgctgttcgaggatgtgtacgagctgtgcgaggtgatcggaaagggtcccttcagtgttgtacgacgatgtatcaacagagaaactgggcaacaatttgctgtaaaaattgttgatgtagccaagttcacatcaagtccagggttaagtacagaagatctaaagcgggaagccagtatctgtcatatgctgaaacatccacacattgtagagttattggagacatatagctcagatggaatgctttacatggttttcgaatttatggatggagcagatctgtgttttgaaatcgtaaagcgagctgacgctggttttgtgtacagtgaagctgtagccagccattatatgagacagatactggaagctctacgctactgccatgataataacataattcacagggatgtgaagccccactgtgttctccttgcctcaaaagaaaactcggcacctgttaaacttggaggctttggggtagctattcaattaggggagtctggacttgtagctggaggacgtgttggaacacctcattttatggcaccagaagtggtcaaaagagagccttacggaaagcctgtagacgtctgggggtgcggtgtgatcctttttatcctgctcagtggttgtttgcctttttacggaaccaaggaaagattgtttgaaggcattattaaaggaaaatataagatgaatccaaggcagtggagccatatctctgaaagtgccaaagacctagtacgtcgcatgctgatgctggatccagctgaaaggatcactgtttatgaagcactgaatcacccatggcttaaggagcgggatcgttacgcctacaagattcatcttccagaaacagtagagcagctgaggaaattcaatgcaaggaggaaactaaagggtgcagtactagccgctgtgtcaagtcacaaattcaactcattctatggggatccccctgaagagttaccagatttctccgaagaccctacctcctcaggacttctagcagcagaaagagcagtctcacaggtgctggacagcctggaagagattcatgcgcttacagactgcagtgaaaaggacctagattttctacacagtgttttccaggatcagcatcttcacacactactagatctgtatgacaaaattaacacaaagtcttcaccacaaatcaggaatcctccaagcgatgcagtacagagagccaaagaggtattggaagaaatttcatgttaccctgagaataacgacgcaaaggaactaaagcgtattttaacacaacctcatttcatggccttacttcagactcacgacgtagtggcacatgaagtttacagtgatgaagcattgagggtcacacctcctcccacctctccctatttaaacggcgattctccagaaagtgctaacggagacatggatatggagaatgtgaccagagttcggctggtacagtttcaaaagaacacagatgaaccaatgggaatcactttaaaaatgaatgaactaaatcattgtattgttgcaagaattatgcatgggggcatgattcacaggcaaggtacacttcatgttggtgatgaaattcgagaaatcaatggcatcagtgtggctaaccaaacagtggaacaactgcaaaaaatgcttagggaaatgcgggggagtattaccttcaagattgtgccaagttaccgcactcagtcttcgtcctgtgaggtaatgactctaacaaaccacccccatctgctctgagttcttaactaactgtctgctgatggctgtatgtttttgctttctgggaaattgtttctgcctgtgctgttagatcactgcacaccaattttacaacaaagataacggaacagagtaggtcccatccacctactcagccctgcttccatgtggatctcctcagcactttgaactttttgcaggctgaaatctgagcaaaatgtagagaagttacaaatgatgacataaggcttaataaggaaaaaa

SEQ ID NO: 4280 - DNA, 3848 bp, Homo sapiens
  source 1..3848: mol_type = unassigned DNA
cggcccgcgcgggctgacgagcggagagcgcgacgccgcgcggtccccgaggatccgcacgccgggcagcgcggcccgagcagcgcgagaagcagcgggcgggcgggcggcgccgggcccgggccgccctcgctcccgcgccccggccccgccgcccgcgccggggcggtcgcctgcagaggaaggcgccgcagtctctgggcctcgcggccccactcgagcgtcctcggcaccgagggctcgcgggtcctgaggggaggaggcgatcccggggctgggcactgagctcttgggcgcccccacccccgttttcgaagccctccacgctgcggccgctatcccctccggaccatggccgacgacgacgtgctgttcgaggatgtgtacgagctgtgcgaggtgatcggaaagggtcccttcagtgttgtacgacgatgtatcaacagagaaactgggcaacaatttgctgtaaaaattgttgatgtagccaagttcacatcaagtccagggttaagtacagaagatctaaagcgggaagccagtatctgtcatatgctgaaacatccacacattgtagagttattggagacatatagctcagatggaatgctttacatggttttcgaatttatggatggagcagatctgtgttttgaaatcgtaaagcgagctgacgctggttttgtgtacagtgaagctgtagccagccattatatgagacagatactggaagctctacgctactgccatgataataacataattcacagggatgtgaagccccactgtgttctccttgcctcaaaagaaaactcggcacctgttaaacttggaggctttggggtagctattcaattaggggagtctggacttgtagctggaggacgtgttggaacacctcattttatggcaccagaagtggtcaaaagagagccttacggaaagcctgtagacgtctgggggtgcggtgtgatcctttttatcctgctcagtggttgtttgcctttttacggaaccaaggaaagattgtttgaaggcattattaaaggaaaatataagatgaatccaaggcagtggagccatatctctgaaagtgccaaagacctagtacgtcgcatgctgatgctggatccagctgaaaggatcactgtttatgaagcactgaatcacccatggcttaaggagcgggatcgttacgcctacaagattcatcttccagaaacagtagagcagctgaggaaattcaatgcaaggaggaaactaaagggtgcagtactagccgctgtgtcaagtcacaaattcaactcattctatggggatccccctgaagagttaccagatttctccgaagaccctacctcctcaggacttctagcagcagaaagagcagtctcacaggtgctggacagcctggaagagattcatgcgcttacagactgcagtgaaaaggacctagattttctacacagtgttttccaggatcagcatcttcacacactactagatctgtatgacaaaattaacacaaagtcttcaccacaaatcaggaatcctccaagcgatgcagtacagagagccaaagaggtattggaagaaatttcatgttaccctgagaataacgacgcaaaggaactaaagcgtattttaacacaacctcatttcatggccttacttcagactcacgacgtagtggcacatgaagtttacagtgatgaagcattgagggtcacacctcctcccacctctccctatttaaacggcgattctccagaaagtgctaacggagacatggatatggagaatgtgaccagagttcggctggtacagtttcaaaagaacacagatgaaccaatgggaatcactttaaaaatgaatgaactaaatcattgtattgttgcaagaattatgcatgggggcatgattcacaggcaaggtacacttcatgttggtgatgaaattcgagaaatcaatggcatcagtgtggctaaccaaacagtggaacaactgcaaaaaatgcttagggaaatgcgggggagtattaccttcaagattgtgccaagttaccgcactcagtcttcgtcctgtgagagagattccccttccacttccagacagtccccagctaatggtcatagcagcactaacaattctgtttcgatctatgtaagagcacaatttgaatatgatccagccaaggatgacctcatcccctgtaaagaagctggcattcgattcagagttggtgacatcatccagattattagtaaggatgatcataattggtggcagggtaaactggaaaactccaaaaatggaactgcaggtctcattccttctcctgaacttcaggaatggcgagtagcttgcattgccatggagaagaccaaacaggagcagcaggccagctgtacttggtttggcaagaaaaagaagcagtacaaagataaatatttggcaaagcacaatgcagatcttgtcacatatgaagaagtagtaaaactgccagcattcaagaggaaaacactagtcttattaggcgcacatggtgttgggagaagacacataaaaaacactctcatcacaaagcacccagaccggtttgcgtaccctattccacatacaaccagacctccaaagaaagacgaagaaaatggaaagaattattactttgtatctcatgaccaaatgatgcaagacatctctaataacgagtacttggagtacggcagccacgaggatgcgatgtatgggacaaaactggagaccatccggaagatccacgagcaggggctgattgcaatactggacgtggagcctcaggcactgaaggtcctgagaactgcagagtttgctccttttgttgttttcattgctgcaccaactattactccaggtttaaatgaggatgaatctcttcagcgtctgcagaaggagtctgacatcttacagagaacatatgcacactacttcgatctcacaattatcaacaatgaaattgatgagacaatcagacatctggaggaagctgttgagctcgtgtgcacagccccacagtgggtccctgtctcctgggtctattaggcctctccccagatatctgagcataactgggagcacctcatttgtggaaaagcctctttgttatcggccttgtgtcagcaggtcatggtccctagagactacctagttgtagtgtgacctacatttataattattgtcatgtccgaatagataggaggagaaaaacaattacacactaatttaaagagacagtatcttttttaatcagttctcctaaactttaataaaatgtatctttaaatgtatgtattattcaatcctttggaatgttatatttttggaaatcatagctttttatttccaaggcccctaaaaactgcacaaaatagatgctgctttctataatctattttaataataataaacaatgattctgttaccttgactgggggtggaacactacattctttttagagtctgattttatggattggaatattgggatatctttctttcctttatttatttgaaataattagtgtagtgattacaaaacagtcataaatttttaaaggccttttttctctctttttttttttttagaatagtatttttttttaagtcctttatgtaacatccagataatgtgatactgtctctttgaagcaccctgtaaaccttttagagatttgaagttgggtcttgactcttaatgcatgtggacagtcgcgagcgtttatgctgtcggtgtgtctgtgttggacaaaacaatctgtaatctacagcaaagtacattctacattccgttcatggggcacacccagggg

SEQ ID NO: 4281 - DNA, 4411 bp, Homo sapiens
  source 1..4411: mol_type = unassigned DNA
gccgccgccacctccctccgcggcgatcctcgctccatggtcctgccgcggccccctctgtagcccgagctgctccgcgacgcgacggagccggcctcggacagagggagcggtcgcggcctcgcggcccgcgcgggctgacgagcggagagcgcgacgccgcgcggtccccgaggatccgcacgccgggcagcgcggcccgagcagcgcgagaagcagcgggcgggcgggcggcgccgggcccgggccgccctcgctcccgcgccccggccccgccgcccgcgccggggcggtcgcctgcagaggaaggcgccgcagtctctgggcctcgcggccccactcgagcgtcctcggcaccgagggctcgcgggtcctgaggggaggaggcgatcccggggctgggcactgagctcttgggcgcccccacccccgttttcgaagccctccacgctgcggccgctatcccctccggaccatggccgacgacgacgtgctgttcgaggatgtgtacgagctgtgcgaggtgatcggaaagggtcccttcagtgttgtacgacgatgtatcaacagagaaactgggcaacaatttgctgtaaaaattgttgatgtagccaagttcacatcaagtccagggttaagtacagaagatctaaagcgggaagccagtatctgtcatatgctgaaacatccacacattgtagagttattggagacatatagctcagatggaatgctttacatggttttcgaatttatggatggagcagatctgtgttttgaaatcgtaaagcgagctgacgctggttttgtgtacagtgaagctgtagccagccattatatgagacagatactggaagctctacgctactgccatgataataacataattcacagggatgtgaagccccactgtgttctccttgcctcaaaagaaaactcggcacctgttaaacttggaggctttggggtagctattcaattaggggagtctggacttgtagctggaggacgtgttggaacacctcattttatggcaccagaagtggtcaaaagagagccttacggaaagcctgtagacgtctgggggtgcggtgtgatcctttttatcctgctcagtggttgtttgcctttttacggaaccaaggaaagattgtttgaaggcattattaaaggaaaatataagatgaatccaaggcagtggagccatatctctgaaagtgccaaagacctagtacgtcgcatgctgatgctggatccagctgaaaggatcactgtttatgaagcactgaatcacccatggcttaaggagcgggatcgttacgcctacaagattcatcttccagaaacagtagagcagctgaggaaattcaatgcaaggaggaaactaaagggtgcagtactagccgctgtgtcaagtcacaaattcaactcattctatggggatccccctgaagagttaccagatttctccgaagaccctacctcctcaggacttctagcagcagaaagagcagtctcacaggtgctggacagcctggaagagattcatgcgcttacagactgcagtgaaaaggacctagattttctacacagtgttttccaggatcagcatcttcacacactactagatctgtatgacaaaattaacacaaagtcttcaccacaaatcaggaatcctccaagcgatgcagtacagagagccaaagaggtattggaagaaatttcatgttaccctgagaataacgacgcaaaggaactaaagcgtattttaacacaacctcatttcatggccttacttcagactcacgacgtagtggcacatgaagtttacagtgatgaagcattgagggtcacacctcctcccacctctccctatttaaacggcgattctccagaaagtgctaacggagacatggatatggagaatgtgaccagagttcggctggtacagtttcaaaagaacacagatgaaccaatgggaatcactttaaaaatgaatgaactaaatcattgtattgttgcaagaattatgcatgggggcatgattcacaggcaaggtacacttcatgttggtgatgaaattcgagaaatcaatggcatcagtgtggctaaccaaacagtggaacaactgcaaaaaatgcttagggaaatgcgggggagtattaccttcaagattgtgccaagttaccgcactcagtcttcgtcctgtgagagagattccccttccacttccagacagtccccagctaatggtcatagcagcactaacaattctgtttcggacttgccatcaactacccaaccaaaaggacgacagatctatgtaagagcacaatttgaatatgatccagccaaggatgacctcatcccctgtaaagaagctggcattcgattcagagttggtgacatcatccagattattagtaaggatgatcataattggtggcagggtaaactggaaaactccaaaaatggaactgcaggtctcattccttctcctgaacttcaggaatggcgagtagcttgcattgccatggagaagaccaaacaggagcagcaggccagctgtacttggtttggcaagaaaaagaagcagtacaaagataaatatttggcaaagcacaatgcagtgtttgatcaattagatcttgtcacatatgaagaagtagtaaaactgccagcattcaagaggaaaacactagtcttattaggcgcacatggtgttgggagaagacacataaaaaacactctcatcacaaagcacccagaccggtttgcgtaccctattccacatacaaccagacctccaaagaaagacgaagaaaatggaaagaattattactttgtatctcatgaccaaatgatgcaagacatctctaataacgagtacttggagtacggcagccacgaggatgcgatgtatgggacaaaactggagaccatccggaagatccacgagcaggggctgattgcaatactggacgtggagcctcaggcactgaaggtcctgagaactgcagagtttgctccttttgttgttttcattgctgcaccaactattactccaggtttaaatgaggatgaatctcttcagcgtctgcagaaggagtctgacatcttacagagaacatatgcacactacttcgatctcacaattatcaacaatgaaattgatgagacaatcagacatctggaggaagctgttgagctcgtgtgcacagccccacagtgggtccctgtctcctgggtctattaggcctctccccagatatctgagcataactgggagcacctcatttgtggaaaagcctctttgttatcggccttgtgtcagcaggtcatggtccctagagactacctagttgtagtgtgacctacatttataattattgtcatgtccgaatagataggaggagaaaaacaattacacactaatttaaagagacagtatcttttttaatcagttctcctaaactttaataaaatgtatctttaaatgtatgtattattcaatcctttggaatgttatatttttggaaatcatagctttttatttccaaggcccctaaaaactgcacaaaatagatgctgctttctataatctattttaataataataaacaatgattctgttaccttgactgggggtggaacactacattctttttagagtctgattttatggattggaatattgggatatctttctttcctttatttatttgaaataattagtgtagtgattacaaaacagtcataaatttttaaaggccttttttctctctttttttttttttagaatagtatttttttttaagtcctttatgtaacatccagataatgtgatactgtctctttgaagcaccctgtaaaccttttagagatttgaagttgggtcttgactcttaatgcatgtggacagtcgcgagcgtttatgctgtcggtgtgtctgtgttggacaaaacaatctgtaatctacagcaaagtacattctacattccgttcatggggcacacccaggggaataagaataaaatgctattatgactaagttgtaaacctatgcacatcccttgcattttgggcaactttataaaaaaaaagaaactgatttttattaataataatcatgtagtgaaatgtgtttgtaattttgtctcaatttaatttgttgtaaggtggggtggggggaattgctggtttcaccatttcagatctgtgttgtctaagagtattaacgttttaattaagcaaagaaatgatttttaatctgtatgtaattgttttaaagcacccattttaagagaaaatactgtgcaatgaagaaaccagtttaggcatttgctataaactgaaatattccaaaagaatcatctataacagccctgtaaattcctttaaaatgataact

SEQ ID NO: 4282 - DNA, 3123 bp, Homo sapiens
  source 1..3123: mol_type = unassigned DNA
cgctgcggccgctatcccctccggaccatggccgacgacgacgtgctgttcgaggatgtgtacgagctgtgcgaggtgatcggaaagggtcccttcagtgttgtacgacgatgtatcaacagagaaactgggcaacaatttgctgtaaaaattgttgatgtagccaagttcacatcaagtccagggttaagtacagaagatctaaagcgggaagccagtatctgtcatatgctgaaacatccacacattgtagagttattggagacatatagctcagatggaatgctttacatggttttcgaatttatggatggagcagatctgtgttttgaaatcgtaaagcgagctgacgctggttttgtgtacagtgaagctgtagccagccattatatgagacagatactggaagctctacgctactgccatgataataacataattcacagggatgtgaagccccactgtgttctccttgcctcaaaagaaaactcggcacctgttaaacttggaggctttggggtagctattcaattaggggagtctggacttgtagctggaggacgtgttggaacacctcattttatggcaccagaagtggtcaaaagagagccttacggaaagcctgtagacgtctgggggtgcggtgtgatcctttttatcctgctcagtggttgtttgcctttttacggaaccaaggaaagattgtttgaaggcattattaaaggaaaatataagatgaatccaaggcagtggagccatatctctgaaagtgccaaagacctagtacgtcgcatgctgatgctggatccagctgaaaggatcactgtttatgaagcactgaatcacccatggcttaaggagcgggatcgttacgcctacaagattcatcttccagaaacagtagagcagctgaggaaattcaatgcaaggaggaaactaaagggtgcagtactagccgctgtgtcaagtcacaaattcaactcattctatggggatccccctgaagagttaccagatttctccgaagaccctacctcctcaggacttctagcagcagaaagagcagtctcacaggtgctggacagcctggaagagattcatgcgcttacagactgcagtgaaaaggacctagattttctacacagtgttttccaggatcagcatcttcacacactactagatctgtatgacaaaattaacacaaagtcttcaccacaaatcaggaatcctccaagcgatgcagtacagagagccaaagaggtattggaagaaatttcatgttaccctgagaataacgacgcaaaggaactaaagcgtattttaacacaacctcatttcatggccttacttcagactcacgacgtagtggcacatgaagtttacagtgatgaagcattgagggtcacacctcctcccacctctccctatttaaacggcgattctccagaaagtgctaacggagacatggatatggagaatgtgaccagagttcggctggtacagtttcaaaagaacacagatgaaccaatgggaatcactttaaaaatgaatgaactaaatcattgtattgttgcaagaattatgcatgggggcatgattcacaggcaaggtacacttcatgttggtgatgaaattcgagaaatcaatggcatcagtgtggctaaccaaacagtggaacaactgcaaaaaatgcttagggaaatgcgggggagtattaccttcaagattgtgccaagttaccgcactcagtcttcgtcctgtgagagagattccccttccacttccagacagtccccagctaatggtcatagcagcactaacaattctgtttcggacttgccatcaactacccaaccaaaaggacgacagatctatgtaagagcacaatttgaatatgatccagccaaggatgacctcatcccctgtaaagaagctggcattcgattcagagttggtgacatcatccagattattagtaaggatgatcataattggtggcagggtaaactggaaaactccaaaaatggaactgcaggtctcattccttctcctgaacttcaggaatggcgagtagcttgcattgccatggagaagaccaaacaggagcagcaggccagctgtacttggtttggcaagaaaaagaagcagtacaaagataaatatttggcaaagcacaatgcagatcttgtcacatatgaagaagtagtaaaactgccagcattcaagaggaaaacactagtcttattaggcgcacatggtgttgggagaagacacataaaaaacactctcatcacaaagcacccagaccggtttgcgtaccctattccacatacaaccagacctccaaagaaagacgaagaaaatggaaagaattattactttgtatctcatgaccaaatgatgcaagacatctctaataacgagtacttggagtacggcagccacgaggatgcgatgtatgggacaaaactggagaccatccggaagatccacgagcaggggctgattgcaatactggacgtggagcctcaggcactgaaggtcctgagaactgcagagtttgctccttttgttgttttcattgctgcaccaactattactccaggtttaaatgaggatgaatctcttcagcgtctgcagaaggagtctgacatcttacagagaacatatgcacactacttcgatctcacaattatcaacaatgaaattgatgagacaatcagacatctggaggaagctgttgagctcgtgtgcacagccccacagtgggtccctgtctcctgggtctattaggcctctccccagatatctgagcataactgggagcacctcatttgtggaaaagcctctttgttatcggccttgtgtcagcaggtcatggtccctagagactacctagttgtagtgtgacctacatttataattattgtcatgtccgaatagataggaggagaaaaacaattacacactaatttaaagagacagtatcttttttaatcagttctcctaaactttaataaaatgtatctttaaatgtatgtattattcaatcctttggaatgttatatttttggaaatcatagctttttatttccaaggcccctaaaaactgcacaaaataga

SEQ ID NO: 4283 - DNA, 2017 bp, Homo sapiens
  source 1..2017: mol_type = unassigned DNA
gatgaaattcgagaaatcaatggcatcagtgtggctaaccaaacagtggaacaactgcaaaaaatgcttagggaaatgcgggggagtattaccttcaagattgtgccaagttaccgcactcagtcttcgtcctgtgagagagattccccttccacttccagacagtccccagctaatggtcatagcagcactaacaattctgtttcgatctatgtaagagcacaatttgaatatgatccagccaaggatgacctcatcccctgtaaagaagctggcattcgattcagagttggtgacatcatccagattattagtaaggatgatcataattggtggcagggtaaactggaaaactccaaaaatggaactgcaggtctcattccttctcctgaacttcaggaatggcgagtagcttgcattgccatggagaagaccaaacaggagcagcaggccagctgtacttggtttggcaagaaaaagaagcagtacaaagataaatatttggcaaagcacaatgcagtgtttgatcaattagatcttgtcacatatgaagaagtagtaaaactgccagcattcaagaggaaaacactagtcttattaggcgcacatggtgttgggagaagacacataaaaaacactctcatcacaaagcacccagaccggtttgcgtaccctattccacatacaaccagacctccaaagaaagacgaagaaaatggaaagaattattactttgtatctcatgaccaaatgatgcaagacatctctaataacgagtacttggagtacggcagccacgaggatgcgatgtatgggacaaaactggagaccatccggaagatccacgagcaggggctgattgcaatactggacgtggagcctcaggcactgaaggtcctgagaactgcagagtttgctccttttgttgttttcattgctgcaccaactattactccaggtttaaatgaggatgaatctcttcagcgtctgcagaaggagtctgacatcttacagagaacatatgcacactacttcgatctcacaattatcaacaatgaaattgatgagacaatcagacatctggaggaagctgttgagctcgtgtgcacagccccacagtgggtccctgtctcctgggtctattaggcctctccccagatatctgagcataactgggagcacctcatttgtggaaaagcctctttgttatcggccttgtgtcagcaggtcatggtccctagagactacctagttgtagtgtgacctacatttataattattgtcatgtccgaatagataggaggagaaaaacaattacacactaatttaaagagacagtatcttttttaatcagttctcctaaactttaataaaatgtatctttaaatgtatgtattattcaatcctttggaatgttatatttttggaaatcatagctttttatttccaaggcccctaaaaactgcacaaaatagatgctgctttctataatctattttaataataataaacaatgattctgttaccttgactgggggtggaacactacattctttttagagtctgattttatggattggaatattgggatatctttctttcctttatttatttgaaataattagtgtagtgattacaaaacagtcataaatttttaaaggccttttttctctctttttttttttttagaatagtatttttttttaagtcctttatgtaacatccagataatgtgatactgtctctttgaagcaccctgtaaaccttttagagatttgaagttgggtcttgactcttaatgcatgtggacagtcgcgagcgtttatgctgtcggtgtgtctgtgttggacaaaacaatctgtaatctacagcaaagtacattctacattccgttcatggggcacacccaggggaataagaataaaatgctattatgactaagttgtaaacctatgcacatcccttgcattttgggcaactttataaaaaaaaagaaactgatttttattaataataa

SEQ ID NO: 4284 - DNA, 2809 bp, Homo sapiens
  source 1..2809: mol_type = unassigned DNA
gccagaaagcattctttcattttactctgtattcatgctattgaaagttgcttctgtcagaggaaacaaacactgtgattgaggaaatattgatgaattttaaatgacaaggaaattgccacattgacagaattttggtccatctatttaaagatgattttttgaaaagatatgcataagactcatattctgacaagtttcacagaacaattcagaggttattaccaagaggatcccactgaaatcatcagcctgcctttttaaaagaaaaatattgtttagtgaaataataaatatgaagctctgatttttagcaaagaattgtgagtgtttactggattttcttctttgctttttagctgtatgacaaaattaacacaaagtcttcaccacaaatcaggaatcctccaagcgatgcagtacagagagccaaagaggtattggaagaaatttcatgttaccctgagaataacgacgcaaaggaactaaagcgtattttaacacaacctcatttcatggccttacttcagactcacgacgtagtggcacatgaagtttacagtgatgaagcattgagggtcacacctcctcccacctctccctatttaaacggcgattctccagaaagtgctaacggagacatggatatggagaatgtgaccagagttcggctggtacagtttcaaaagaacacagatgaaccaatgggaatcactttaaaaatgaatgaactaaatcattgtattgttgcaagaattatgcatgggggcatgattcacaggcaaggtacacttcatgttggtgatgaaattcgagaaatcaatggcatcagtgtggctaaccaaacagtggaacaactgcaaaaaatgcttagggaaatgcgggggagtattaccttcaagattgtgccaagttaccgcactcagtcttcgtcctgtgaggacttgccatcaactacccaaccaaaaggacgacagatctatgtaagagcacaatttgaatatgatccagccaaggatgacctcatcccctgtaaagaagctggcattcgattcagagttggtgacatcatccagattattagtaaggatgatcataattggtggcagggtaaactggaaaactccaaaaatggaactgcaggtctcattccttctcctgaacttcaggaatggcgagtagcttgcattgccatggagaagaccaaacaggagcagcaggccagctgtacttggtttggcaagaaaaagaagcagtacaaagataaatatttggcaaagcacaatgcagtgtttgatcaattagatcttgtcacatatgaagaagtagtaaaactgccagcattcaagaggaaaacactagtcttattaggcgcacatggtgttgggagaagacacataaaaaacactctcatcacaaagcacccagaccggtttgcgtaccctattccacatacaaccagacctccaaagaaagacgaagaaaatggaaagaattattactttgtatctcatgaccaaatgatgcaagacatctctaataacgagtacttggagtacggcagccacgaggatgcgatgtatgggacaaaactggagaccatccggaagatccacgagcaggggctgattgcaatactggacgtggagcctcaggcactgaaggtcctgagaactgcagagtttgctccttttgttgttttcattgctgcaccaactattactccaggtttaaatgaggatgaatctcttcagcgtctgcagaaggagtctgacatcttacagagaacatatgcacactacttcgatctcacaattatcaacaatgaaattgatgagacaatcagacatctggaggaagctgttgagctcgtgtgcacagccccacagtgggtccctgtctcctgggtctattaggcctctccccagatatctgagcataactgggagcacctcatttgtggaaaagcctctttgttatcggccttgtgtcagcaggtcatggtccctagagactacctagttgtagtgtgacctacatttataattattgtcatgtccgaatagataggaggagaaaaacaattacacactaatttaaagagacagtatcttttttaatcagttctcctaaactttaataaaatgtatctttaaatgtatgtattattcaatcctttggaatgttatatttttggaaatcatagctttttatttccaaggcccctaaaaactgcacaaaatagatgctgctttctataatctattttaataataataaacaatgattctgttaccttgactgggggtggaacactacattctttttagagtctgattttatggattggaatattgggatatctttctttcctttatttatttgaaataattagtgtagtgattacaaaacagtcataaatttttaaaggccttttttctctctttttttttttttagaatagtatttttttttaagtcctttatgtaacatccagataatgtgatactgtctctttgaagcaccctgtaaaccttttagagatttgaagttgggtcttgactcttaatgcatgtggacagtcgcgagcgtttatgctgtcggtgtgtctgtgttggacaaaacaatctgtaatctacagcaaagtacattctacattccgttcatggggcacacccaggggaataagaataaaatgctattatgactaagttgtaaacctatgcacatcccttgcattttgggcaactttataaaaaaaaagaaactgatttttattaataataatcatgtagtgaaatgtgtttgt

SEQ ID NO: 4285 - DNA, 8204 bp, Homo sapiens
  source 1..8204: mol_type = unassigned DNA
tgcggccgctatcccctccggaccatggccgacgacgacgtgctgttcgaggatgtgtacgagctgtgcgaggtgatcggaaagggtcccttcagtgttgtacgacgatgtatcaacagagaaactgggcaacaatttgctgtaaaaattgttgatgtagccaagttcacatcaagtccagggttaagtacagaagatctaaagcgggaagccagtatctgtcatatgctgaaacatccacacattgtagagttattggagacatatagctcagatggaatgctttacatggttttcgaatttatggatggagcagatctgtgttttgaaatcgtaaagcgagctgacgctggttttgtgtacagtgaagctgtagccagccattatatgagacagatactggaagctctacgctactgccatgataataacataattcacagggatgtgaagccccactgtgttctccttgcctcaaaagaaaactcggcacctgttaaacttggaggctttggggtagctattcaattaggggagtctggacttgtagctggaggacgtgttggaacacctcattttatggcaccagaagtggtcaaaagagagccttacggaaagcctgtagacgtctgggggtgcggtgtgatcctttttatcctgctcagtggttgtttgcctttttacggaaccaaggaaagattgtttgaaggcattattaaaggaaaatataagatgaatccaaggcagtggagccatatctctgaaagtgccaaagacctagtacgtcgcatgctgatgctggatccagctgaaaggatcactgtttatgaagcactgaatcacccatggcttaaggagcgggatcgttacgcctacaagattcatcttccagaaacagtagagcagctgaggaaattcaatgcaaggaggaaactaaagggtgcagtactagccgctgtgtcaagtcacaaattcaactcattctatggggatccccctgaagagttaccagatttctccgaagaccctacctcctcaggagcagtctcacaggtgctggacagcctggaagagattcatgcgcttacagactgcagtgaaaaggacctagattttctacacagtgttttccaggatcagcatcttcacacactactagatctgtatgacaaaattaacacaaagtcttcaccacaaatcaggaatcctccaagcgatgcagtacagagagccaaagaggtattggaagaaatttcatgttaccctgagaataacgacgcaaaggaactaaagcgtattttaacacaacctcatttcatggccttacttcagactcacgacgtagtggcacatgaagtttacagtgatgaagcattgagggtcacacctcctcccacctctccctatttaaacggcgattctccagaaagtgctaacggagacatggatatggagaatgtgaccagagttcggctggtacagtttcaaaagaacacagatgaaccaatgggaatcactttaaaaatgaatgaactaaatcattgtattgttgcaagaattatgcatgggggcatgattcacaggcaaggtacacttcatgttggtgatgaaattcgagaaatcaatggcatcagtgtggctaaccaaacagtggaacaactgcaaaaaatgcttagggaaatgcgggggagtattaccttcaagattgtgccaagttaccgcactcagtcttcgtcctgtgaggacttgccatcaactacccaaccaaaaggacgacagatctatgtaagagcacaatttgaatatgatccagccaaggatgacctcatcccctgtaaagaagctggcattcgattcagagttggtgacatcatccagattattagtaaggatgatcataattggtggcagggtaaactggaaaactccaaaaatggaactgcaggtctcattccttctcctgaacttcaggaatggcgagtagcttgcattgccatggagaagaccaaacaggagcagcaggccagctgtacttggtttggcaagaaaaagaagcagtacaaagataaatatttggcaaagcacaatgcagtgtttgatcaattagatcttgtcacatatgaagaagtagtaaaactgccagcattcaagaggaaaacactagtcttattaggcgcacatggtgttgggagaagacacataaaaaacactctcatcacaaagcacccagaccggtttgcgtaccctattccacatacaaccagacctccaaagaaagacgaagaaaatggaaagaattattactttgtatctcatgaccaaatgatgcaagacatctctaataacgagtacttggagtacggcagccacgaggatgcgatgtatgggacaaaactggagaccatccggaagatccacgagcaggggctgattgcaatactggacgtggagcctcaggcactgaaggtcctgagaactgcagagtttgctccttttgttgttttcattgctgcaccaactattactccaggtttaaatgaggatgaatctcttcagcgtctgcagaaggagtctgacatcttacagagaacatatgcacactacttcgatctcacaattatcaacaatgaaattgatgagacaatcagacatctggaggaagctgttgagctcgtgtgcacagccccacagtgggtccctgtctcctgggtctattaggcctctccccagatatctgagcataactgggagcacctcatttgtggaaaagcctctttgttatcggccttgtgtcagcaggtcatggtccctagagactacctagttgtagtgtgacctacatttataattattgtcatgtccgaatagataggaggagaaaaacaattacacactaatttaaagagacagtatcttttttaatcagttctcctaaactttaataaaatgtatctttaaatgtatgtattattcaatcctttggaatgttatatttttggaaatcatagctttttatttccaaggcccctaaaaactgcacaaaatagatgctgctttctataatctattttaataataataaacaatgattctgttaccttgactgggggtggaacactacattctttttagagtctgattttatggattggaatattgggatatctttctttcctttatttatttgaaataattagtgtagtgattacaaaacagtcataaatttttaaaggccttttttctctctttttttttttttagaatagtatttttttttaagtcctttatgtaacatccagataatgtgatactgtctctttgaagcaccctgtaaaccttttagagatttgaagttgggtcttgactcttaatgcatgtggacagtcgcgagcgtttatgctgtcggtgtgtctgtgttggacaaaacaatctgtaatctacagcaaagtacattctacattccgttcatggggcacacccaggggaataagaataaaatgctattatgactaagttgtaaacctatgcacatcccttgcattttgggcaactttataaaaaaaaagaaactgatttttattaataataatcatgtagtgaaatgtgtttgtaattttgtctcaatttaatttgttgtaaggtggggtggggggaattgctggtttcaccatttcagatctgtgttgtctaagagtattaacgttttaattaagcaaagaaatgatttttaatctgtatgtaattgttttaaagcacccattttaagagaaaatactgtgcaatgaagaaaccagtttaggcatttgctataaactgaaatattccaaaagaatcatctataacagccctgtaaattcctttaaaatgataactaacaggacagtttgaccaattttttttaaatatacttccttttatgtgttcaataattaaatgcctttgggtccttcatttcattatagatttgttcaggcttccaagctgataatctttacaattgtataatttgttagatgctcattgaacctttgaaggcccaggagtgagtatcagttggcagggtgacaaagtagcctgccagagcacagctggaccacgtctgactcgcacagagccatgcgcccaagggccacgggtgtactggaggccacctgtggtctctccttcctcttgctgtatcccttggcacaggggaatcatctgtccttgttgctttagagacattaaccatctcataactcttccatgaagtcacattcttccaatacaggagattcgggctggggttctcagactctttgccagaggtcagtagaatgtttttcattagcatgtgagggtgtgaagtgcttatattaacctgtgatccttgaaaacataccatcattttttgcttcttgtaggttagatggccttgtcactttgtgccttggcaggatgtgcagggtgtgttctgagctgaacagctcctcttaaaggaccaaacagagaaggcattagtatacttcttttacattgtcaacaccatacccgcctccgccccccaccgcctattattaaatggtggcgatttttttttttctgatgttgttctttgccagtgaccagatgagtctgcaacttactaacaaggtattgagtgaactacttctgtatgggccccacagtggggtgaccaagccaccaaaccagagataagctcaacagtggtctcacactagatagagagagaaaccttcaaagagttgggtagggctgtgttagaactgattcgaatctgatagatgccaaggccagacagtcgttcctggtatggtactgaccacaatttcgggctcttagtgtgaaggtgcgcactctacctcttttctggtgaagcacaaagacaactacaactaacacatgggaaacagaaacttccctccctctagtggaaacccccacgcccccacttgccctttgagcccacatctccagagatgctgatgatgcctgtcttaagccatctgccatatttataaaggtggattaagcagaggaggagaaaagcaatgccaacttaaatgtctgtggccccacaattcacaagcactgtagcactcatcctcagtggctttatacgtcctctgagaagcacacaggcaggcatcattcttgccatcattccgatggtgaaatccctgcatgcagaactcattgacttctcaaagatgttacctgttccattccactaatacatgtcttctctaaagcagtgtctttatgacctagctgcatatacttacatttctgaattcagagtaatttcagtacattgctgctgctgctgctgctgctgctgctgctgctgctgctgctgctgctgctactgctacattacaattgtccactaagcaatcagagaaaattgctaaaagcttctttactgcttccattccatcagcagaacctttttttttctttctttcttttaaagaccagaatgaatgtttagagtactaaatcttattagtggtcaattgaagtattggagagccacattttgaaggttctctcccccacccaactccattccccacagcaagaaagggagtgtttttatatgttgaattctttgttaaaaagatgaaatgtcctgattttccagtcacaagacagtaattactttgcacatacagcatatcccattttaatgctaaaaagggaaatgtcactcaatttaattcatctggaagtttcccagtgtcaagataacattgtagcctttttaaatgcaattaaatgtatctcttgtcaggtgagatgatttaaaatctttgctcagagaggaaaacaaatggttgacctacttcttgctatttgcattcagaaggcatcgtcccagcccatcctattggtggcagaatatctaaagatgtcgcaaagtcccccactgcagtagaaatgcaggaggtgttcctgttccccgtccaattccttcttaggctgctagagacagccagtgggccaagccttcccctgtgctccaggcaggcctgggctgcagctactgttacctttttacagcctttgatctgatcgctgcagagttcttttgtttttaaatcacttgtatttgtctcttcattaaggcttcaagtttatttcttgaaaaagtttagtcaattgaaccaccctccaggaagattcccagcgtggaaactgcccctgaaaaacaaggcagcccaaagccagctctcttttgtcccccactgatgtcatgtcctttttttttttcatttcaggccagtttcttaacttggggcaaagagaatgtgttgctaaagctaccaagaaaactgcttgattaacaaattcttaatagaaatgcctcccacactgtctctttgaaaagagaaggcaccttggaatcggcattccaaaaccaagctccttgtcatcctcatccctcctccttcttgcttcctattatcaaactcgtgtgtgtttcttgttttctcagaactgaacacagcctcctaattccatcctcttgactagggcttacaatactgagagcgattacaggctgtaataagttaaaggtccctgagcgtggctttcttgttctgcgcctctaattaattcttctattaaaagatgctttccttctcactgcagcttacagaaaggctacaagctttaatcacagatcatttcatttgccagagcctttccttttctaactcctttagaaataagatttccctctctgtttggaatctctggatacaggactctcctccaagctcatggcttgattggctttgcctgtgcacacacacatcagtttgccttaaacttggagctatggggagtcccagattttccagcttagtgggtgaagtttagctgtcacctacatccaggaagtgggggaaaagggaaaaaaagaggatattcaccaccatgttcccatccggtctttcccctgccttgctttgtgcagcaggtgggcagacagagcccacagaaacagaagtagaaagagggccgcaccatctctggggccagcactcctaagtcttagctctttgtgggaatagaaaatcctgagctcccaccacctctcgtctgaccctccatcaactccctcgaacctgtgcaaatggactgagcaaaagaaaatggaaagagatgtttgtcaccacacaggagacctcctttctggccccaagcacaactccatctctgcgtatgctcagaaactcagaatttagctgctacttatgtgttagctccattctctctggtgtgtgactgagagaacacgccagtgttcttactgacagaggcttaggggtgaccctctctggacccagaggaagtacaacctctgtagcgagaattgtccttgggaacagaaacaggcattcctccacagtgagtggctccccctattttttttttatttggaagagaccaagaattgggggaattgatttccagtcttagctgtttcccggaatgtcatctgtgcaggcaggtaggcggctgccgggtgcagcaggcagcgtgactgatgtgaaggccgcccaatcctcacgtgctaagacccgagtatcgtgtttaattgcagtgtaggcacgtcgccattcaaactcagttctggggtggttttgcataaagttttgccaacgtgttcttttttctgtatgtattattgcctttttataaaaggtgttgaagtattgtctcagtgataaaaagagagagatgttaatggttgttgtatatttcaccgtatccaattgtaagtatttgcagggtacagcagagccttagcttgcaagagcgtttgtgcaggaggtgtccctcaacacccaggagctgaagggattggaaaggtttggattctttgtaaatgtcctgcttttctttctctctgtgtgtatctatttacatgccttagcacacgccctcccatcctgatccctttgccctgtcgccggaacaaccagaatgctggtgcgctgccggcacagtacaagttgatgaaaccctaatcagttatcttgtgtgacaggggaagaagagaaactccatagtattccttgtagaatatacatacctgtaggatgctgtgtaatgggaaaccatagaattgggcttttgtcatttcaaagttggagaaatgtatgaataaaatgtataaaacatgaaaa

SEQ ID NO: 4286 - DNA, 2800 bp, Homo sapiens
  source 1..2800: mol_type = unassigned DNA
ccgctatcccctccggaccatggccgacgacgacgtgctgttcgaggatgtgtacgagctgtgcgaggtgatcggaaagggtcccttcagtgttgtacgacgatgtatcaacagagaaactgggcaacaatttgctgtaaaaattgttgatgtagccaagttcacatcaagtccagggttaagtacagaagatctaaagcgggaagccagtatctgtcatatgctgaaacatccacacattgtagagttattggagacatatagctcagatggaatgctttacatggttttcgaatttatggatggagcagatctgtgttttgaaatcgtaaagcgagctgacgctggttttgtgtacagtgaagctgtagccagccattatatgagacagatactggaagctctacgctactgccatgataataacataattcacagggatgtgaagccccactgtgttctccttgcctcaaaagaaaactcggcacctgttaaacttggaggctttggggtagctattcaattaggggagtctggacttgtagctggaggacgtgttggaacacctcattttatggcaccagaagtggtcaaaagagagccttacggaaagcctgtagacgtctgggggtgcggtgtgatcctttttatcctgctcagtggttgtttgcctttttacggaaccaaggaaagattgtttgaaggcattattaaaggaaaatataagatgaatccaaggcagtggagccatatctctgaaagtgccaaagacctagtacgtcgcatgctgatgctggatccagctgaaaggatcactgtttatgaagcactgaatcacccatggcttaaggagcgggatcgttacgcctacaagattcatcttccagaaacagtagagcagctgaggaaattcaatgcaaggaggaaactaaagggtgcagtactagccgctgtgtcaagtcacaaattcaactcattctatggggatccccctgaagagttaccagatttctccgaagaccctacctcctcaggacttctagcagcagaaagagcagtctcacaggtgctggacagcctggaagagattcatgcgcttacagactgcagtgaaaaggacctagattttctacacagtgttttccaggatcagcatcttcacacactactagatctgtatgacaaaattaacacaaagtcttcaccacaaatcaggaatcctccaagcgatgcagtacagagagccaaagaggtattggaagaaatttcatgttaccctgagaataacgacgcaaaggaactaaagcgtattttaacacaacctcatttcatggccttacttcagactcacgacgtagtggcacatgaagtttacagtgatgaagcattgagggtcacacctcctcccacctctccctatttaaacggcgattctccagaaagtgctaacggagacatggatatggagaatgtgaccagagttcggctggtacagtttcaaaagaacacagatgaaccaatgggaatcactttaaaaatgaatgaactaaatcattgtattgttgcaagaattatgcatgggggcatgattcacaggcaaggtacacttcatgttggtgatgaaattcgagaaatcaatggcatcagtgtggctaaccaaacagtggaacaactgcaaaaaatgcttagggaaatgcgggggagtattaccttcaagattgtgccaagttaccgcactcagtcttcgtcctgtgaggacttgccatcaactacccaaccaaaaggacgacagatctatgtaagagcacaatttgaatatgatccagccaaggatgacctcatcccctgtaaagaagctggcattcgattcagagttggtgacatcatccagattattagtaaggatgatcataattggtggcagggtaaactggaaaactccaaaaatggaactgcaggtctcattccttctcctgaacttcaggaatggcgagtagcttgcattgccatggagaagaccaaacaggagcagcaggccagctgtacttggtttggcaagaaaaagaagcagtacaaagataaatatttggcaaagcacaatgcagatcttgtcacatatgaagaagtagtaaaactgccagcattcaagaggaaaacactagtcttattaggcgcacatggtgttgggagaagacacataaaaaacactctcatcacaaagcacccagaccggtttgcgtaccctattccacatacaaccagacctccaaagaaagacgaagaaaatggaaagaattattactttgtatctcatgaccaaatgatgcaagacatctctaataacgagtacttggagtacggcagccacgaggatgcgatgtatgggacaaaactggagaccatccggaagatccacgagcaggggctgattgcaatactggacgtggagcctcaggcactgaaggtcctgagaactgcagagtttgctccttttgttgttttcattgctgcaccaactattactccaggtttaaatgaggatgaatctcttcagcgtctgcagaaggagtctgacatcttacagagaacatatgcacactacttcgatctcacaattatcaacaatgaaattgatgagacaatcagacatctggaggaagctgttgagctcgtgtgcacagccccacagtgggtccctgtctcctgggtctattaggcctctccccagatatctgagcataactgggagcacctcatttgtggaaaagcctctttgttatcggccttgtgtcagcaggtc

SEQ ID NO: 4287 - DNA, 3361 bp, Homo sapiens
  source 1..3361: mol_type = unassigned DNA
tcccttgccctggagagacggcagaaccatggcattttatagctgctgctgggtcctcttggcactcacctggcacacctctgcctacgggccagaccagcgagcccaaaagaagggggacattatccttggggggctctttcctattcattttggagtagcagctaaagatcaagatctcaaatcaaggccggagtctgtggaatgtatcaggtataatttccgtgggtttcgctggttacaggctatgatatttgccatagaggagataaacagcagcccagcccttcttcccaacttgacgctgggatacaggatatttgacacttgcaacaccgtttctaaggccttggaagccaccctgagttttgttgctcaaaacaaaattgattctttgaaccttgatgagttctgcaactgctcagagcacattccctctacgattgctgtggtgggagcaactggctcaggcgtctccacggcagtggcaaatctgctggggctcttctacattccccaggtcagttatgcctcctccagcagactcctcagcaacaagaatcaattcaagtctttcctccgaaccatccccaatgatgagcaccaggccactgccatggcagacatcatcgagtatttccgctggaactgggtgggcacaattgcagctgatgacgactatgggcggccggggattgagaaattccgagaggaagctgaggaaagggatatctgcatcgacttcagtgaactcatctcccagtactctgatgaggaagagatccagcatgtggtagaggtgattcaaaattccacggccaaagtcatcgtggttttctccagtggcccagatcttgagcccctcatcaaggagattgtccggcgcaatatcacgggcaagatctggctggccagcgaggcctgggccagctcctccctgatcgccatgcctcagtacttccacgtggttggcggcaccattggattcgctctgaaggctgggcagatcccaggcttccgggaattcctgaagaaggtccatcccaggaagtctgtccacaatggttttgccaaggagttttgggaagaaacatttaactgccacctccaagaaggtgcaaaaggacctttacctgtggacacctttctgagaggtcacgaagaaagtggcgacaggtttagcaacagctcgacagccttccgacccctctgtacaggggatgagaacatcagcagtgtcgagaccccttacatagattacacgcatttacggatatcctacaatgtgtacttagcagtctactccattgcccacgccttgcaagatatatatacctgcttacctgggagagggctcttcaccaatggctcctgtgcagacatcaagaaagttgaggcgtggcaggtcctgaagcacctacggcatctaaactttacaaacaatatgggggagcaggtgacctttgatgagtgtggtgacctggtggggaactattccatcatcaactggcacctctccccagaggatggctccatcgtgtttaaggaagtcgggtattacaacgtctatgccaagaagggagaaagactcttcatcaacgaggagaaaatcctgtggagtgggttctccagggaggtgcccttctccaactgcagccgagactgcctggcagggaccaggaaagggatcattgagggggagcccacctgctgctttgagtgtgtggagtgtcctgatggggagtatagtgatgagacagatgccagtgcctgtaacaagtgcccagatgacttctggtccaatgagaaccacacctcctgcattgccaaggagatcgagtttctgtcgtggacggagccctttgggatcgcactcaccctctttgccgtgctgggcattttcctgacagcctttgtgctgggtgtgtttatcaagttccgcaacacacccattgtcaaggccaccaaccgagagctctcctacctcctcctcttctccctgctctgctgcttctccagctccctgttcttcatcggggagccccaggactggacgtgccgcctgcgccagccggcctttggcatcagcttcgtgctctgcatctcatgcatcctggtgaaaaccaaccgtgtcctcctggtgtttgaggccaagatccccaccagcttccaccgcaagtggtgggggctcaacctgcagttcctgctggttttcctctgcaccttcatgcagattgtcatctgtgtgatctggctctacaccgcgcccccgtcaagctaccgcaaccaggagctggaggatgagatcatcttcatcacgtgccacgagggctccctcatggccctgggcttcctgatcggctacacctgcctgctggctgccatctgcttcttctttgccttcaagtcccggaagctgccggagaacttcaatgaagccaagttcatcaccttcagcatgctcatcttcttcatcgtctggatctccttcattccagcctatgccagcacctatggcaagtttgtctctgccgtagaggtgattgccatcctggcagccagctttggcttgctggcgtgcatcttcttcaacaagatctacatcattctcttcaagccatcccgcaacaccatcgaggaggtgcgttgcagcaccgcagctcacgctttcaaggtggctgcccgggccacgctgcgccgcagcaacgtctcccgcaagcggtccagcagccttggaggctccacgggatccaccccctcctcctccatcagcagcaagagcaacagcgaagacccattcccacagcccgagaggcagaagcagcagcagccgctggccctaacccagcaagagcagcagcagcagcccctgaccctcccacagcagcaacgatctcagcagcagcccagatgcaagcagaaggtcatctttggcagcggcacggtcaccttctcactgagctttgatgagcctcagaagaacgccatggcccacaggaattctacgcaccagaactccctggaggcccagaaaagcagcgatacgctgacccgacacgagccattactcccgctgcagtgcggggaaacggacttagatctgaccgtccaggaaacaggtctgcaaggacctgtgggtggagaccagcggccagaggtggaggaccctgaagagttgtccccagcacttgtagtgtccagttcacagagctttgtcatcagtggtggaggcagcactgttacagaaaacgtagtgaattcataaaatggaaggagaagactgggctagggagaatgcagagaggtttcttggggtcccagggaagaggaatcgccccagactcctttcctctgaggaaga

SEQ ID NO: 4288 - DNA, 3783 bp, Homo sapiens
  source 1..3783: mol_type = unassigned DNA
caacaggcacctggctgcagccaggaaggaccgcacgccctttcgcgcaggagagtggaaggagggagctgtttgccagcaccgaggtcttgcggcacaggcaacgcttgacctgagtcttgcagaatgaaaggcatcacaggaggcctctgcatgatgtggcttccaaagactcaaggaccacccacattacaagtctggattgaggaaggcagaaatggagattcaaacaccacgtcttctattattttattaatcaatctgtagacatgtgtccccactgcagggagtgaactgctccaagggagaaacttctgggagcctccaaactcctagctgtctcatcccttgccctggagagacggcagaaccatggcattttatagctgctgctgggtcctcttggcactcacctggcacacctctgcctacgggccagaccagcgagcccaaaagaagggggacattatccttggggggctctttcctattcattttggagtagcagctaaagatcaagatctcaaatcaaggccggagtctgtggaatgtatcaggtataatttccgtgggtttcgctggttacaggctatgatatttgccatagaggagataaacagcagcccagcccttcttcccaacttgacgctgggatacaggatatttgacacttgcaacaccgtttctaaggccttggaagccaccctgagttttgttgctcaaaacaaaattgattctttgaaccttgatgagttctgcaactgctcagagcacattccctctacgattgctgtggtgggagcaactggctcaggcgtctccacggcagtggcaaatctgctggggctcttctacattccccaggtcagttatgcctcctccagcagactcctcagcaacaagaatcaattcaagtctttcctccgaaccatccccaatgatgagcaccaggccactgccatggcagacatcatcgagtatttccgctggaactgggtgggcacaattgcagctgatgacgactatgggcggccggggattgagaaattccgagaggaagctgaggaaagggatatctgcatcgacttcagtgaactcatctcccagtactctgatgaggaagagatccagcatgtggtagaggtgattcaaaattccacggccaaagtcatcgtggttttctccagtggcccagatcttgagcccctcatcaaggagattgtccggcgcaatatcacgggcaagatctggctggccagcgaggcctgggccagctcctccctgatcgccatgcctcagtacttccacgtggttggcggcaccattggattcgctctgaaggctgggcagatcccaggcttccgggaattcctgaagaaggtccatcccaggaagtctgtccacaatggttttgccaaggagttttgggaagaaacatttaactgccacctccaagaaggtgcaaaaggacctttacctgtggacacctttctgagaggtcacgaagaaagtggcgacaggtttagcaacagctcgacagccttccgacccctctgtacaggggatgagaacatcagcagtgtcgagaccccttacatagattacacgcatttacggatatcctacaatgtgtacttagcagtctactccattgcccacgccttgcaagatatatatacctgcttacctgggagagggctcttcaccaatggctcctgtgcagacatcaagaaagttgaggcgtggcaggtcctgaagcacctacggcatctaaactttacaaacaatatgggggagcaggtgacctttgatgagtgtggtgacctggtggggaactattccatcatcaactggcacctctccccagaggatggctccatcgtgtttaaggaagtcgggtattacaacgtctatgccaagaagggagaaagactcttcatcaacgaggagaaaatcctgtggagtgggttctccagggaggtgcccttctccaactgcagccgagactgcctggcagggaccaggaaagggatcattgagggggagcccacctgctgctttgagtgtgtggagtgtcctgatggggagtatagtgatgagacagatgccagtgcctgtaacaagtgcccagatgacttctggtccaatgagaaccacacctcctgcattgccaaggagatcgagtttctgtcgtggacggagccctttgggatcgcactcaccctctttgccgtgctgggcattttcctgacagcctttgtgctgggtgtgtttatcaagttccgcaacacacccattgtcaaggccaccaaccgagagctctcctacctcctcctcttctccctgctctgctgcttctccagctccctgttcttcatcggggagccccaggactggacgtgccgcctgcgccagccggcctttggcatcagcttcgtgctctgcatctcatgcatcctggtgaaaaccaaccgtgtcctcctggtgtttgaggccaagatccccaccagcttccaccgcaagtggtgggggctcaacctgcagttcctgctggttttcctctgcaccttcatgcagattgtcatctgtgtgatctggctctacaccgcgcccccgtcaagctaccgcaaccaggagctggaggatgagatcatcttcatcacgtgccacgagggctccctcatggccctgggcttcctgatcggctacacctgcctgctggctgccatctgcttcttctttgccttcaagtcccggaagctgccggagaacttcaatgaagccaagttcatcaccttcagcatgctcatcttcttcatcgtctggatctccttcattccagcctatgccagcacctatggcaagtttgtctctgccgtagaggtgattgccatcctggcagccagctttggcttgctggcgtgcatcttcttcaacaagatctacatcattctcttcaagccatcccgcaacaccatcgaggaggtgcgttgcagcaccgcagctcacgctttcaaggtggctgcccgggccacgctgcgccgcagcaacgtctcccgcaagcggtccagcagccttggaggctccacgggatccaccccctcctcctccatcagcagcaagagcaacagcgaagacccattcccacagcccgagaggcagaagcagcagcagccgctggccctaacccagcaagagcagcagcagcagcccctgaccctcccacagcagcaacgatctcagcagcagcccagatgcaagcagaaggtcatctttggcagcggcacggtcaccttctcactgagctttgatgagcctcagaagaacgccatggcccacaggaattctacgcaccagaactccctggaggcccagaaaagcagcgatacgctgacccgacacgagccattactcccgctgcagtgcggggaaacggacttagatctgaccgtccaggaaacaggtctgcaaggacctgtgggtggagaccagcggccagaggtggaggaccctgaagagttgtccccagcacttgtagtgtccagttcacagagctttgtcatcagtggtggaggcagcactgttacagaaaacgtagtgaattcataaaatggaaggagaagactgggctagggagaatgcagagaggtttcttggggtcccagggaagaggaatcgccccagactcctttcctctgaggaagaagggataatagacacatcaaatgccccgaatttagtcacaccatcttaaatgacagtgaattgacccatgttcccttt

SEQ ID NO: 4289 - DNA, 5009 bp, Homo sapiens
  source 1..5009: mol_type = unassigned DNA
ggggctgctgtggccggacccgaaggcgggcgccgggagcgcagcgagccagacgcgcctctccaagaccgtgaccttggcatagggagcggggctgcgcgcagtcctgagatcagaccagagctcatcctcgtggagacccacggccgaggggccggagctgcctctgtgcgagggagccctggccgcggcgcagaaggcatcacaggaggcctctgcatgatgtggcttccaaagactcaaggaccacccacattacaagtctggattgaggaaggcagaaatggagattcaaacaccacgtcttctattattttattaatcaatctgtagacatgtgtccccactgcagggagtgaactgctccaagggagaaacttctgggagcctccaaactcctagctgtctcatcccttgccctggagagacggcagaaccatggcattttatagctgctgctgggtcctcttggcactcacctggcacacctctgcctacgggccagaccagcgagcccaaaagaagggggacattatccttggggggctctttcctattcattttggagtagcagctaaagatcaagatctcaaatcaaggccggagtctgtggaatgtatcaggtataatttccgtgggtttcgctggttacaggctatgatatttgccatagaggagataaacagcagcccagcccttcttcccaacttgacgctgggatacaggatatttgacacttgcaacaccgtttctaaggccttggaagccaccctgagttttgttgctcaaaacaaaattgattctttgaaccttgatgagttctgcaactgctcagagcacattccctctacgattgctgtggtgggagcaactggctcaggcgtctccacggcagtggcaaatctgctggggctcttctacattccccaggtcagttatgcctcctccagcagactcctcagcaacaagaatcaattcaagtctttcctccgaaccatccccaatgatgagcaccaggccactgccatggcagacatcatcgagtatttccgctggaactgggtgggcacaattgcagctgatgacgactatgggcggccggggattgagaaattccgagaggaagctgaggaaagggatatctgcatcgacttcagtgaactcatctcccagtactctgatgaggaagagatccagcatgtggtagaggtgattcaaaattccacggccaaagtcatcgtggttttctccagtggcccagatcttgagcccctcatcaaggagattgtccggcgcaatatcacgggcaagatctggctggccagcgaggcctgggccagctcctccctgatcgccatgcctcagtacttccacgtggttggcggcaccattggattcgctctgaaggctgggcagatcccaggcttccgggaattcctgaagaaggtccatcccaggaagtctgtccacaatggttttgccaaggagttttgggaagaaacatttaactgccacctccaagaaggtgcaaaaggacctttacctgtggacacctttctgagaggtcacgaagaaagtggcgacaggtttagcaacagctcgacagccttccgacccctctgtacaggggatgagaacatcagcagtgtcgagaccccttacatagattacacgcatttacggatatcctacaatgtgtacttagcagtctactccattgcccacgccttgcaagatatatatacctgcttacctgggagagggctcttcaccaatggctcctgtgcagacatcaagaaagttgaggcgtggcaggtcctgaagcacctacggcatctaaactttacaaacaatatgggggagcaggtgacctttgatgagtgtggtgacctggtggggaactattccatcatcaactggcacctctccccagaggatggctccatcgtgtttaaggaagtcgggtattacaacgtctatgccaagaagggagaaagactcttcatcaacgaggagaaaatcctgtggagtgggttctccagggagccactcacctttgtgctgtctgtcctccaggtgcccttctccaactgcagccgagactgcctggcagggaccaggaaagggatcattgagggggagcccacctgctgctttgagtgtgtggagtgtcctgatggggagtatagtgatgagacagatgccagtgcctgtaacaagtgcccagatgacttctggtccaatgagaaccacacctcctgcattgccaaggagatcgagtttctgtcgtggacggagccctttgggatcgcactcaccctctttgccgtgctgggcattttcctgacagcctttgtgctgggtgtgtttatcaagttccgcaacacacccattgtcaaggccaccaaccgagagctctcctacctcctcctcttctccctgctctgctgcttctccagctccctgttcttcatcggggagccccaggactggacgtgccgcctgcgccagccggcctttggcatcagcttcgtgctctgcatctcatgcatcctggtgaaaaccaaccgtgtcctcctggtgtttgaggccaagatccccaccagcttccaccgcaagtggtgggggctcaacctgcagttcctgctggttttcctctgcaccttcatgcagattgtcatctgtgtgatctggctctacaccgcgcccccgtcaagctaccgcaaccaggagctggaggatgagatcatcttcatcacgtgccacgagggctccctcatggccctgggcttcctgatcggctacacctgcctgctggctgccatctgcttcttctttgccttcaagtcccggaagctgccggagaacttcaatgaagccaagttcatcaccttcagcatgctcatcttcttcatcgtctggatctccttcattccagcctatgccagcacctatggcaagtttgtctctgccgtagaggtgattgccatcctggcagccagctttggcttgctggcgtgcatcttcttcaacaagatctacatcattctcttcaagccatcccgcaacaccatcgaggaggtgcgttgcagcaccgcagctcacgctttcaaggtggctgcccgggccacgctgcgccgcagcaacgtctcccgcaagcggtccagcagccttggaggctccacgggatccaccccctcctcctccatcagcagcaagagcaacagcgaagacccattcccacagcccgagaggcagaagcagcagcagccgctggccctaacccagcaagagcagcagcagcagcccctgaccctcccacagcagcaacgatctcagcagcagcccagatgcaagcagaaggtcatctttggcagcggcacggtcaccttctcactgagctttgatgagcctcagaagaacgccatggcccacaggaattctacgcaccagaactccctggaggcccagaaaagcagcgatacgctgacccgacacgagccattactcccgctgcagtgcggggaaacggacttagatctgaccgtccaggaaacaggtctgcaaggacctgtgggtggagaccagcggccagaggtggaggaccctgaagagttgtccccagcacttgtagtgtccagttcacagagctttgtcatcagtggtggaggcagcactgttacagaaaacgtagtgaattcataaaatggaaggagaagactgggctagggagaatgcagagaggtttcttggggtcccagggaagaggaatcgccccagactcctttcctctgaggaagaagggataatagacacatcaaatgccccgaatttagtcacaccatcttaaatgacagtgaattgacccatgttccctttaaaattaaaaaaaagaagagccttgtgtttctgtggttgcatttgtcaaagcattgagatctccacggtcagatttgctgttcacccacatctaatgtctcttcctctgttctatcccacccaacagctcagagatgaaactatggctttaaactaccctccagagtgtgcagactgatgggacatcaaatttgccaccactagagctgagagtctgaaagacagaatgtcaccagtcctgcccaatgccttgacaacagactgaattttaaatgttcacaacataaggagaatgtatctcctcctatttatgaaaaccatatgatattttgtctcctacctgctgctgctattatgtaacatccagaaggtttgcacccctcctataccatatgtctgcttctgtccaggacatgatactgatgccatgtttagattccaggatcacaagaatcacctcaaattgttaggaagggactgcataaaccaatgagctgtatctgtaattaatattcctatatgtagctttatccttaggaaaatgcttctgttgtaatagtccatggacaatataaactgaaaaatgtcagtctggtttatataaggcagtattattgagctctatttccccaccccactatcctcactcccataagctaagccttatgtgagccccttcagggactcaagggtccagaagtccctcccatctctaccccaaagaattcctgaagccagatccaccctatccctgtacagagtaagttctcaattattggcctgctaatagctgctagggtaggaaagcgtggttccaagaaagatccaccctcaaatgtcagagctatgttccctccagcagtggtattaatactgccggtcacccaggctctggagccagagagacagaccggggttcaagccatggcttcgtcatttgcaagctgagtgactgtaggcagggaaccttaacctctctaagccacagcttcttcatctttaaaataaggataataatcattctttcccctcagagctcttatgtggattaaacgagataatgtatataaagtactttagcctggtacctagcacacaataagcattcaataaatattagttaatattat

SEQ ID NO: 4290 - DNA, 1606 bp, Homo sapiens
  source 1..1606: mol_type = unassigned DNA
acagtgcattcatgcagctgggccccaccccatctccagaggcaccttccactagcaacagtctccccaggcacaacacagctaacacaaggccccgcaggcaggactctgggacagacgcaggccagctgcccagagcccagaccaagcatggacgccgtggatgccaccatggagaaactccgggcacagtgcctgtcccgcggggcctcgggcatccagggcctggccaggtttttccgccaactagaccgggacgggagcagatccctggacgctgatgagttccggcagggtctggccaaactcgggctggtgctggaccaggcggaggcagagggtgtgtgcaggaagtgggaccgcaatggcagcgggacgctggatctggaggagttccttcgggcgctgcggccccccatgtcccaggcccgggaggctgtcatcgcagctgcatttgccaagctggaccgcagtggggacggcgtcgtgacggtggacgacctccgcggggtgtacagtggccgtgcccaccccaaggtgcgcagtggggagtggaccgaggacgaggtgctgcgccgcttcctggacaacttcgactcctctgagaaggacgggcaggtcacactggcggaattccaggactactacagcggcgtgagtgcctccatgaacacggatgaggagttcgtggccatgatgaccagtgcctggcagctgtgagcagctccggctcagccctgctgccctggcctgtcactccccacccctgccggagacctcccttccctgggccccttctctcctgggcagccacaccacagagcggggaggggcaggtgggggaatggaggctgcaggactggctagaccaggtccctgccggtccaccaggcggaggtgggacaaaggtcctaacaggagtcactggctcaggaccccagggagaaacgctctccccacccacgccatgctgaccagagatcttgcagcccctgtggatgcccccgccgaggtcccccgatccccgcacccggactgctgctccctgcccctcccttgcgggtcccccaggaagccaggtgaccccaggtgggaggctgtgtgtggaggccatcctggaaggaagtttagacctgcccaggtgtggagcgaggggcacaggggcatcctaacctcagaaactgaaataaagcctttgaaaaaaaaatctgtaaaacatcaacccccaatcagaagatggcaaatggggaataaaaatagcaggtaacatgtccagcgggcccagtatctacattctggtgagcggcccgaggctgggagctctgggcgggggcagaccggcggggccttgcagcaggggtgggggtaaagtgcgggtggtggtggagagaacagggctgtggctggaccccagcactggtgacacgctgggtgggagcatgaggccccaggctgctggaggtcctcgcccggggaggtggaggccgttcctggtcaggggcttcctgaggcccctggggcatgcagaggccagggttttagttaaaagtttaatgtagttcccaaatacatttcatatgacaatcttacataaatgttccaaaac

SEQ ID NO: 4291 - DNA, 4081 bp, Homo sapiens
  source 1..4081: mol_type = unassigned DNA
caagaaattcttactaaacatttacaaatgagatgccaaaacagcacttcagtaatagtggttatattttatagttctctacacagaaaaaaaaatgctgcttgtaacactcatagacatgaaagtatttctctgcctatttaaataattctggattgcagtgagccaccaggattttggcagccagatgtcaccatgatttctcataaaactgatgatgttacatcagtggtggcctgaatcaagatgctgggatgcctgtaacctacagattggtttcagactccaaaggcaacttttttttttttttttttttgagacggagtctggctctgccaccctgccacccaggctgaagtacagtggtgtgatctaggctcactgcaacctctgcctccagggttcaagtgattctcctgccttggcctcctgagtagctgggattacaggcatgcaccaccatgcccagctatttattttttttagtagagatggggtttcaaaatgttggccaggctggtcttgaactcctgacctcaagtgatccgcccacctcagcctcccaaagtgctgggattacagctgtgagccaccgcgcccagccctggcctctttttttaagttatttatttatttttgagacagagtctcactctgtcgcccaggctgtggtgcagtggcatggtcttggttcactgcaacctctgcctcctgggttcaagtgattctcctgcctcagcctctggagtaggtgggattacaggcacccgccaccatacctggctaattttctttttttttttttgagacaaagtcttgctcttgtcccccagtctggagtgcaatggcacgatctcggctcactgcaacctccgcttcccaggttcatgcaattctcctgcctcagcctcccgagtagctgggattacaggcacataccaccacgcccagctagtttttcgtattttaagtagagacagggtttcaccatgttggccaggctggtctcaaactcctgacctcaggtgatctgtctgcctcggcctcccaaagtgctgtgattacaggcatgagccaccgcacccggctgactaatttttgtatttatagtagagacagggtttcaccatgttggccaggctggtctcgaactgctgacctcatgatctgcccgcctcggcctcccaaagtgctgggattacaggcgtgagccaccgtgcccggccagtttatttacttatttttaagaggcgggcgtcttgctctgtaacccaggctggagtgcagtggtgcgatcatagctcactgcagcctccaactcccgggctcaagtgatcctcctgcctcagccttccaagtaggtgggattacaggaacacaccaccatgcctggctaattttttgtagtttttgtagagatgggggggtctcactatgttgcacaggcgggtctcaaactcctgggctcaagtgatcttcctgccctggcttcccaaagtgttgggattacaggcatgagccaccgcgctcaggcaaggcaacttctgacaatataattgtgctgtgagcgaggtaaagccaggcttggagaaggctccgattgatgatccttgggtcggggcgaacagtgggtcctcaaacagggcccacgtttcaagtcctggaaaacccacctatcttagcgggcaggtatatccgatgtctccgttgaaggccttcagtgaggtggcttcgtctcttgaggtttatgtccaggatcagggctgctcttccactcggggtcacaacctctggctcaccaccttgtcaggagccagcccactaagtcacgtttcaggcctgaaaaccaacaacaaaagatccgtaaagacagaaatcctgggactggctcctaacaacggccagtgacaagctttgtggcagtgagcagaggtgtccctcaggctcagctcagtctctgtgggttgcaggacctgcccttggaggtgggcctgggtgggaggtcttagggccccaggacctgggccacctggggctttttttttttttttctttttgagatggagtcttgctctgtcgcccagactggagtgcagtggtgcaatcttggctcactgcaagctccacctcctgggttcaagcgattctcctgcctcagcttcctaagtagctcggattacaggcgcccaccatcatgcacggctaatttttgtatttttagtagaggcggggtttcaccatgttggtcaggctggtctcaaactcctcaccttgtgatctgcccacctcggcctcccaaagtgctgggattacaggcatgagccaccgcgcccagcccacctggggcatttttgttgctgtacaatagaaacaagttctctatatgttccccaggctggtccaaactcctgggctcaagtgatcctcccacctagacctcccaaagtgctgggatttcaggcatgagccgcagtggccggtcagaacctggggcccttttgaactttgattcctcagcaattttgtcagccctggctcgggctgagaagcccctgtgaagccagagagggaaagggacctgtccagggtcacacaggaatcatgcgtcaagcctccccagccacggacttgtctccatccagggcatttcagcccctgcagggcagtggcctgcccctcctccttggagccaggaagggatgcagtgccacagggatctggctctgtcccaggccctgtggggctggcagttgagtaagcagtcaggctgggcgcacccatccctcccccactccccactgcccagcacagtgcattcatgcagctgggccccaccccatctccagaggcaccttccactagcaacagtctccccaggcacaacacagctaacacaaggccccgcaggcaggactctgggacagacgcaggccagctgcccagagcccagaccaagcatggacgccgtggatgccaccatggagaaactccgggcacagtgcctgtcccgcggggcctcgggcatccagggcctggccaggtttttccgccaactagaccgggacgggagcagatccctggacgctgatgagttccggcagggtctggccaaactcgggctggtgctggaccaggcggaggcagagggtgtgtgcaggaagtgggaccgcaatggcagcgggacgctggatctggaggagttccttcgggcgctgcggccccccatgtcccaggcccgggaggctgtcatcgcagctgcatttgccaagctggaccgcagtggggacggcgtcgtgacggtggacgacctccgcggggtgtacagtggccgtgcccaccccaaggtgcgcagtggggagtggaccgaggacgaggtgctgcgccgcttcctggacaacttcgactcctctgagaaggacgggcaggtcacactggcggaattccaggactactacagcggcgtgagtgcctccatgaacacggatgaggagttcgtggccatgatgaccagtgcctggcagctgtgagcagctccggctcagccctgctgccctggcctgtcactccccacccctgccggagacctcccttccctgggccccttctctcctgggcagccacaccacagagcggggaggggcaggtgggggaatggaggctgcaggactggctagaccaggtccctgccggtccaccaggcggaggtgggacaaaggtcctaacaggagtcactggctcaggaccccagggagaaacgctctccccacccacgccatgctgaccagagatcttgcagcccctgtggatgcccccgccgaggtcccccgatccccgcacccggactgctgctccctgcccctcccttgcgggtcccccaggaagccaggtgaccccaggtgggaggctgtgtgtggaggccatcctggaaggaagtttagacctgcccaggtgtggagcgaggggcacaggggcatcctaacctcagaaactgaaataaagcctttgaaaaaaaaatctgtaaaacatcaacccccaatcagaagatggcaaatggggaataaaaatagcaggtaacatgtcc

SEQ ID NO: 4292 - DNA, 1525 bp, Homo sapiens
  source 1..1525: mol_type = unassigned DNA
acagtgcattcatgcagctgggccccaccccatctccagaggcaccttccactagcaacagtctccccaggcacaacacagctaacacaaggccccgcaggcaggactctgggacagacgcaggccagctgcccagagcccagaccaagcatggacgccgtggatgccaccatggagaaactccgggcacagtgcctgtcccgcggggcctcgggcatccagggcctggccaggtttttccgccaactagaccgggacgggagcagatccctggacgctgatgagttccggcagggtctggccaaactcgggctggtgctggaccaggcggaggcagagggtgtgtgcaggaagtgggaccgcaatggcagcgggacgctggatctggaggagttccttcgggcgctgcggccccccatgtcccaggcccgggaggctgtcatcgcagctgcatttgccaagctggaccgcagtggggacggcgtcgtgacggtggacgacctccgcggggtgtacagtggccgtgcccaccccaaggtcacactggcggaattccaggactactacagcggcgtgagtgcctccatgaacacggatgaggagttcgtggccatgatgaccagtgcctggcagctgtgagcagctccggctcagccctgctgccctggcctgtcactccccacccctgccggagacctcccttccctgggccccttctctcctgggcagccacaccacagagcggggaggggcaggtgggggaatggaggctgcaggactggctagaccaggtccctgccggtccaccaggcggaggtgggacaaaggtcctaacaggagtcactggctcaggaccccagggagaaacgctctccccacccacgccatgctgaccagagatcttgcagcccctgtggatgcccccgccgaggtcccccgatccccgcacccggactgctgctccctgcccctcccttgcgggtcccccaggaagccaggtgaccccaggtgggaggctgtgtgtggaggccatcctggaaggaagtttagacctgcccaggtgtggagcgaggggcacaggggcatcctaacctcagaaactgaaataaagcctttgaaaaaaaaatctgtaaaacatcaacccccaatcagaagatggcaaatggggaataaaaatagcaggtaacatgtccagcgggcccagtatctacattctggtgagcggcccgaggctgggagctctgggcgggggcagaccggcggggccttgcagcaggggtgggggtaaagtgcgggtggtggtggagagaacagggctgtggctggaccccagcactggtgacacgctgggtgggagcatgaggccccaggctgctggaggtcctcgcccggggaggtggaggccgttcctggtcaggggcttcctgaggcccctggggcatgcagaggccagggttttagttaaaagtttaatgtagttcccaaatacatttcatatgacaatcttacataaatgttccaaaac

SEQ ID NO: 4293 - DNA, 1145 bp, Homo sapiens
  source 1..1145: mol_type = unassigned DNA
cttataaatatcctgtatagggctgtcatcagtgatccagagcaaaatttagccattgagcaaaaagaaagtgatcatatccttccagattcaaagatgacacctcttcgatttagaaaaagaacactacatgaaacaaagataagaactcattctacattaactgaaaatgtgctttctcataaattacagtttgatggtaggatcgtatcacgaacaaatgtgcttccttttattcaaaaaagcatttatagtcatcagtgtggacgaagaaaaggaaaacaataccgacttggtgatttttatgttggtgcaaccttgacatttttgagttctgatcatctcagccttccagaaagcatcaaagaaaacacattacttaaactccgaatcacaaatattgatcaaatagctttggattctctcaaaactgcttctatggaacaggaggatgatataatcattcaagaaaccaatgataggctggtcttcaaagcaattcaagatgtgctaaaagaaaaactacataaaagaggtgttcgtattttgactggattgggaaaatattttcaacagttggacaaggaaggaaatggacttttagataaggcagattttaagcaagctctaaaagtgtttcacttagaagtgtctgaaaaggattttgagtctgcatggctaattctgaatgacaatggcaatggcaaggttgattatggagaattcaaacgtggtattattggtgaaatgaatgaatacaggaaatcatatgttcgaaaggcctttatgaaactggatttcaacaaaagtggcagtgtgcctattataaacataagaaaatgttactgtgcaaagaagcattctcaagtaatttcaggttgaccagcaaggacaaacatgaaaatgcttaaaaaaaagaaagcgcttaaaacaaagaaatagaaggtaatgggcatatataaaataagccaagcaagagaagagcaaagacaatctgcagggtggacatggatgtattcgtttctgatcatgagaagaggctcttgtcatacatatcgttccatttttattttaaagttctataaacttctgaggtaaactgatttcttggatgtacttaataaagaataaatgtttcatattgg

SEQ ID NO: 4294 - DNA, 3430 bp, Homo sapiens
  source 1..3430: mol_type = unassigned DNA
ggagccaaattcagccattctttggaagaaagaagcctctacaacaaaggtggacttctgagtcatggacaaaccagaattcttgcccaccagtggtcccacgacttgatttgggaagccttgttgactctgatgatgaggacaatttttcatatattccacttagtacagcaaacctgccaaattcatcttctactcttggctgggtcacaccatgtcaaactccatatactcagtatcatctaaataaattggatcagaacataatacctgaaaatttgccagcaccaacagacaaatgtaaactaaaatatcagcaatgtaaaactgaaattaaagagggctataagcagtatagtcagagaaatgcagaaaatacaaaatcaaatgttacacataaacagtctccaagaaacaagatagatgaaaagtgtgtgcaagatgaagaagccaacacagatgaccttacgactctggataggaaagccatcttacagcaaggttatgcagacaactcttgcgataaacaacagagggcaagaaaattggatgcagaaattgtggctgcagagaagaagaaacagattgttgcagagcaagtgatgatagaccacttatctagggctgtcatcagtgatccagagcaaaatttagccattgagcaaaaagaaagtgatcatatccttccagattcaaagatgacacctcttcgatttagaaaaagaacactacatgaaacaaagataagaactcattctacattaactgaaaatgtgctttctcataaattacagtttgatggtaggatcgtatcacgtaatggacgtgatgcttgcagagagctcattgggttctttttcactcatgaccaatcccttacaatttatgaatatcgacaatttgggaaaaatagaacaaatgtgcttccttttattcaaaaaagcatttatagtcatcagtgtggacgaagaaaaggaaaacaataccgacttggtgatttttatgttggtgcaaccttgacatttttgagttctgatcatctcagccttccagaaagcatcaaagaaaacacattacttaaactccgaatcacaaatattgatcaaatagctttggattctctcaaaactgcttctatggaacaggaggatgatataatcattcaagaaaccaatgataggctggtcttcaaagcaattcaagatgtgctaaaagaaaaactacataaaagaggtgttcgtattttgactggattgggaaaatattttcaacagttggacaaggaaggaaatggacttttagataaggcagattttaagcaagctctaaaagtgtttcacttagaagtgtctgaaaaggattttgagtctgcatggctaattctgaatgacaatggcaatggcaaggttgattatggagaattcaaacgtggtattattggtgaaatgaatgaatacaggaaatcatatgttcgaaaggcctttatgaaactggatttcaacaaaagtggcagtgtgcctattataaacataagaaaatgttactgtgcaaagaagcattctcaagtaatttcaggccattcaacagaggaagaaatcaaatcatcctttctagaaacattaaaagttgcctgcagcaagtctgatgaagtgtcatatggtgaatttgaagattactatgaaggtttaagtataggaatagtagatgatgaagactttgttaacatcttacgtactccatgggggatttagtctttaataatacatatgtcatcaacactaagcattttattggagagatgatatcaatgtaaaggatgatcaaacactggaatatattttcctaggacttcctttattctggtttcttgtttgtttgttttgttttgttttgttttctcaaaaatgttgaatttggaaagagaactatccagaaagatagatgtaggggtgtgttagtgtttgtgcatgtgtatgcctgttcacatgtccttacatttgtaaagatatctttttggtttattacttatcttgcgtatattttagaggtcattttttattaacttcagtaggaaagttacatctgcatcaaacaatatggcaacatctatttattaaccaagtttcctgtcctttcacattgttttttgctacctcttcctcagaatatatttgccaccatggtcaatttgataaattagaattgggcccaaagccagtgagataattcaatgtgtttttaacacatgaaaatattaaaggatatgcaagagaaatttttcaagcagtgtgattatagatgttttctgtatatagaatatttcaaatgatggaggtttaccccatgatgctcatttaaatactgacttgtcttttaaatctgtcttctaaattatgtactgttgttggttaaatagagcacaatgtagttattctaatgcccagttgtatttgttcttttattctgctttttaactgtaatcctttttaccagcatacgattgttattgagcaatatgaaagggaaatgttctttattaaaatcaatacattatcttattaaacaaagatcctaaaagtatattgttgcatatatgaatccaaggaatagttcagtaattattgcctaaaatgtgaaagcatattttgtatcctaaaatgaatgtatgatattctaaacatctgttttagtataacaaacaattgaaacatttccttctaaatatatgttatttaatagttacatgtattataatcattctttctaaattctttgctagtcatttcttcctgggaatacagagaaaagagacaactttatgagttgttttcaacttcataattttaaattttctatgttaatataacataaattagaaaaaataagtgattcaaaatgaaaatatttactttgtagaatatgactttagacatatcactgtatccatctatacttggcagcaacatgagaagtgtgatacatgtgaacccaacaaattcaaagttgcacttttcaagatgtgagaaggtactaaaacttaatactaaaacatgagagggaaaatatgtgtaaacctctagtgctattttcactggctaaattctttatttcttgatttttttaaaaattaggttattaaaattaaaacaatatgctagaagacattttggcagaaataagtctataacactatttttgtcacatatctttttcttggaaaaatttatccaactatagacatcttaaaccctacaaattgttcttgttaaaaatgactaatactgggggtgctcaatatgcatatagtgtttttcattgataatttttatttagttcttaagaaacctgttcttaatgttggcatgtcacatttttctgttactataatcagaaaatgtatagtctgttatactgtaaaaaaaaaaaaaaa

SEQ ID NO: 4295 - DNA, 2135 bp, Homo sapiens
  source 1..2135: mol_type = unassigned DNA
agacgcgggcctggactgtctagactgtcctgtctaaagctttctgaatgcggtttttggaggaatcgcgctagtttataccttttccaactcttctaactctggacctcttcttaccgagcttgttaggtgaaatcaggctgactgtctcttgtgcccctcgcctgtcctgtccaggaatcccagttaggtaggggatggggaattccttctgctacactgcagtatactgcatgataaacacaggaactcaaatggatttagaggttaaaggagttgctgccacttctaggagccaaattcagccattctttggaagaaagaagcctctacaacaaaggtggacttctgagtcatggacaaaccagaattcttgcccaccagtggtcccacgacttgatttgggaagccttgttgactctgatgatgaggacaatttttcatatattccacttagtacagcaaacctgccaaattcatcttctactcttggctgggtcacaccatgtcaaactccatatactcagtatcatctaaataaattggatcagaacataatacctgaaaatttgccagcaccaacagacaaatgtaaactaaaatatcagcaatgtaaaactgaaattaaagagggctataagcagtatagtcagagaaatgcagaaaatacaaaatcaaatgttacacataaacagtctccaagaaacaagatagatgaaaagtgtgtgcaagatgaagaagccaacacagatgaccttacgactctggataggaaagccatcttacagcaaggttatgcagacaactcttgcgataaacaacagagggcaagaaaattggatgcagaaattgtggctgcagagaagaagaaacagattgttgcagagcaagtgatgatagaccacttatctagggctgtcatcagtgatccagagcaaaatttagccattgagcaaaaagaaagtgatcatatccttccagattcaaagatgacacctcttcgatttagaaaaagaacactacatgaaacaaagataagaactcattctacattaactgaaaatgtgctttctcataaattacagtttgatggtaggatcgtatcacgtaatggacgtgatgcttgcagagagctcattgggttctttttcactcatgaccaatcccttacaatttatgaatatcgacaatttgggaaaaatagaacaaatgtgcttccttttattcaaaaaagcatttatagtcatcagtgtggacgaagaaaaggaaaacaataccgacttggtgatttttatgttggtgcaaccttgacatttttgagttctgatcatctcagccttccagaaagcatcaaagaaaacacattacttaaactccgaatcacaaatattgatcaaatagctttggattctctcaaaactgcttctatggaacaggaggatgatataatcattcaagaaaccaatgataggctggtcttcaaagcaattcaagatgtgctaaaagaaaaactacataaaagaggtgttcgtattttgactggattgggaaaatattttcaacagttggacaaggaaggaaatggacttttagataaggcagattttaagcaagctctaaaagtgtttcacttagaagtgtctgaaaaggattttgagtctgcatggctaattctgaatgacaatggcaatggcaaggttgattatggagaattcaaacgtggtattattggtgaaatgaatgaatacaggaaatcatatgttcgaaaggcctttatgaaactggatttcaacaaaagtggcagtgtgcctattataaacataagaaaatgttactgtgcaaagaagcattctcaagtaatttcaggttgaccagcaaggacaaacatgaaaatgcttaaaaaaaagaaagcgcttaaaacaaagaaatagaaggtaatgggcatatataaaataagccaagcaagagaagagcaaagacaatctgcagggtggacatggatgtattcgtttctgatcatgagaagaggctcttgtcatacatatcgttccatttttattttaaagttctataaacttctgaggtaaactgatttcttggatgtacttaataaagaataaatgtttcatattgga

SEQ ID NO: 4296 - DNA, 2569 bp, Homo sapiens
  source 1..2569: mol_type = unassigned DNA
ggggagaggaggggaaagctagacctgcagagtgaagaaagctggtaatagatgtctgacaaactaaagaaagacttgtgttacgatcagaacataatacctgaaaatttgccagcaccaacagacaaatgtaaactaaaatatcagcaatgtaaaactgaaattaaagagggctataagcagtatagtcagagaaatgcagaaaatacaaaatcaaatgttacacataaacagtctccaagaaacaagatagatgaaaagtgtgtgcaagatgaagaagccaacacagatgaccttacgactctggataggaaagccatcttacagcaaggttatgcagacaactcttgcgataaacaacagagggcaagaaaattggatgcagtaagttgtcagcatttttacttatttggaaattgtggctgcagagaagaagaaacagattgttgcagagcaagtgatgatagaccacttatctagggctgtcatcagtgatccagagcaaaatttagccattgagcaaaaagaaagtgatcatatccttccagattcaaagatgacacctcttcgatttagaaaaagaacactacatgaaacaaaggtgcaaccttgacatttttgagttctgatcatctcagccttccagaaagcatcaaagaaaacacattacttaaactccgaatcacaaatattgatcaaatagctttggattctctcaaaactgcttctatggaacaggaggatgatataatcattcaagaaaccaatgataggctggtcttcaaagcaattcaagatgtgctaaaagaaaaactacataaaagaggtgttcgtattttgactggattgggaaaatattttcaacagttggacaaggaaggaaatggacttttagataaggcagattttaagcaagctctaaaagtgtttcacttagaagtgtctgaaaaggattttgagtctgcatggctaattctgaatgacaatggcaatggcaaggttgattatggagaattcaaacgtggtattattggtgaaatgaatgaatacaggaaatcatatgttcgaaaggcctttatgaaactggatttcaacaaaagtggcagtgtgcctattataaacataagaaaatgttactgtgcaaagaagcattctcaagtaatttcaggccattcaacagaggaagaaatcaaatcatcctttctagaaacattaaaagttgcctgcagcaagtctgatgaagtgtcatatggtgaatttgaagattactatgaaggtttaagtataggaatagtagatgatgaagactttgttaacatcttacgtactccatgggggatttagtctttaataatacatatgtcatcaacactaagcattttattggagagatgatatcaatgtaaaggatgatcaaacactggaatatattttcctaggacttcctttattctggtttcttgtttgtttgttttgttttgttttgttttctcaaaaatgttgaatttggaaagagaactatccagaaagatagatgtaggggtgtgttagtgtttgtgcatgtgtatgcctgttcacatgtccttacatttgtaaagatatctttttggtttattacttatcttgcgtatattttagaggtcattttttattaacttcagtaggaaagttacatctgcatcaaacaatatggcaacatctatttattaaccaagtttcctgtcctttcacattgttttttgctacctcttcctcagaatatatttgccaccatggtcaatttgataaattagaattgggcccaaagccagtgagataattcaatgtgtttttaacacatgaaaatattaaaggatatgcaagagaaatttttcaagcagtgtgattatagatgttttctgtatatagaatatttcaaatgatggaggtttaccccatgatgctcatttaaatactgacttgtcttttaaatctgtcttctaaattatgtactgttgttggttaaatagagcacaatgtagttattctaatgcccagttgtatttgttcttttattctgctttttaactgtaatcctttttaccagcatacgattgttattgagcaatatgaaagggaaatgttctttattaaaatcaatacattatcttattaaacaaagatcctaaaagtatattgttgcatatatgaatccaaggaatagttcagtaattattgcctaaaatgtgaaagcatattttgtatcctaaaatgaatgtatgatattctaaacatctgttttagtataacaaacaattgaaacatttccttctaaatatatgttatttaatagttacatgtattataatcattctttctaaattctttgctagtcatttcttcctgggaatacagagaaaagagacaactttatgagttgttttcaacttcataattttaaattttctatgttaatataacataaattagaaaaaataagtgattcaaaatgaaaatatttactttgtagaatatgactttagacatatcactgtatccatctatacttggcagcaacatgagaagtgtg

SEQ ID NO: 4297 - DNA, 6289 bp, Homo sapiens
  source 1..6289: mol_type = unassigned DNA
gactccagctccgcggcgccctcgccgggtgcgtgccgctcgcgcgcccgccagccaggctctccgcgcccgccgcccgcgccgcgctggcccgggctctcccgcccgcgcttcatggctgcacacgagtgggactggttccaacgcgaggagctcatcgggcagattagcgacatccgagtgcagaacctgcaagttgagagggaaaatgtgcagaagaggacctttacacgatggataaatctacatctagaaaagtgcaacccacctctagaagttaaagatttattcgtcgatatacaagatggcaaaatcctaatggctttgttagaagtcctgtctgggcggaatctgctgcacgaatacaaatcctcgtcgcatcgtatttttcggttgaacaacatagcgaaagcacttaagtttttggaagatagcaatgtaaaactggttagcattgatgcagcagaaatagcagatggcaacccttctttggttcttgggctgatatggaacataatcctcttcttccagattaaggagctcacaggcaacctcagcagaaactctccatcttccagcttgtcccctggctcagggggcacagactcagactcatccttcccacccacacccactgcagagaggagcgtggcaatatcggtgaaagaccagaggaaggctatcaaggccctgttggcgtgggtgcagaggaaaacgagaaagtatggcgtggcggtgcaggactttgcgggcagttggaggagtgggctggctttcctggcggtgatcaaggccattgaccccagcctggtggacatgaaacaggccctggaaaattccacacgagaaaatctagagaaggctttcagcatcgcacaggatgccctgcacatccccaggctcctggagccagaagacatcatggttgacacaccagacgagcagtctatcatgacttacgtggcacagtttctagaacgttttccggagttggaagccgaagatattttcgattcagataaagaagttcctatcgaatccacttttgttcgcatcaaagaaactccttctgaacaggagagcaaagtcttcgttctgactgaaaatggggagcgtacctacactgttaaccatgaaaccagccacccaccaccctccaaagtctttgtctgtgacaagcccgagagcatgaaggaattccgcctggatggtgtttccagccatgcgctgtcagacagctccaccgagttcatgcaccagattattgaccaggtcctgcaagggggcccaggtaagaccagcgacatcagtgagccatctccagaatcctccattttatcatccagaaaggagaacgggaggtccaactctttgccgatcaagaaaacagttcactttgaggctgacacctacaaggatcctttctgcagtaagaacctgtccctttgctttgaagggagcccaagagtggcaaaggaatcattgaggcaggatggacatgtcttggcagttgaggttgctgaggaaaaggaacagaaacaggaatcctcgaagattccagaatcctcctctgacaaggtcgctggtgacatttttttggtggagggcacaaacaataattctcagtcttcttcctgtaatggtgctttagagagtacagcccgccacgatgaagaaagtcactctctttcacccccaggagaaaatactgtgatggccgattccttccagatcaaggttaacctgatgactgtagaagctttagaggagggagactattttgaagccatcccattaaaagcctcaaaatttaacagcgacctaatagattttgcttctaccagccaggctttcaacaaagttccttcacctcatgagacaaaacctgacgaggatgctgaggcttttgagaatcatgctgaaaaactaggtaaaaggagtattaaatctgctcacaaaaagaaggattcgccagagcctcaagttaagatggacaaacatgaacctcatcaggactccggagaagaagctgaaggctgtccttcagccccagaagagacaccagtggataaaaagccagaggtgcatgaaaaggccaagagaaagtccacccgtcctcattatgaggaagagggagaagacgatgacctccagggtgtgggcgaggaattatcttccagccccccaagcagctgtgtcagcttggagacccttgggagtcacagcgaagaaggcctggatttcaagccctccccacccctctcaaaggtttccgtcattccccacgacctcttctatttcccacactatgaggttcccctggctgcagttttggaggcttatgtagaagacccggaggatctaaaaaatgaagaaatggatctcgaagagccagagggctatatgccagacctggactccagggaggaggaggccgatggctctcagagcagctccagttcctcggtgccaggagagagcctccccagtgccagcgaccaggtgctgtatctcagcaggggtggtgtgggtaccacaccagcctcagaacccgctccactggccccccatgaggaccaccagcaaagggagaccaaagagaatgaccccatggacagccatcagtcccaggaatccccaaacctggaaaacatagcaaaccccctagaagaaaatgtaacgaaagaatcaatcagtagtaaaaaaaaggaaaaaaggaaacatgtggaccacgtagaaagttcactatttgtagcaccaggaagtgttcaatcctcagatgacctagaagaagacagtagcgactacagcattccttccaggactagtcacagtgactccagcatttaccttcgacgacatactcataggtcttcggaatcggatcattttagctatgttcagttgaggaacgcagcagatctggatgacagaagaaaccgaatattaaccaggaaggccaacagctcaggagaagccatgtcactggggagccacagcccgcagagtgactccctgacacagcttgtccagcagccggatatgatgtattttattctcttcctgtggctcctggtgtactgcttgctgctcttcccacaactggatgttagcaggctctgatacgtgtgtctggataataaaaaagacaggaccctgaccaggggcggggttacttcattttattttgggttctgggtggggcacttctacagacagttgaggacctccgaggaaacttagaccccctttctcgctattgtggtttttttttttttttcaggtttccttttttttctggacaacctgagcatgcttttttctttggctgtgtactcaaaactcaggcatgcagctggatccgtaggtggggttttgtccttgtgtgccttgctgggttggatagggagcattgttagtgatcattagcccgcctggatcttagcacaccccacattgcaggttcacacgctggatgaacttgagtttcttacctctcagatgaagggctgcttaatgagaaagagggtgggcaccccaggccaagccccagctggggagagagctgccacgttttcctccaagcgtgggtgtttgagagaaggtgctggggtccatgcacctgtcgcagtccggtaactggttgcattcactaggggaaatccgagcagccagctctgtgtaagcacatccaggaatggcagaatccagggaggaaggtgaaagctgtgttgagagccactgtgtgctctttttcaccctgttttttttgttgtttttttgttttgttttttgtttgaggggagataacacttgaaattcagttttccattgattggattgagatagaaccatgattttcaaaccagatcgccagggcccagcagggccatataaaagccatgaggagtggctgggctggaatcagctcccagcagtgctggagctgggtggtggggtagcttcctgcccactaaagctttggtgcacacctccctcagaatgcatgtcttggaacgggcattctttgtggtcacttgtaatgggtttcttgaagaggctttctggacagcactccgggagcaggccagcacaggaggtttgtgaaagaagagaggcatctctagcacccctgcccccagtcttcctcagccccaggctccctctgctctctcctccctgccaagactcaggtccgtggtgagtctctgcattggttcctcctccccttgctctccccttcagaaagcatgtaccaggcaacccttataaaatcacaaatgagtcaggaggggactcagtgagcatcttgtctagctggacccagagagacagagcagcttgaccaagatcatatagccgaccaggggcagacttgcagtgagcacacaggcacctgatgccctgtccagagctgtcaccccttgtaggaaacttccactgggcacaccaatgtcctgagaaaaagataaaatgactagattaaaatgtccacattcaagcaaaaccaaaaagtttagaccaactatcgacatttgttttgttcttgtatttttcccatgaggaattcttactcaccttcaagctcatccccaattccttctgaaatacccttgacagctgcaacagcttgtcatttgacataccagcgtcgctcttactccaggaatcacgtttctttctttgctagccaaggacttgctcatttcaagcagtgggtttcaagtttacagaattccagcatggccagaagaatttacatagcacatctgagtcgatgacagccaaaatctggcctctaaaccagtctgattatagtctgtctcccctcctgaaagaatttcagccttccaaccagaaagctgctgggagcttggagtgattccatctggaaggccaagagccccatggaaaatgagctaattaatgagctccctggcatcaatgaaagctcaaaggtacagataataaagattatgtgatagtttataactctgggcaccatgcagtccttgcctaaattagatgctcgaagagcctgggaagagccaacccaaatgtgaatcatttcattttatgggtctagaccttgttcagaaaaacctctgcaagatacttctctcacctattacaacttgtaatattgtttaaaacatctactggcaagatgcctgaaagtcatttggttcaggttggcagtcaactgatattttgcaaaggaaaaaaaaatctcatttgagtataggcttctatggaagaagctggatatagaaaatggatgtggaagtctgcaggacaaaccaccccattgcttgtaaattttttttaaattaaaagaaatacaataaggcttttaacaagaactagcagtcccctaagtctcgctgcttagaagtaaccactttcaactctcttatgtttgcatttctacataacgtgcttacactttattttttaatttagaaacatctactggcttgctgtcacagtagaggaggatttcactcttaccataccgtgctttggttttccagtatagctagatcacatcatttagtacatttctattaggtgttgacattacctggagcacttaaggattgttgactcccaagcccagcagtgtgttatggttacatgtcctttctcctccaaatgtccccattaatttgctattctctctctttactttttttttttttttggtgtggcacattctttaataacttcctgaggaagagaacatgggaagtaaatatggttgtaaatattttgagatttttgcatgacttaagatgtctgtattctgcccttaacagaaatgtggctgagcatagaatgacaggtggaaaataataccctcccctagcccctcccaagcgtgctggttgagatttctgatgccattctgattcccgtacctttatatgtgacttaggtttttttatccacccttcctggaaacatttaagatctctttattcttggtgttctgaactgtcatgatggtgttgtatcccgggtgttaaaccttgtgctgggccttcatgggaaatttcttaaattttcttgtgattatttacattctttctttctggaccacctattatttcaatgttggaccctcccctacacccaggctgatgctctaatattttttatcttttctatttttcgtctatgtttctgatctgctttcaggaagaattattcatttttatcttcccaatctgaatgttttattgaatttttattttccaagttaataaaacctttggttattatcctg

SEQ ID NO: 4298 - DNA, 4242 bp, Homo sapiens
  source 1..4242: mol_type = unassigned DNA
gatacggcgcaccatatatatatcgcggggcgcagactcgcgctccggcagtggtgctgggagtgtcgtggacgccgtgccgttactcgtagtcaggcggcggcgcaggcggcggcggcggcatagcgcacagcgcgccttagcagcagcagcagcagcagcggcatcggaggtacccccgccgtcgcagcccccgcgctggtgcagccaccctcgctccctctgctcttcctcccttcgctcgcaccatggctgatcagctgaccgaagaacagattgctgaattcaaggaagccttctccctatttgataaagatggcgatggcaccatcacaacaaaggaacttggaactgtcatgaggtcactgggtcagaacccaacagaagctgaattgcaggatatgatcaatgaagtggatgctgatggtaatggcaccattgacttccccgaatttttgactatgatggctagaaaaatgaaagatacagatagtgaagaagaaatccgtgaggcattccgagtctttgacaaggatggcaatggttatatcagtgcagcagaactacgtcacgtcatgacaaacttaggagaaaaactaacagatgaagaagtagatgaaatgatcagagaagcagatattgatggagacggacaagtcaactatgaagaattcgtacagatgatgactgcaaaatgaagacctactttcaactcctttttcccccctctagaagaatcaaattgaatcttttacttacctcttgcaaaaaaaagaaaaaagaaaaaagttcatttattcattctgtttctatatagcaaaactgaatgtcaaaagtaccttctgtccacacacacaaaatctgcatgtattggttggtggtcctgtcccctaaagatcaagctacacatcagttttacaatataaatacttgtactaccttaatgataaggactccttaaagttccatttgctaatgattaatacactgtttgggctggccagtttttcatgcatgcagcttgacgattgagcacagtcaggcctttgtattaaaaatgaaaaatgaaaaaacaaattcaaaacctattcaaatgggttctagttcaatttgtttagtataaattgtcatagctggtttactgaaaacaaacacatttaaaattggtttacctcaggatgacgtgcagaaaaatgggtgaaggataaaccgttgagacgtggccccactggtaggatggtcctcttgtacttcgtgtgctccgacccatggtgacgatgacacaccctggtggcatgcccgtgtatgttggtttagcgttgtctgcattgttctagagtgaaacaggtgtcaggctgtcactgttcacacaaatttttaataagaaacatttaccaagggagcatctttggactctctgtttttaaaaccttctgaaccatgacttggagccggcagagtaggctgtggctgtggacttcagcacaaccatcaacattgctgttcaaagaaattacagtttacgtccattccaagttgtaaatgctagtctttttttttttttttccaataaaaagaccattaacttaaagtggtgttaaatgctttgtaaagctgagatctaaatggggacaaggcaggtggaggggaggccagtgtacatgtaaatgcccacagcccagcattgggtttccctcccaaggccccagcaccaacctctgagcccaagaccttgcctgaaaacaagcagataccgattgcttcatcctatttatggacatgtaggtctagttgcattttcactggggggaggggggaaggtgaattatggtaacttttaatgatctattcaggcagtagagctcttaaggaaaaaaaaaaacccactttctctcaagcatgtatttaggggttgttctcaattgtgctgctgattacctgtcttatgtaactacttgagaccatctgcaagagacatgatttagtgtgtctgtaattcaatcttcgctgtgtgtggtagaagcagtagtcacttttgtaagccagtctcttcatgcctaaaagacactaccagtcacctttgattcgcgacttttaatttatgattatacttagcctcctcctcctttttttttttttcccaagttgacttgactttgcttttttccccccaagtagaactaatgctagcttccagcttgaaagtaaaactccagtgtggagtgaattttgtgtctaattataaacctgtaaccaaaactcagacatctggtactggtctttgcattgagattggtccctgtaaaaccccctttaaaagcatattgcatttagtacagagctcttttttgaaatgaaggctggagatgtgcatttttcacggtgttaactggttgtatcttattagcaaggagattggggttttgagtgtttgcgtgggtggtttcaatttgccagggaacagtggcaggctgctagcaaggcagtgagaagctcttggcagccaaatgggtgcattcagggctgatttatagagacccttggcttctccttctcctactccctgtctttctggcattttgtagcttgttagattttctgccagaggggtgggtcagagcagtggaggggagacatcgcccatgtgcttctgctactggtccttgggctgggtggttggtagaggagatgttgacactatgagctaagggttggcttttgtaattacctgaatctgaaaggaatgcctaaggttaccttggggtttctcttctggtgagatagggttcctggtttgagtaagttaatgtcctggatatttcttgtggcagggggtggtcaaagagcctgattgctgacccagtctcaggcctgtggtcgatgacctctcggtagtttcaaagggggctggagggggatatttgacttgttttttcgaaatgtagccttctaaccctcaagtctttagaagctgggtggactcttagtggtcctgcagcgtatcctaaaagactacctttgaaacaggattcttgtatggccaggatcctgtctgggaaccagaaaccctacaccctccccctccagggaatgctgagttccagttttgagcagaggtgaggcagaatccactgtagccttccgccctggtatttggggggatgaccagcccaggcgttgggtgttagtctgcatgagtttgtgagaggaaatagctgggtgtcctggcagtgcccttgaagttggttaggaccttcctgtaaactcttgcccctacttctaactactctataaatatatacatatatttatatataaagtgattagttgaactggcatcctgctttagcctgagacttgccataagaaactgctgagtacttggcaaaccctttcatagttttgttctccatctgtttggggtaggtgttgagcgaggcaaatggatctcgatatttcagatgggcttttgatgcactgttgccaaggaaggctttttctgattttttgacaaatgaatttttgcacactttcattggtgtctttcggcaacttacacacattgaaaatgagctattgtacatatttttatattctctttataaatgcatgtctgattgtacttgtaacaatattgtaatgaacggctgtgcagtaggcccagcgctgctgtgtctcgtcagaggaatagcttaccacgaacccctcagcatactgggaatctcttcctgaacaacgaatgtaaatttggtcaagtctactcttccgttcattcaattattttaagcatttgaattatttattgtatatcctaaatatatttctcctttggcagtgactagatttccactaatgtgtcttaatctatccctccagctggcagttactgtttttttaatcccctgaagttgtcctgtaggagacagaaattctttgctgtctgtatcccttggagtaagaaggtagtggcatgggtggagtgtgtgttctttctccaaatctattatgatgtttattaaacacttctgtagcaaagatggtggtagttcttttgttactgaagttgcccttcaccatggctatttgaaaaggagatgtacttggacgtttctgtaaatcttgagataaactgtttggagatttaaccacctctctgatgggggaccaactctatggaaattgtaaatacgttttatttataaacctggcactgtattcaataaacatttctgcagcctttca

SEQ ID NO: 4299 - DNA, 1302 bp, Homo sapiens
  source 1..1302: mol_type = unassigned DNA
ctcgtttgcgatgttccgttatctggatgcggcggagggatctggcggagggaggtgtttatgaggcgctgggggcggaggaggcgaattagtccgagtggagagagcgagctgagtggttgtgtggtcgcgtctcggaaaccggtagcgcttgcagcatggctgaccaactgactgaagagcagattgcagaattcaaagaagctttttcactatttgacaaagatggtgatggaactataacaacaaaggaattgggaactgtaatgagatctcttgggcagaatcccacagaagcagagttacaggacatgattaatgaagtagatgctgatggtaatggcacaattgacttccctgaatttctgacaatgatggcaagaaaaatgaaagacacagacagtgaagaagaaattagagaagcattccgtgtgtttgataaggatggcaatggctatattagtgctgcagaacttcgccatgtgatgacaaaccttggagagaagttaacagatgaagaagttgatgaaatgatcagggaagcagatattgatggtgatggtcaagtaaactatgaagagtttgtacaaatgatgacagcaaagtgaagaccttgtacagaatgtgttaaatttcttgtacaaaattgtttatttgccttttctttgtttgtaacttatctgtaaaaggtttctccctactgtcaaaaaaatatgcatgtatagtaattaggacttcattcctccatgttttcttcccttatcttactgtcattgtcctaaaaccttattttagaaaattgatcaagtaacatgttgcatgtggcttactctggatatatctaagcccttctgcacatctaaacttagatggagttggtcaaatgagggaacatctgggttatgccttttttaaagtagttttctttaggaactgtcagcatgttgttgttgaagtgtggagttgtaactctgcgtggactatggacagtcaacaatatgtacttaaaagttgcactattgcaaaacgggtgtattatccaggtactcgtacactatttttttgtactgctggtcctgtaccagaaacattttcttttattgttacttgctttttaaactttgtttagccacttaaaatctgcttatggcacaatttgcctcaaaatccattccaagttgtatatttgttttccaataaaaaaattacaatttacccaatggttgctctgcatctgagtcatttaactgttgaagtctaataattttgaaaataaaatatggcattggtttctgcttggta

SEQ ID NO: 4300 - DNA, 2163 bp, Homo sapiens
  source 1..2163: mol_type = unassigned DNA
gcgcggcggagctggaactgctgcagctgctgccgccgccggaggaaccttgatccccgtgctccggacaccccgggcctcgccatggctgaccagctgactgaggagcagattgcagagttcaaggaggccttctccctctttgacaaggatggagatggcactatcaccaccaaggagttggggacagtgatgagatccctgggacagaaccccactgaagcagagctgcaggatatgatcaatgaggtggatgcagatgggaacgggaccattgacttcccggagttcctgaccatgatggccagaaagatgaaggacacagacagtgaggaggagatccgagaggcgttccgtgtctttgacaaggatgggaatggctacatcagcgccgcagagctgcgtcacgtaatgacgaacctgggggagaagctgaccgatgaggaggtggatgagatgatcagggaggctgacatcgatggagatggccaggtcaattatgaagagtttgtacagatgatgactgcaaagtgaaggccccccgggcagctggcgatgcccgttctcttgatctctctcttctcgcgcgcgcactctctcttcaacactcccctgcgtaccccggttctagcaaacaccaattgattgactgagaatctgataaagcaacaaaagatttgtcccaagctgcatgattgctctttctccttcttccctgagtctctctccatgcccctcatctcttccttttgccctcgcctcttccatccatgtcttccaaggcctgatgcattcataagttgaagccctccccagatccccttggggagcctctgccctcctccagcccggatggctctcctccattttggtttgtttcctcttgtttgtcatcttattttgggtgctggggtggctgccagccctgtcccgggacctgctgggagggacaagaggccctcccccaggcagaagagcatgccctttgccgttgcatgcaaccagccctgtgattccacgtgcagatcccagcagcctgttggggcaggggtgccaagagaggcattccagaaggactgagggggcgttgaggaattgtggcgttgactggatgtggcccaggagggggtcgagggggccaactcacagaaggggactgacagtgggcaacactcacatcccactggctgctgttctgaaaccatctgattggctttctgaggtttggctgggtggggactgctcatttggccactctgcaaattggacttgcccgcgttcctgaagcgctctcgagctgttctgtaaatacctggtgctaacatcccatgccgctccctcctcacgatgcacccaccgccctgagggcccgtcctaggaatggatgtggggatggtcgctttgtaatgtgctggttctctttttttttctttcccctctatggcccttaagactttcattttgttcagaaccatgctgggctagctaaagggtggggagagggaagatgggccccaccacgctctcaagagaacgcacctgcaataaaacagtcttgtcggccagctgcccaggggacggcagctacagcagcctctgcgtcctggtccgccagcacctcccgcttctccgtggtgacttggcgccgcttcctcacatctgtgctccgtgccctcttccctgcctcttccctcgcccacctgcctgcccccatactcccccagcggagagcatgatccgtgcccttgcttctgactttcgcctctgggacaagtaagtcaatgtgggcagttcagtcgtctgggttttttccccttttctgttcatttcatctggctccccccaccacctccccaccccaccccccaccccctgcttcccctcactgcccaggtcgatcaagtggcttttcctgggacctgcccagctttgagaatctcttctcatccaccctctggcacccagcctctgagggaaggagggatggggcatagtgggagacccagccaagagctgagggtaagggcaggtaggcgtgaggctgtggacattttcggaatgttttggttttgttttttttaaaccgggcaatattgtgttcagttcaagctgtgaagaaaaatatatatcaatgttttccaataaaatacagtgactacctga

SEQ ID NO: 4301 - DNA, 655 bp, Homo sapiens
  source 1..655: mol_type = unassigned DNA
ggagattagaagatactcttgaaggcttccgggacggagaaggatcagggtcgtggaggtggtgaaaagggatggctgaccagctgactgaggagcagattgcagagttcaaggaggccttctccctctttgacaaggatggagatggcactatcaccaccaaggagttggggacagtgatgagatccctgggacagaaccccactgaagcagagctgcaggatatgatcaatgaggtggatgcagatgggaacgggaccattgacttcccggagttcctgaccatgatggccagaaagatgaaggacacagacagtgaggaggagatccgagaggcgttccgtgtctttgacaaggatgggaatggctacatcagcgccgcagagctgcgtcacgtaatgacgaacctgggggagaagctgaccgatgaggaggtggatgagatgatcagggaggctgacatcgatggagatggccaggtcaattatgaagagtttgtacagatgatgactgcaaagtgaaggccccccgggcagctggcgatgcccgttctcttgatctctctcttctcgcgcgcgcactctctcttcaacactcccctgcgtaccccggttctagcaaacaccaattgattgactgagaatctgataaagca

SEQ ID NO: 4302 - DNA, 6581 bp, Homo sapiens
  source 1..6581: mol_type = unassigned DNA
gacgctcctcccggagagtagtgagacccctggtgcggggcgattggcggcgggagcgatgagtggcagccgcacggcccaacgggagctgtgcgtgggccgcggggcggggccagggcgggtgcgcggcggcggcggggtggctgggccggcggcggcggcggtacgaggcgcgcgctcggggtcccggtcgcgaggaggaggaggatgtggcgcgcggaggggaaatggctgccgaaaacaagccggaagagcgtttcccaaagtgtattctgcggaactagcacctactgtgttctcaacaccgtgccacctatagaagatgatcatgggaacagcaatagtagtcatgtaaaaatctttttaccgaaaaagctgcttgaatgtctgccgaaatgttcaagtttaccaaaagagaggcaccgctggaacactaatgaggaaattgcagcttatttaataacatttgagaaacacgaagaatggctaaccacctcccctaagacaagaccacagaatggctcaatgatactctacaacaggaagaaagtgaaatacaggaaagatgggtattgctggaaaaagaggaaagatgggaaaacgaccagagaggaccacatgaaactcaaggtccagggagtggagtgcttgtacggctgctatgtccattcctccatcatccccaccttccaccggaggtgctactggctccttcagaaccccgacatcgtcctggtgcactacctgaacgtgccggccatcgaggactgcggcaagccttgcggccccatcctctgctccatcaacaccgacaagaaggagtgggcgaaatggacgaaagaagagctcatcgggcagctgaaacccatgttccatggcatcaagtggacctgcagcaatgggaacagcagctcaggcttctcggtggaacagctggtgcagcagatcctcgacagccaccagaccaagccccagccgcggacccacaactgcctctgcaccggcagcctgggagctggcggcagcgtgcatcacaagtgtaacagcgccaaacaccgcatcatctcgcccaaggtggagccacggacaggggggtacgggagccactcggaggtgcagcacaatgacgtgtcggagggcaagcacgagcacagccacagcaagggctccagccgtgagaagaggaacggcaaggtggccaagcccgtgctcctgcaccagagcagcaccgaggtctcctccaccaaccaggtggaagtccccgacaccacccagagctcccctgtgtccatcagcagcgggctcaacagcgacccggacatggtggacagcccggtggtcacaggtgtgtccggtatggcggtggcctctgtgatggggagcttgtcccagagcgccacggtgttcatgtcagaggtcaccaatgaggccgtgtacaccatgtcccccaccgctggccccaaccaccacctcctctcacctgacgcctctcagggcctcgtcctggccgtgagctctgatggccacaagttcgcctttcccaccacgggcagctcggagagcctgtccatgctgcccaccaacgtgtccgaagagctggtcctctccaccaccctcgacggtggccggaagattccagaaaccaccatgaactttgaccccgactgtttccttaataacccaaagcagggccagacgtacgggggtggaggcctgaaagccgagatggtcagctccaacatccggcactcgccacccggggagcggagcttcagctttaccaccgtcctcaccaaggagatcaagaccgaggacacctccttcgagcagcagatggccaaagaagcgtactcctcctccgcggcggctgtggcagccagctccctcaccctgaccgccggctccagcctcctgccgtcgggcggcggcctgagtcccagcaccaccctggagcagatggacttcagcgccatcgactccaacaaggactacacgtccagcttcagccagacgggccacagcccccacatccaccagaccccctccccgagcttcttcctgcaggacgccagcaaacccctccccgtcgagcagaacacccacagcagcctgagtgactctgggggcaccttcgtgatgcccacggtgaaaacggaggcctcgtcccaaaccagctcctgcagcggtcacgtggagacgcggatcgagtccacttcctccctccacctcatgcagttccaggccaacttccaggccatgacggcagaaggggaggtcaccatggagacctcgcaggcggcggaagggagcgaggtcctgctcaagtctggggagctgcaggcttgcagctctgagcactacctgcagccggagaccaacggggtaatccgaagcgccggcggcgtccccatcctcccgggcaacgtggtgcagggactctaccccgtggcccagcccagcctcggcaacgcctccaacatggagctcagcctggaccactttgacatctccttcagcaaccagttctccgacctgatcaacgacttcatctccgtggaggggggcagcagcaccatctatgggcaccagctggtgtcgggggacagcacggcgctctcacagtcagaggacggggcgcgggcccccttcacccaggcagagatgtgcctcccctgctgtagcccccagcagggtagcctgcagctgagcagctcggagggcggggccagcaccatggcctacatgcacgtcgccgaggtggtctcggccgcctcggcccagggcaccctaggcatgctgcagcagagcggacgggtgttcatggtgaccgactactccccagagtggtcttacccagagggaggagtgaaggtcctcatcacaggcccgtggcaagaagccagcaataactacagctgcctgtttgaccagatctcagtgcctgcatccctgattcagcctggggtgctgcgctgctactgcccagcccatgacactggtcttgtgaccctacaagttgccttcaacaaccagatcatctccaactcggtggtgtttgagtacaaagcccgggctctgcccacgctcccttcctcccagcacgactggctgtcgttggacgataaccagttcaggatgtccatcctggaacgactggagcagatggagaggaggatggccgagatgacggggtcccagcagcacaaacaggcgagcggaggcggcagcagtggaggcggcagcgggagcgggaatggagggagccaggcacagtgtgcttctgggactggggccttggggagctgctttgagagccgtgtggtcgtggtatgcgagaagatgatgagccgagcctgctgggcgaagtccaagcacttgatccactcaaagactttccgcggaatgaccctactccacctggccgctgcccagggctatgccaccctaatccagaccctcatcaaatggcgtacaaagcacgcggatagcattgacctggaactggaagttgaccccttgaatgtggaccacttctcctgtactcctctgatgtgggcgtgtgccctagggcacttggaagctgccgtcgtgctgtacaagtgggaccgtcgggccatctcgattcccgactctctaggaaggctgcctttgggaattgccaggtcacggggtcatgtgaaattagcagagtgtctggagcacctgcagagagatgagcaggctcagctgggacagaaccccagaatccactgtcctgcaagcgaagagcccagcacagagagctggatggcccagtggcacagcgaagccatcagctctccagaaatacccaagggagtcactgttattgcaagcaccaacccagagctgagaagacctcgttctgaaccctctaattactacagcagtgagagccacaaagattatccggctcccaaaaagcataaattgaaccctgagtacttccagacaaggcaggagaagctgcttcccactgcactgagtctggaagagccaaatatcaggaagcaaagccctagttctaagcagtctgtccccgagacactcagccccagtgaaggagtgagggacttcagccgggaactctcccctcccactccagagactgcagcatttcaagcctctggatctcagcctgtaggaaagtggaattccaaagatctttacattggtgtgtctacagtacaggtgactggaaatccgaaggggaccagtgtaggaaaggaggcagcaccttcacaggtgcgtccacgggaaccaatgagtgtcctgatgatggctaacagagaggtggtgaatacagagctggggtcctaccgtgatagtgcagaaaatgaagaatgcggccagcccatggatgacatacaggtgaacatgatgaccttggcagaacacattattgaagccacacctgaccgaatcaagcaggagaattttgtgcccatggagtcctcaggattggaaagaacagaccctgccaccattagcagtacaatgagctggctggccagttatctagcggatgctgactgccttcccagtgctgcccagatccgaagtgcatataacgagcctctaaccccttcttctaataccagcttgagccctgttggctctcccgtcagtgaaatcgctttcgagaaacctaaccttccctccgccgcggattggtcagaattcctgagtgcatctaccagtgagaaggtagagaatgagtttgctcagctcactctgtctgatcatgaacagagagaactctatgaggctgccaggcttgtccagacagctttccggaaatacaagggccgacccttgcgggaacagcaagaagtagctgctgctgttattcagcgttgttacagaaaatataaacagtacgcactttataaaaagatgacacaggctgccatccttatccagagcaaattccgaagttactatgaacaaaaaaaattccagcagagccgacgggctgctgtgctcatccaaaagtactaccgaagttataagaaatgtggcaaaagacggcaggctcgccggacggctgtgattgtacaacagaaactcaggagcagtttgctaaccaaaaagcaggatcaagctgctcgaaaaataatgaggtttcttcgccgctgtcgccacagccccctggtggaccataggctgtacaaaaggagtgaaagaattgaaaaaggccaaggaacttgaagacatacagcagcatcccttagcaatgtgacattgcttttcagactgttttcatttctgtttttagcagagacatgcaacaacaacacacacgcacacacgcacacacacacacgtacacacacatacaaaatccctctgcagttttggggagatcagctgcaggattttaacaggaatgttttggtcattgcatttgcactttcatggacaacttttaatttgatcagcaagacatcttggaactcaatcttctgttggatcacgggaaatcaagacacccaggaggaattgaaagaggcttcctcttctcaggaagaagccatttccttctcatatagggctgtattcaaacatcgtgtggaactgtacaaatatttataccaaaaatatagataagaaaaggtggggctatactagcaacaaaaaaagaatgctgttcctgcacctgccggttatttccaagaagctgaatctttgggactgattctcagtggagggcttagatcatacaaaaatctttattgggtccgtgtgttctcatttccttcactgtttatttttgtttgtttgtttgtttgttttaatctctacagcacatttaatgcaacttttgaaatctgcaggtttttaatgtcttgtggaaatttgcagaggggcaggtgtgtggtaaacgggtaatgcatgggaaataatgagaagcagctcacagagtttaaactattttcttgtccccaccaccttccaagaacctgcgagggtagtaatcatcttgtcccctttttcatgttcagcactttaatttttttgccttactttcatgtgcaatgagaattacttaagaattggtaacgcatgtagccttttttagtaaccttggaagctgtagtaattctaaggaatcatgaaccttgcctggacatttgccacctaaacgatcagtgtggtgctgcgttctggccagtaaattccatgtttttggctatatctcatccaaactgagcagtttctgtgtatatatagaaggtagaaatgaaaagtgagaaaatatttgaaagggattatattaattgctaaatattttattcacaaaggtcaataacatggcaagataaaattatttgtatagttttgtctgaatgagcgagaaaaatgtggatgtactgtttgtatatattgtatatattaaaacagagatatgtgcatgaaatcaagaaaaaagaaatgaacaaaagcaaagcattagtggctatggtctgtaaaatgaaacaaaaaaactttatttcactataagagtactttattttaaatgttctttaggagaacattttgctaaagcatgactaaactgc

SEQ ID NO: 4303 - DNA, 2467 bp, Homo sapiens
  source 1..2467: mol_type = unassigned DNA
gcagtcgcagcgcaaagggggccgcgggaacagctagtcgggagcgcgggggtcccgggcctctggccagccacggggcctggccatgaactttgcgtccgggccaatgctgcagtggccgggcggtgataaccagttcaggatgtccatcctggaacgactggagcagatggagaggaggatggccgagatgacggggtcccagcagcacaaacaggcgagcggaggcggcagcagtggaggcggcagcgggagcgggaatggagggagccaggcacagtgtgcttctgggactggggccttggggagctgctttgagagccgtgtggtcgtggtatgcgagaagatgatgagccgagcctgctgggcgaagtccaagcacttgatccactcaaagactttccgcggaatgaccctactccacctggccgctgcccagggctatgccaccctaatccagaccctcatcaaatggcgtacaaagcacgcggatagcattgacctggaactggaagttgaccccttgaatgtggaccacttctcctgtactcctctgatgtgggcgtgtgccctagggcacttggaagctgccgtcgtgctgtacaagtgggaccgtcgggccatctcgattcccgactctctaggaaggctgcctttgggaattgccaggtcacggggtcatgtgaaattagcagagtgtctggagcacctgcagagagatgagcaggctcagctgggacagaaccccagaatccactgtcctgcaagcgaagagcccagcacagagagctggatggcccagtggcacagcgaagccatcagctctccagaaatacccaagggagtcactgttattgcaagcaccaacccagagctgagaagacctcgttctgaaccctctaattactacagcagtgagagccacaaagattatccggctcccaaaaagcataaattgaaccctgagtacttccagacaaggcaggagaagctgcttcccactgcactgagtctggaagagccaaatatcaggaagcaaagccctagttctaagcagtctgtccccgagacactcagccccagtgaaggagtgagggacttcagccgggaactctcccctcccactccagagactgcagcatttcaagcctctggatctcagcctgtaggaaagtggaattccaaagatctttacattggtgtgtctacagtacaggtgactggaaatccgaaggggaccagtgtaggaaaggaggcagcaccttcacaggtgcgtccacgggaaccaatgagtgtcctgatgatggctaacagagaggtggtgaatacagagctggggtcctaccgtgatagtgcagaaaatgaagaatgcggccagcccatggatgacatacaggtgaacatgatgaccttggcagaacacattattgaagccacacctgaccgaatcaagcaggagaattttgtgcccatggagtcctcaggattggaaagaacagaccctgccaccattagcagtacaatgagctggctggccagttatctagcggatgctgactgccttcccagtgctgcccagatccgaagtgcatataacgagcctctaaccccttcttctaataccagcttgagccctgttggctctcccgtcagtgaaatcgctttcgagaaacctaaccttccctccgccgcggattggtcagaattcctgagtgcatctaccagtgagaaggtagagaatgagtttgctcagctcactctgtctgatcatgaacagagagaactctatgaggctgccaggcttgtccagacagctttccggaaatacaagggccgacccttgcgggaacagcaagaagtagctgctgctgttattcagcgttgttacagaaaatataaacagggaaaaaatatatgtctgaagtacgcactttataaaaagatgacacaggctgccatccttatccagagcaaattccgaagttactatgaacaaaaaaaattccagcagagccgacgggctgctgtgctcatccaaaagtactaccgaagttataagaaatgtggcaaaagacggcaggctcgccggacggctgtgattgtacaacagaaactcaggagcagtttgctaaccaaaaagcaggatcaagctgctcgaaaaataatgaggtttcttcgccgctgtcgccacagagtgaaagaattgaaaaaggccaaggaacttgaagacatacagcagcatcccttagcaatgtgacattgcttttcagactgttttcatttctgtttttagcagagacatgcaacaacaacacacacgcacacacgcacacacacacacgtacacacacatacaaaatccctctgcagttttggggagatcagctgcaggattttaacaggaatgttttggtcattgcatttgcactttcatggacaacttttaatttgatcagcaagacatctt

SEQ ID NO: 4304 - DNA, 2320 bp, Homo sapiens
  source 1..2320: mol_type = unassigned DNA
gtcttctgctcctgggctgttgctggcaggactcccttggctgccccatctcatcaccaccagccctcaggatggcctgtccagtgagccctgaccataaacaggagggggcccatgacactggtcttgtgaccctacaagttgccttcaacaaccagatcatctccaactcggtggtgtttgagtacaaagcccgggctctgcccacgctcccttcctcccagcacgactggctgtcgttggacgataaccagttcaggatgtccatcctggaacgactggagcagatggagaggaggatggccgagatgacggggtcccagcagcacaaacaggcgagcggaggcggcagcagtggaggcggcagcgggagcgggaatggagggagccaggcacagtgtgcttctgggactggggccttggggagctgctttgagagccgtgtggtcgtggtatgcgagaagatgatgagccgagcctgctgggcgaagtccaagcacttgatccactcaaagactttccgcggaatgaccctactccacctggccgctgcccagggctatgccaccctaatccagaccctcatcaaatggcgtacaaagcacgcggatagcattgacctggaactggaagttgaccccttgaatgtggaccacttctcctgtactcctctgatgtgggcgtgtgccctagggcacttggaagctgccgtcgtgctgtacaagtgggaccgtcgggccatctcgattcccgactctctaggaaggctgcctttgggaattgccaggtcacggggtcatgtgaaattagcagagtgtctggagcacctgcagagagatgagcaggctcagctgggacagaaccccagaatccactgtcctgcaagcgaagagcccagcacagagagctggatggcccagtggcacagcgaagccatcagctctccagaaatacccaagggagtcactgttattgcaagcaccaacccagagctgagaagacctcgttctgaaccctctaattactacagcagtgagagccacaaagattatccggctcccaaaaagcataaattgaaccctgagtacttccagacaaggcaggagaagctgcttcccactgcactgagtctggaagagccaaatatcaggaagcaaagccctagttctaagcagtctgtccccgagacactcagccccagtgaaggagtgagggacttcagccgggaactctcccctcccactccagagactgcagcatttcaagcctctggatctcagcctgtaggaaagtggaattccaaagatctttacattggtgtgtctacagtacaggtgactggaaatccgaaggggaccagtgtaggaaaggaggcagcaccttcacaggtgcgtccacgggaaccaatgagtgtcctgatgatggctaacagagaggtggtgaatacagagctggggtcctaccgtgatagtgcagaaaatgaagaatgcggccagcccatggatgacatacaggtgaacatgatgaccttggcagaacacattattgaagccacacttagcagtacaatgagctggctggccagttatctagcggatgctgactgccttcccagtgctgcccagatccgaagtgcatataacgagcctctaaccccttcttctaataccagcttgagccctgttggctctcccgtcagtgaaatcgctttcgagaaggtagagaatgagtttgctcagctcactctgtctgatcatgaacagagagaactctatgaggctgccaggcttgtccagacagctttccggaaatacaagggccgacccttgcgggaacagcaagaagtagctgctgctgttattcagcgttgttacagaaaatataaacagtacgcactttataaaaagatgacacaggctgccatccttatccagagcaaattccgaagttactatgaacaaaaaaaattccagcagagccgacgggctgctgtgctcatccaaaagtactaccgaagttataagaaatgtggcaaaagacggcaggctcgccggacggctgtgattgtacaacagaaactcaggagcagtttgctaaccaaaaagcaggatcaagctgctcgaaaaataatgaggtttcttcgccgctgtcgccacagagtgaaagaattgaaaaaggccaaggaacttgaagacatacagcagcatcccttagcaatgtgacattgcttttcagactgttttcatttctgtttttagcagagacatgcaacaacaacacacacgcacacacgcacacacacacacgtacacacacatac

SEQ ID NO: 4305 - DNA, 4980 bp, Homo sapiens
  source 1..4980: mol_type = unassigned DNA
atgtggcgcgcggaggggaaatggctgccgaaaacaagccggaagagcgtttcccaaagtgtattctgcggaactagcacctactgtgttctcaacaccgtgccacctatagaagatgatcatgggaacagcaatagtagtcatgtaaaaatctttttaccgaaaaagctgcttgaatgtctgccgaaatgttcaagtttaccaaaagagaggcaccgctggaacactaatgaggaaattgcagcttatttaataacatttgagaaacacgaagaatggctaaccacctcccctaagacaagaccacagaatggctcaatgatactctacaacaggaagaaagtgaaatacaggaaagatgggtattgctggaaaaagaggaaagatgggaaaacgaccagagaggaccacatgaaactcaaggtccagggagtggagtgcttgtacggctgctatgtccattcctccatcatccccaccttccaccggaggtgctactggctccttcagaaccccgacatcgtcctggtgcactacctgaacgtgccggccatcgaggactgcggcaagccttgcggccccatcctctgctccatcaacaccgacaagaaggagtgggcgaaatggacgaaagaagagctcatcgggcagctgaaacccatgttccatggcatcaagtggacctgcagcaatgggaacagcagctcaggcttctcggtggaacagctggtgcagcagatcctcgacagccaccagaccaagccccagccgcggacccacaactgcctctgcaccggcagcctgggagctggcggcagcgtgcatcacaagtgtaacagcgccaaacaccgcatcatctcgcccaaggtggagccacggacaggggggtacgggagccactcggaggtgcagcacaatgacgtgtcggagggcaagcacgagcacagccacagcaagggctccagccgtgagaagaggaacggcaaggtggccaagcccgtgctcctgcaccagagcagcaccgaggtctcctccaccaaccaggtggaagtccccgacaccacccagagctcccctgtgtccatcagcagcgggctcaacagcgacccggacatggtggacagcccggtggtcacaggtgtgtccggtatggcggtggcctctgtgatggggagcttgtcccagagcgccacggtgttcatgtcagaggtcaccaatgaggccgtgtacaccatgtcccccaccgctggccccaaccaccacctcctctcacctgacgcctctcagggcctcgtcctggccgtgagctctgatggccacaagttcgcctttcccaccacgggcagctcggagagcctgtccatgctgcccaccaacgtgtccgaagagctggtcctctccaccaccctcgacggtggccggaagattccagaaaccaccatgaactttgaccccgactgtttccttaataacccaaagcagggccagacgtacgggggtggaggcctgaaagccgagatggtcagctccaacatccggcactcgccacccggggagcggagcttcagctttaccaccgtcctcaccaaggagatcaagaccgaggacacctccttcgagcagcagatggccaaagaagcgtactcctcctccgcggcggctgtggcagccagctccctcaccctgaccgccggctccagcctcctgccgtcgggcggcggcctgagtcccagcaccaccctggagcagatggacttcagcgccatcgactccaacaaggactacacgtccagcttcagccagacgggccacagcccccacatccaccagaccccctccccgagcttcttcctgcaggacgccagcaaacccctccccgtcgagcagaacacccacagcagcctgagtgactctgggggcaccttcgtgatgcccacggtgaaaacggaggcctcgtcccaaaccagctcctgcagcggtcacgtggagacgcggatcgagtccacttcctccctccacctcatgcagttccaggccaacttccaggccatgacggcagaaggggaggtcaccatggagacctcgcaggcggcggaagggagcgaggtcctgctcaagtctggggagctgcaggcttgcagctctgagcactacctgcagccggagaccaacggggtaatccgaagcgccggcggcgtccccatcctcccgggcaacgtggtgcagggactctaccccgtggcccagcccagcctcggcaacgcctccaacatggagctcagcctggaccactttgacatctccttcagcaaccagttctccgacctgatcaacgacttcatctccgtggaggggggcagcagcaccatctatgggcaccagctggtgtcgggggacagcacggcgctctcacagtcagaggacggggcgcgggcccccttcacccaggcagagatgtgcctcccctgctgtagcccccagcagggtagcctgcagctgagcagctcggagggcggggccagcaccatggcctacatgcacgtcgccgaggtggtctcggccgcctcggcccagggcaccctaggcatgctgcagcagagcggacgggtgttcatggtgaccgactactccccagagtggtcttacccagagggaggagtgaaggtcctcatcacaggcccgtggcaagaagccagcaataactacagctgcctgtttgaccagatctcagtgcctgcatccctgattcagcctggggtgctgcgctgctactgcccagcccatgacactggtcttgtgaccctacaagttgccttcaacaaccagatcatctccaactcggtggtgtttgagtacaaagcccgggctctgcccacgctcccttcctcccagcacgactggctgtcgttggacgataaccagttcaggatgtccatcctggaacgactggagcagatggagaggaggatggccgagatgacggggtcccagcagcacaaacaggcgagcggaggcggcagcagtggaggcggcagcgggagcgggaatggagggagccaggcacagtgtgcttctgggactggggccttggggagctgctttgagagccgtgtggtcgtggtatgcgagaagatgatgagccgagcctgctgggcgaagtccaagcacttgatccactcaaagactttccgcggaatgaccctactccacctggccgctgcccagggctatgccaccctaatccagaccctcatcaaatggcgtacaaagcacgcggatagcattgacctggaactggaagttgaccccttgaatgtggaccacttctcctgtactcctctgatgtgggcgtgtgccctagggcacttggaagctgccgtcgtgctgtacaagtgggaccgtcgggccatctcgattcccgactctctaggaaggctgcctttgggaattgccaggtcacggggtcatgtgaaattagcagagtgtctggagcacctgcagagagatgagcaggctcagctgggacagaaccccagaatccactgtcctgcaagcgaagagcccagcacagagagctggatggcccagtggcacagcgaagccatcagctctccagaaatacccaagggagtcactgttattgcaagcaccaacccagagctgagaagacctcgttctgaaccctctaattactacagcagtgagagccacaaagattatccggctcccaaaaagcataaattgaaccctgagtacttccagacaaggcaggagaagctgcttcccactgcactgagtctggaagagccaaatatcaggaagcaaagccctagttctaagcagtctgtccccgagacactcagccccagtgaaggagtgagggacttcagccgggaactctcccctcccactccagagactgcagcatttcaagcctctggatctcagcctgtaggaaagtggaattccaaagatctttacattggtgtgtctacagtacaggtgactggaaatccgaaggggaccagtgtaggaaaggaggcagcaccttcacaggtgcgtccacgggaaccaatgagtgtcctgatgatggctaacagagaggtggtgaatacagagctggggtcctaccgtgatagtgcagaaaatgaagaatgcggccagcccatggatgacatacaggtgaacatgatgaccttggcagaacacattattgaagccacacctgaccgaatcaagcaggagaattttgtgcccatggagtcctcaggattggaaagaacagaccctgccaccattagcagtacaatgagctggctggccagttatctagcggatgctgactgccttcccagtgctgcccagatccgcttgagccctgttggctctcccgtcagtgaaatcgctttcgagaaacctaaccttccctccgccgcggattggtcagaattcctgagtgcatctaccagtgagaaggtagagaatgagtttgctcagctcactctgtctgatcatgaacagagagaactctatgaggctgccaggcttgtccagacagctttccggaaatacaagggccgacccttgcgggaacagcaagaagtagctgctgctgttattcagcgttgttacagaaaatataaacagtacgcactttataaaaagatgacacaggctgccatccttatccagagcaaattccgaagttactatgaacaaaaaaaattccagcagagccgacgggctgctgtgctcatccaaaagtactaccgaagttataagaaatgtggcaaaagacggcaggctcgccggacggctgtgattgtacaacagaaactcaggagcagtttgctaaccaaaaagcaggatcaagctgctcgaaaaataatgaggtttcttcgccgctgtcgccacagagtgaaagaattgaaaaaggccaaggaacttgaagacatacagcagcatcccttagcaatgtga

SEQ ID NO: 4306 - DNA, 567 bp, Homo sapiens
  source 1..567: mol_type = unassigned DNA
ggcggcggtacgaggcgcgcgctcggggtcccggtcgcgaggaggaggaggatgtggcgcgcggaggggaaatggctgccgaaaacaagccggaagagcgtttcccaaagtgtattctgcggaactagcacctactgtgttctcaacaccgtgccacctatagaagatgatcatgggaacagcaatagtagtcatgtaaaaatctttttaccgaaaaagctgcttgaatgtctgccgaaatgttcaagtttaccaaaagagaggcaccgctggaacactaatgagagatcatgatgcagccgtccttttggatttctttttaataatgtgtgacccttcacctttgatcccctgacctgcattaccttggtaaccatttcattttttaatttaatttcattttttaattttggtgtacaagctgtaacatttcatctttcaaagtgtaacacgctgatttcctcaaatagagatacccctttgagtgataaatttgcaaaatgctgtcttcattttctgtattaaaattcatttcagttttaaaataaagtgtaatctgtgttttca

SEQ ID NO: 4307 - DNA, 486 bp, Homo sapiens
  source 1..486: mol_type = unassigned DNA
gaggcgcgcgctcggggtcccggtcgcgaggaggaggaggatgtggcgcgcggaggggaaatggctgccgaaaacaagccggaagagcgtttcccaaagtgtattctgcggaactagcacctactgtgttctcaacaccgtgccacctatagaagatgatcatgggaacagcaatagtagtcatgtaaaaatctttttaccgaaaaagctgcttgaatgtctgccgaaatgttcaagtttaccaaaagagaggcaccgctggaacactaatgaggctctcaccacacacttgttcatgggcgcagcaaagaagagggatccacagagctggagccatgagggctgacacattggaatgaaagctggcagaattcgtagggagagctttcccatcctgccagccccatgtctggctttaagacagttctattagtgaattaactgttctcaaaaccccaaattaatttgaaccgaatgttactaaaa

SEQ ID NO: 4308 - DNA, 4491 bp, Homo sapiens
  source 1..4491: mol_type = unassigned DNA
ggggggggtcggtgtggggtagaatggccgctgccgccgtcacccgcgggaccccgggagcacagactccccctccccccggcccctcaggccgggggtgaccttgccccctggagccctcaccatgaataccaaggacaccaccgaggttgctgaaaacagccaccacctgaagatctttctccccaagaagctgctggagtgtcttcctcgctgcccgctgctgcctccagagaggctacggtggaatacaaatgaggagattgcatcctacctgatcacctttgagaagcatgatgagtggctgtcttgtgccccaaagacaaggcctcagaatggctccatcatcctctacaatcgcaagaaggtgaaatatcggaaggatggttacctctggaagaagcggaaggatgggaagaccacccgagaggaccacatgaagctgaaggtccagggcatggagtgtctctatggctgctacgttcactcttccatcgtccccacattccatcggcgctgctactggctgctccagaaccctgacatcgtccttgtgcactacctgaacgtcccagccctggaggactgtggaaagggctgcagccccatcttttgttccatcagcagcgaccgtcgagagtggctgaagtggtcccgggaggagttgttgggacagctgaagcccatgtttcatggcatcaagtggagctgcgggaatggaacagaagagttctctgtagaacacctggtgcagcagattttggacacccacccaaccaagcctgctccccgaacccacgcctgtctctgcagtggggggcttggttctgggagccttacccacaaatgcagcagcacgaaacaccgcatcatctctcccaaagtggagccccgagctttaaccctgacctctatcccccacgctcaccccccagagcctcctccactgatagccccacttcccccagagctccccaaggcacacacctccccatcttcttcctcttcttcctcctcatcaggttttgcagagcccctagaaatcagacctagccctcccacttctcgagggggttcttcaagaggaggcactgctatcctcctcctgacaggactggagcagcgggctggaggcttgacgcccaccaggcacttggctccacaggctgatcctaggccttccatgagtttggcagtggttgtaggcactgagccttctgccccaccagctcctcccagtcctgcctttgaccctgatcgttttctcaacagcccccagaggggccagacatatggaggggggcagggagtaagcccagacttccccgaggcagaggccgctcataccccctgttctgccctagagcctgctgctgccctggagccccaggcagctgctcggggtcccccaccacagtcagtagcaggtgggagaagaggaaactgcttcttcatccaagatgatgacagtggggaggagctcaagggtcacggggctgccccacccataccttcaccccctccctcacccccaccctcacctgcccccttggagccgtcaagcagggtaggaagaggagaggccttgtttggaggacctgttggggccagtgaactggagcccttcagtctttcatcattcccagaccttatgggagaactcatcagtgacgaagctccaagcatccctgctccgaccccccagctgtctcctgctcttagcaccatcacagacttctccccagagtggtcctacccagagggtggggtcaaggtgctcatcacaggtccttggaccgaagccgccgagcattactcctgtgtctttgatcacatcgcagtgccagcctcacttgtccagcctggtgtcttacgctgctactgtcccgcccatgaggtagggctggtgtctttgcaggtggcagggcgggaggggcccctttctgcttctgtgctctttgagtatcgagcccgccgattcctgtctctgcctagtactcaacttgactggctgtcactggacgacaaccagttccggatgtccatactagagcgactggagcagatggagaagcggatggcagagatcgcagcagctgggcaggtgccttgccagggtcctgatgctcctccagttcaggatgaaggccaggggcctgggttcgaagcacgggtagtggtcttggtagaaagcatgatcccacgctccacctggaagggtcctgaacgtctggcccatggaagccccttccggggcatgagccttctgcacctggctgctgcccagggctatgcccgcctcatcgagaccctgagccagtggcggagtgtggagactggaagcttggacttagagcaggaggttgacccgctcaacgtggatcatttctcttgcacccctctgatgtgggcttgtgccctgggacacctggaagctgctgtgctccttttccgttggaaccgacaggcactgagcattcccgactctctgggccgtctgccattgtctgtggctcattcccggggtcatgtgcgccttgcccgctgccttgaggaactacagagacaggagccttcggtggagcccccatttgccctatcgccaccctcctccagcccagacactggtctgagcagcgtctcctcgccctcggagctgtcggatggcaccttttccgtcacgtcagcctattctagtgccccagatggcagtcccccccctgcacctctgccagcctctgagatgactatggaggacatggccccaggccagctttcctctggtgtcccagaagcccccctactcctcatggactatgaggctaccaactccaaggggcccctctcctcccttcctgccctcccaccagcttcagatgatggggctgctccagaggacgctgacagcccacaggctgtggatgtgatcccggtggacatgatctcactagccaagcagatcatcgaagccacaccggagcggattaaacgagaggacttcgtggggctgcccgaggctggagcctcaatgcgggagcggacaggggctgtggggctcagtgagaccatgtcctggctggccagctacctggagaatgtggaccatttccccagctcaacccctcccagcgaactgccctttgagcgaggtcgcctggctgtcccttcagcaccctcctgggcagagtttctctctgcatccaccagtggcaagatggaaagtgattttgccctgctgacactatcagatcacgagcagcgggaactgtatgaggctgcccgagtcatccagacggccttccgaaagtacaagggccggcggctgaaggagcagcaggaggtagcagcagctgtaatccagcgctgttaccggaagtacaagcagctgacctggattgcacttaagtttgcactctataagaagatgacccaggcggccatcctgatccagagcaagttccgaagctactatgaacagaagcgatttcagcagagccgccgagcggctgtgctcatccagcagcactaccgctcctaccgccgcaggcccggccctccccaccggacttcggccaccctgcctgcccgcaacaaaggctcctttctcaccaagaagcaggaccaggcagcccggaagatcatgagattcctgcggcgctgccgacacaggatgagggaactgaagcagaaccaggagctggaagggcttccccagccgggactggccacatgacctggccaccgcctttctcaccaccctgggggcgcctcgtgcagtcttaacagggagagggctttctggggcagggggagcccctgtcggcagctttcctgttcacctttgttggagccctctgtaggcctcctccctcctccccacgccttgctcccacacccctctcctcgtccctcctggtcgtgccccgtctcttttggtcctggctccagaaaacccgcgccccacatacctgcatcttccgctgtgacctccggagccctgcctgcccctgctccccagctcctcctgcctgcacccgactcggccccctcctgacttgccttatttatttgttcgacgcgtctctgaatgtatccgcctcggttcccaccactgccttcgctgcgcacgcccctcgtgtttcagggctgaccgtgtccccacccgactccgcatgtttgcgtctgtttcctccctctctggccctgtcttaccccatcacccgactctggccactgacctcagggccgaaggggaggtggtgtacataggaacgcgttgcggagtccgccccgtcccccgaggggaggggtcttgtacatactgtaacatacagagtatagtgaagaatctatttaaggcgccgcggggagggctgcacggccgggcttgtggttctctagcgcggcgggggcctcctgccggctccacgggcactttctacttgtgcatgggcttggtttatacgaattgccattaaacatcgctgcacc

SEQ ID NO: 4309 - DNA, 4489 bp, Homo sapiens
  source 1..4489: mol_type = unassigned DNA
gtcagccggcgctggggggggtcggtgtggggtagaatggccgctgccgccgtcacccgcgggaccccgggagcacagactccccctccccccggcccctcaggccgggggtgaccttgccccctggagccctcaccatgaataccaaggacaccaccgaggttgctgaaaacagccaccacctgaagatctttctccccaagaagctgctggagtgtcttcctcgctgcccgctgctgcctccagagaggctacggtggaatacaaatgaggagattgcatcctacctgatcacctttgagaagcatgatgagtggctgtcttgtgccccaaagacaaggcctcagaatggctccatcatcctctacaatcgcaagaaggtgaaatatcggaaggatggttacctctggaagaagcggaaggatgggaagaccacccgagaggaccacatgaagctgaaggtccagggcatggagtgtctctatggctgctacgttcactcttccatcgtccccacattccatcggcgctgctactggctgctccagaaccctgacatcgtccttgtgcactacctgaacgtcccagccctggaggactgtggaaagggctgcagccccatcttttgttccatcagcagcgaccgtcgagagtggctgaagtggtcccgggaggagttgttgggacagctgaagcccatgtttcatggcatcaagtggagctgcgggaatggaacagaagagttctctgtagaacacctggtgcagcagattttggacacccacccaaccaagcctgctccccgaacccacgcctgtctctgcagtggggggcttggttctgggagccttacccacaaatgcagcagcacgaaacaccgcatcatctctcccaaagtggagccccgagctttaaccctgacctctatcccccacgctcaccccccagagcctcctccactgatagccccacttcccccagagctccccaaggcacacacctccccatcttcttcctcttcttcctcctcatcaggttttgcagagcccctagaaatcagacctagccctcccacttctcgagggggttcttcaagaggaggcactgctatcctcctcctgacaggactggagcagcgggctggaggcttgacgcccaccaggcacttggctccacaggctgatcctaggccttccatgagtttggcagtggttgtaggcactgagccttctgccccaccagctcctcccagtcctgcctttgaccctgatcgttttctcaacagcccccagaggggccagacatatggaggggggcagggagtaagcccagacttccccgaggcagaggccgctcataccccctgttctgccctagagcctgctgctgccctggagccccaggcagctgctcggggtcccccaccacagtcagtagcaggtgggagaagaggaaactgcttcttcatccaagatgatgacagtggggaggagctcaagggtcacggggctgccccacccataccttcaccccctccctcacccccaccctcacctgcccccttggagccgtcaagcagggtaggaagaggagaggccttgtttggaggacctgttggggccagtgaactggagcccttcagtctttcatcattcccagaccttatgggagaactcatcagtgacgaagctccaagcatccctgctccgaccccccagctgtctcctgctcttagcaccatcacagacttctccccagagtggtcctacccagagggtggggtcaaggtgctcatcacaggtccttggaccgaagccgccgagcattactcctgtgtctttgatcacatcgcagtgccagcctcacttgtccagcctggtgtcttacgctgctactgtcccgcccatgaggtagggctggtgtctttgcaggtggcagggcgggaggggcccctttctgcttctgtgctctttgagtatcgagcccgccgattcctgtctctgcctagtactcaacttgactggctgtcactggacgacaaccagttccggatgtccatactagagcgactggagcagatggagaagcggatggcagagatcgcagcagctgggcaggtgccttgccagggtcctgatgctcctccagttcaggatgaaggccaggggcctgggttcgaagcacgggtagtggtcttggtagaaagcatgatcccacgctccacctggaagggtcctgaacgtctggcccatggaagccccttccggggcatgagccttctgcacctggctgctgcccagggctatgcccgcctcatcgagaccctgagccagtggcggagtgtggagactggaagcttggacttagagcaggaggttgacccgctcaacgtggatcatttctcttgcacccctctgatgtgggcttgtgccctgggacacctggaagctgctgtgctccttttccgttggaaccgacaggcactgagcattcccgactctctgggccgtctgccattgtctgtggctcattcccggggtcatgtgcgccttgcccgctgccttgaggaactacagagacaggagccttcggtggagcccccatttgccctatcgccaccctcctccagcccagacactggtctgagcagcgtctcctcgccctcggagctgtcggatggcaccttttccgtcacgtcagcctattctagtgccccagatggcagtcccccccctgcacctctgccagcctctgagatgactatggaggacatggccccaggccagctttcctctggtgtcccagaagcccccctactcctcatggactatgaggctaccaactccaaggggcccctctcctcccttcctgccctcccaccagcttcagatgatggggctgctccagaggacgctgacagcccacaggctgtggatgtgatcccggtggacatgatctcactagccaagcagatcatcgaagccacaccggagcggattaaacgagaggacttcgtggggctgcccgaggctggagcctcaatgcgggagcggacaggggctgtggggctcagtgagaccatgtcctggctggccagctacctggagaatgtggaccatttccccagctcaacccctcccagcgaactgccctttgagcgaggtcgcctggctgtcccttcagcaccctcctgggcagagtttctctctgcatccaccagtggcaagatggaaagtgattttgccctgctgacactatcagatcacgagcagcgggaactgtatgaggctgcccgagtcatccagacggccttccgaaagtacaagggccggcggctgaaggagcagcaggaggtagcagcagctgtaatccagcgctgttaccggaagtacaagcagtttgcactctataagaagatgacccaggcggccatcctgatccagagcaagttccgaagctactatgaacagaagcgatttcagcagagccgccgagcggctgtgctcatccagcagcactaccgctcctaccgccgcaggcccggccctccccaccggacttcggccaccctgcctgcccgcaacaaaggctcctttctcaccaagaagcaggaccaggcagcccggaagatcatgagattcctgcggcgctgccgacacaggatgagggaactgaagcagaaccaggagctggaagggcttccccagccgggactggccacatgacctggccaccgcctttctcaccaccctgggggcgcctcgtgcagtcttaacagggagagggctttctggggcagggggagcccctgtcggcagctttcctgttcacctttgttggagccctctgtaggcctcctccctcctccccacgccttgctcccacacccctctcctcgtccctcctggtcgtgccccgtctcttttggtcctggctccagaaaacccgcgccccacatacctgcatcttccgctgtgacctccggagccctgcctgcccctgctccccagctcctcctgcctgcacccgactcggccccctcctgacttgccttatttatttgttcgacgcgtctctgaatgtatccgcctcggttcccaccactgccttcgctgcgcacgcccctcgtgtttcagggctgaccgtgtccccacccgactccgcatgtttgcgtctgtttcctccctctctggccctgtcttaccccatcacccgactctggccactgacctcagggccgaaggggaggtggtgtacataggaacgcgttgcggagtccgccccgtcccccgaggggaggggtcttgtacatactgtaacatacagagtatagtgaagaatctatttaaggcgccgcggggagggctgcacggccgggcttgtggttctctagcgcggcgggggcctcctgccggctccacgggcactttctacttgtgcatgggcttggtttatacgaattgccattaaacatcgctgcaccagccag

SEQ ID NO: 4310 - DNA, 4782 bp, Homo sapiens
  source 1..4782: mol_type = unassigned DNA
ccggcacctgcactgtccctcgcccaccgcgtgcccgcggactctgctcccggcttctccagaacatccctctatgcgggcgggaccctcccacctcggaggttctcctgggaccaccactccgccggggggccgcccagagtgccaagcgtccgatccggcgccgcccaagtgcagcccaaggacccgctcccgctccgcaccctggcaggctgcctagccaggactgcgcacctgcgccctggggcggagtccttaccccaaccccagcttcactgcacatagccgagcccgacgggcctcctcccatctccatcctggacacctggcggagcccgtgctgagagcctccgccagctcccatctgttccccgaggagggcggggggctcaggctggagccagagcggtagatgggcacagactccccctccccccggcccctcaggccgggggtgaccttgccccctggagccctcaccatgaataccaaggacaccaccgaggttgctgaaaacagccaccacctgaagatctttctccccaagaagctgctggagtgtcttcctcgctgcccgctgctgcctccagagaggctacggtggaatacaaatgaggagattgcatcctacctgatcacctttgagaagcatgatgagtggctgtcttgtgccccaaagacaaggcctcagaatggctccatcatcctctacaatcgcaagaaggtgaaatatcggaaggatggttacctctggaagaagcggaaggatgggaagaccacccgagaggaccacatgaagctgaaggtccagggcatggagaaccctgacatcgtccttgtgcactacctgaacgtcccagccctggaggactgtggaaagggctgcagccccatcttttgttccatcagcagcgaccgtcgagagtggctgaagtggtcccgggaggagttgttgggacagctgaagcccatgtttcatggcatcaagtggagctgcgggaatggaacagaagagttctctgtagaacacctggtgcagcagattttggacacccacccaaccaagcctgctccccgaacccacgcctgtctctgcagtggggggcttggttctgggagccttacccacaaatgcagcagcacgaaacaccgcatcatctctcccaaagtggagccccgagctttaaccctgacctctatcccccacgctcaccccccagagcctcctccactgatagccccacttcccccagagctccccaaggcacacacctccccatcttcttcctcttcttcctcctcatcaggttttgcagagcccctagaaatcagacctagccctcccacttctcgagggggttcttcaagaggaggcactgctatcctcctcctgacaggactggagcagcgggctggaggcttgacgcccaccaggcacttggctccacaggctgatcctaggccttccatgagtttggcagtggttgtaggcactgagccttctgccccaccagctcctcccagtcctgcctttgaccctgatcgttttctcaacagcccccagaggggccagacatatggaggggggcagggagtaagcccagacttccccgaggcagaggccgctcataccccctgttctgccctagagcctgctgctgccctggagccccaggcagctgctcggggtcccccaccacagtcagtagcaggtgggagaagaggaaactgcttcttcatccaagatgatgacagtggggaggagctcaagggtcacggggctgccccacccataccttcaccccctccctcacccccaccctcacctgcccccttggagccgtcaagcagggtaggaagaggagaggccttgtttggaggacctgttggggccagtgaactggagcccttcagtctttcatcattcccagaccttatgggagaactcatcagtgacgaagctccaagcatccctgctccgaccccccagctgtctcctgctcttagcaccatcacagacttctccccagagtggtcctacccagagggtggggtcaaggtgctcatcacaggtccttggaccgaagccgccgagcattactcctgtgtctttgatcacatcgcagtgccagcctcacttgtccagcctggtgtcttacgctgctactgtcccgcccatgaggtagggctggtgtctttgcaggtggcagggcgggaggggcccctttctgcttctgtgctctttgagtatcgagcccgccgattcctgtctctgcctagtactcaacttgactggctgtcactggacgacaaccagttccggatgtccatactagagcgactggagcagatggagaagcggatggcagagatcgcagcagctgggcaggtgccttgccagggtcctgatgctcctccagttcaggatgaaggccaggggcctgggttcgaagcacgggtagtggtcttggtagaaagcatgatcccacgctccacctggaagggtcctgaacgtctggcccatggaagccccttccggggcatgagccttctgcacctggctgctgcccagggctatgcccgcctcatcgagaccctgagccagtggcggagtgtggagactggaagcttggacttagagcaggaggttgacccgctcaacgtggatcatttctcttgcacccctctgatgtgggcttgtgccctgggacacctggaagctgctgtgctccttttccgttggaaccgacaggcactgagcattcccgactctctgggccgtctgccattgtctgtggctcattcccggggtcatgtgcgccttgcccgctgccttgaggaactacagagacaggagccttcggtggagcccccatttgccctatcgccaccctcctccagcccagacactggtctgagcagcgtctcctcgccctcggagctgtcggatggcaccttttccgtcacgtcagcctattctagtgccccagatggcagtcccccccctgcacctctgccagcctctgagatgactatggaggacatggccccaggccagctttcctctggtgtcccagaagcccccctactcctcatggactatgaggctaccaactccaaggggcccctctcctcccttcctgccctcccaccagcttcagatgatggggctgctccagaggacgctgacagcccacaggctgtggatgtgatcccggtggacatgatctcactagccaagcagatcatcgaagccacaccggagcggattaaacgagaggacttcgtggggctgcccgaggctggagcctcaatgcgggagcggacaggggctgtggggctcagtgagaccatgtcctggctggccagctacctggagaatgtggaccatttccccagctcaacccctcccagcgaactgccctttgagcgaggtcgcctggctgtcccttcagcaccctcctgggcagagtttctctctgcatccaccagtggcaagatggaaagtgattttgccctgctgacactatcagatcacgagcagcgggaactgtatgaggctgcccgagtcatccagacggccttccgaaagtacaagggccggcggctgaaggagcagcaggaggtagcagcagctgtaatccagcgctgttaccggaagtacaagcagctgacctggattgcacttaagtttgcactctataagaagatgacccaggcggccatcctgatccagagcaagttccgaagctactatgaacagaagcgatttcagcagagccgccgagcggctgtgctcatccagcagcactaccgctcctaccgccgcaggcccggccctccccaccggacttcggccaccctgcctgcccgcaacaaaggctcctttctcaccaagaagcaggaccaggcagcccggaagatcatgagattcctgcggcgctgccgacacaggatgagggaactgaagcagaaccaggagctggaagggcttccccagccgggactggccacatgacctggccaccgcctttctcaccaccctgggggcgcctcgtgcagtcttaacagggagagggctttctggggcagggggagcccctgtcggcagctttcctgttcacctttgttggagccctctgtaggcctcctccctcctccccacgccttgctcccacacccctctcctcgtccctcctggtcgtgccccgtctcttttggtcctggctccagaaaacccgcgccccacatacctgcatcttccgctgtgacctccggagccctgcctgcccctgctccccagctcctcctgcctgcacccgactcggccccctcctgacttgccttatttatttgttcgacgcgtctctgaatgtatccgcctcggttcccaccactgccttcgctgcgcacgcccctcgtgtttcagggctgaccgtgtccccacccgactccgcatgtttgcgtctgtttcctccctctctggccctgtcttaccccatcacccgactctggccactgacctcagggccgaaggggaggtggtgtacataggaacgcgttgcggagtccgccccgtcccccgaggggaggggtcttgtacatactgtaacatacagagtatagtgaagaatctatttaaggcgccgcggggagggctgcacggccgggcttgtggttctctagcgcggcgggggcctcctgccggctccacgggcactttctacttgtgcatgggcttggtttatacgaattgccattaaacatcgctgcaccagccag

SEQ ID NO: 4311 - DNA, 4394 bp, Homo sapiens
  source 1..4394: mol_type = unassigned DNA
gtcagccggcgctggggggggtcggtgtggggtagaatggccgctgccgccgtcacccgcgggaccccgggagaaaacagccaccacctgaagatctttctccccaagaagctgctggagtgtcttcctcgctgcccgctgctgcctccagagaggctacggtggaatacaaatgaggagattgcatcctacctgatcacctttgagaagcatgatgagtggctgtcttgtgccccaaagacaaggcctcagaatggctccatcatcctctacaatcgcaagaaggtgaaatatcggaaggatggttacctctggaagaagcggaaggatgggaagaccacccgagaggaccacatgaagctgaaggtccagggcatggagtgtctctatggctgctacgttcactcttccatcgtccccacattccatcggcgctgctactggctgctccagaaccctgacatcgtccttgtgcactacctgaacgtcccagccctggaggactgtggaaagggctgcagccccatcttttgttccatcagcagcgaccgtcgagagtggctgaagtggtcccgggaggagttgttgggacagctgaagcccatgtttcatggcatcaagtggagctgcgggaatggaacagaagagttctctgtagaacacctggtgcagcagattttggacacccacccaaccaagcctgctccccgaacccacgcctgtctctgcagtggggggcttggttctgggagccttacccacaaatgcagcagcacgaaacaccgcatcatctctcccaaagtggagccccgagctttaaccctgacctctatcccccacgctcaccccccagagcctcctccactgatagccccacttcccccagagctccccaaggcacacacctccccatcttcttcctcttcttcctcctcatcaggttttgcagagcccctagaaatcagacctagccctcccacttctcgagggggttcttcaagaggaggcactgctatcctcctcctgacaggactggagcagcgggctggaggcttgacgcccaccaggcacttggctccacaggctgatcctaggccttccatgagtttggcagtggttgtaggcactgagccttctgccccaccagctcctcccagtcctgcctttgaccctgatcgttttctcaacagcccccagaggggccagacatatggaggggggcagggagtaagcccagacttccccgaggcagaggccgctcataccccctgttctgccctagagcctgctgctgccctggagccccaggcagctgctcggggtcccccaccacagtcagtagcaggtgggagaagaggaaactgcttcttcatccaagatgatgacagtggggaggagctcaagggtcacggggctgccccacccataccttcaccccctccctcacccccaccctcacctgcccccttggagccgtcaagcagggtaggaagaggagaggccttgtttggaggacctgttggggccagtgaactggagcccttcagtctttcatcattcccagaccttatgggagaactcatcagtgacgaagctccaagcatccctgctccgaccccccagctgtctcctgctcttagcaccatcacagacttctccccagagtggtcctacccagagggtggggtcaaggtgctcatcacaggtccttggaccgaagccgccgagcattactcctgtgtctttgatcacatcgcagtgccagcctcacttgtccagcctggtgtcttacgctgctactgtcccgcccatgaggtagggctggtgtctttgcaggtggcagggcgggaggggcccctttctgcttctgtgctctttgagtatcgagcccgccgattcctgtctctgcctagtactcaacttgactggctgtcactggacgacaaccagttccggatgtccatactagagcgactggagcagatggagaagcggatggcagagatcgcagcagctgggcaggtgccttgccagggtcctgatgctcctccagttcaggatgaaggccaggggcctgggttcgaagcacgggtagtggtcttggtagaaagcatgatcccacgctccacctggaagggtcctgaacgtctggcccatggaagccccttccggggcatgagccttctgcacctggctgctgcccagggctatgcccgcctcatcgagaccctgagccagtggcggagtgtggagactggaagcttggacttagagcaggaggttgacccgctcaacgtggatcatttctcttgcacccctctgatgtgggcttgtgccctgggacacctggaagctgctgtgctccttttccgttggaaccgacaggcactgagcattcccgactctctgggccgtctgccattgtctgtggctcattcccggggtcatgtgcgccttgcccgctgccttgaggaactacagagacaggagccttcggtggagcccccatttgccctatcgccaccctcctccagcccagacactggtctgagcagcgtctcctcgccctcggagctgtcggatggcaccttttccgtcacgtcagcctattctagtgccccagatggcagtcccccccctgcacctctgccagcctctgagatgactatggaggacatggccccaggccagctttcctctggtgtcccagaagcccccctactcctcatggactatgaggctaccaactccaaggggcccctctcctcccttcctgccctcccaccagcttcagatgatggggctgctccagaggacgctgacagcccacaggctgtggatgtgatcccggtggacatgatctcactagccaagcagatcatcgaagccacaccggagcggattaaacgagaggacttcgtggggctgcccgaggctggagcctcaatgcgggagcggacaggggctgtggggctcagtgagaccatgtcctggctggccagctacctggagaatgtggaccatttccccagctcaacccctcccagcgaactgccctttgagcgaggtcgcctggctgtcccttcagcaccctcctgggcagagtttctctctgcatccaccagtggcaagatggaaagtgattttgccctgctgacactatcagatcacgagcagcgggaactgtatgaggctgcccgagtcatccagacggccttccgaaagtacaagggccggcggctgaaggagcagcaggaggtagcagcagctgtaatccagcgctgttaccggaagtacaagcagtttgcactctataagaagatgacccaggcggccatcctgatccagagcaagttccgaagctactatgaacagaagcgatttcagcagagccgccgagcggctgtgctcatccagcagcactaccgctcctaccgccgcaggcccggccctccccaccggacttcggccaccctgcctgcccgcaacaaaggctcctttctcaccaagaagcaggaccaggcagcccggaagatcatgagattcctgcggcgctgccgacacaggatgagggaactgaagcagaaccaggagctggaagggcttccccagccgggactggccacatgacctggccaccgcctttctcaccaccctgggggcgcctcgtgcagtcttaacagggagagggctttctggggcagggggagcccctgtcggcagctttcctgttcacctttgttggagccctctgtaggcctcctccctcctccccacgccttgctcccacacccctctcctcgtccctcctggtcgtgccccgtctcttttggtcctggctccagaaaacccgcgccccacatacctgcatcttccgctgtgacctccggagccctgcctgcccctgctccccagctcctcctgcctgcacccgactcggccccctcctgacttgccttatttatttgttcgacgcgtctctgaatgtatccgcctcggttcccaccactgccttcgctgcgcacgcccctcgtgtttcagggctgaccgtgtccccacccgactccgcatgtttgcgtctgtttcctccctctctggccctgtcttaccccatcacccgactctggccactgacctcagggccgaaggggaggtggtgtacataggaacgcgttgcggagtccgccccgtcccccgaggggaggggtcttgtacatactgtaacatacagagtatagtgaagaatctatttaaggcgccgcggggagggctgcacggccgggcttgtggttctctagcgcggcgggggcctcctgccggctccacgggcactttctacttgtgcatgggcttggtttatacgaattgccattaaacatcgctgcaccagccag

SEQ ID NO: 4312 - DNA, 4852 bp, Homo sapiens
  source 1..4852: mol_type = unassigned DNA
ccggcacctgcactgtccctcgcccaccgcgtgcccgcggactctgctcccggcttctccagaacatccctctatgcgggcgggaccctcccacctcggaggttctcctgggaccaccactccgccggggggccgcccagagtgccaagcgtccgatccggcgccgcccaagtgcagcccaaggacccgctcccgctccgcaccctggcaggctgcctagccaggactgcgcacctgcgccctggggcggagtccttaccccaaccccagcttcactgcacatagccgagcccgacgggcctcctcccatctccatcctggacacctggcggagcccgtgctgagagcctccgccagctcccatctgttccccgaggagggcggggggctcaggctggagccagagcggtagatgggcacagactccccctccccccggcccctcaggccgggggtgaccttgccccctggagccctcaccatgaataccaaggacaccaccgaggttgctgaaaacagccaccacctgaagatctttctccccaagaagctgctggagtgtcttcctcgctgcccgctgctgcctccagagaggctacggtggaatacaaatgaggagattgcatcctacctgatcacctttgagaagcatgatgagtggctgtcttgtgccccaaagacaaggcctcagaatggctccatcatcctctacaatcgcaagaaggtgaaatatcggaaggatggttacctctggaagaagcggaaggatgggaagaccacccgagaggaccacatgaagctgaaggtccagggcatggagtgtctctatggctgctacgttcactcttccatcgtccccacattccatcggcgctgctactggctgctccagaaccctgacatcgtccttgtgcactacctgaacgtcccagccctggaggactgtggaaagggctgcagccccatcttttgttccatcagcagcgaccgtcgagagtggctgaagtggtcccgggaggagttgttgggacagctgaagcccatgtttcatggcatcaagtggagctgcgggaatggaacagaagagttctctgtagaacacctggtgcagcagattttggacacccacccaaccaagcctgctccccgaacccacgcctgtctctgcagtggggggcttggttctgggagccttacccacaaatgcagcagcacgaaacaccgcatcatctctcccaaagtggagccccgagctttaaccctgacctctatcccccacgctcaccccccagagcctcctccactgatagccccacttcccccagagctccccaaggcacacacctccccatcttcttcctcttcttcctcctcatcaggttttgcagagcccctagaaatcagacctagccctcccacttctcgagggggttcttcaagaggaggcactgctatcctcctcctgacaggactggagcagcgggctggaggcttgacgcccaccaggcacttggctccacaggctgatcctaggccttccatgagtttggcagtggttgtaggcactgagccttctgccccaccagctcctcccagtcctgcctttgaccctgatcgttttctcaacagcccccagaggggccagacatatggaggggggcagggagtaagcccagacttccccgaggcagaggccgctcataccccctgttctgccctagagcctgctgctgccctggagccccaggcagctgctcggggtcccccaccacagtcagtagcaggtgggagaagaggaaactgcttcttcatccaagatgatgacagtggggaggagctcaagggtcacggggctgccccacccataccttcaccccctccctcacccccaccctcacctgcccccttggagccgtcaagcagggtaggaagaggagaggccttgtttggaggacctgttggggccagtgaactggagcccttcagtctttcatcattcccagaccttatgggagaactcatcagtgacgaagctccaagcatccctgctccgaccccccagctgtctcctgctcttagcaccatcacagacttctccccagagtggtcctacccagagggtggggtcaaggtgctcatcacaggtccttggaccgaagccgccgagcattactcctgtgtctttgatcacatcgcagtgccagcctcacttgtccagcctggtgtcttacgctgctactgtcccgcccatgaggtagggctggtgtctttgcaggtggcagggcgggaggggcccctttctgcttctgtgctctttgagtatcgagcccgccgattcctgtctctgcctagtactcaacttgactggctgtcactggacgacaaccagttccggatgtccatactagagcgactggagcagatggagaagcggatggcagagatcgcagcagctgggcaggtgccttgccagggtcctgatgctcctccagttcaggatgaaggccaggggcctgggttcgaagcacgggtagtggtcttggtagaaagcatgatcccacgctccacctggaagggtcctgaacgtctggcccatggaagccccttccggggcatgagccttctgcacctggctgctgcccagggctatgcccgcctcatcgagaccctgagccagtggcggagtgtggagactggaagcttggacttagagcaggaggttgacccgctcaacgtggatcatttctcttgcacccctctgatgtgggcttgtgccctgggacacctggaagctgctgtgctccttttccgttggaaccgacaggcactgagcattcccgactctctgggccgtctgccattgtctgtggctcattcccggggtcatgtgcgccttgcccgctgccttgaggaactacagagacaggagccttcggtggagcccccatttgccctatcgccaccctcctccagcccagacactggtctgagcagcgtctcctcgccctcggagctgtcggatggcaccttttccgtcacgtcagcctattctagtgccccagatggcagtcccccccctgcacctctgccagcctctgagatgactatggaggacatggccccaggccagctttcctctggtgtcccagaagcccccctactcctcatggactatgaggctaccaactccaaggggcccctctcctcccttcctgccctcccaccagcttcagatgatggggctgctccagaggacgctgacagcccacaggctgtggatgtgatcccggtggacatgatctcactagccaagcagatcatcgaagccacaccggagcggattaaacgagaggacttcgtggggctgcccgaggctggagcctcaatgcgggagcggacaggggctgtggggctcagtgagaccatgtcctggctggccagctacctggagaatgtggaccatttccccagctcaacccctcccagcgaactgccctttgagcgaggtcgcctggctgtcccttcagcaccctcctgggcagagtttctctctgcatccaccagtggcaagatggaaagtgattttgccctgctgacactatcagatcacgagcagcgggaactgtatgaggctgcccgagtcatccagacggccttccgaaagtacaagggccggcggctgaaggagcagcaggaggtagcagcagctgtaatccagcgctgttaccggaagtacaagcagctgacctggattgcacttaagtttgcactctataagaagatgacccaggcggccatcctgatccagagcaagttccgaagctactatgaacagaagcgatttcagcagagccgccgagcggctgtgctcatccagcagcactaccgctcctaccgccgcaggcccggccctccccaccggacttcggccaccctgcctgcccgcaacaagctcctttctcaccaagaagcaggaccaggcagcccggaagatcatgagattcctgcggcgctgccgacacaggatgagggaactgaagcagaaccaggagctggaagggcttccccagccgggactggccacatgacctggccaccgcctttctcaccaccctgggggcgcctcgtgcagtcttaacagggagagggctttctggggcagggggagcccctgtcggcagctttcctgttcacctttgttggagccctctgtaggcctcctccctcctccccacgccttgctcccacacccctctcctcgtccctcctggtcgtgccccgtctcttttggtcctggctccagaaaacccgcgccccacatacctgcatcttccgctgtgacctccggagccctgcctgcccctgctccccagctcctcctgcctgcacccgactcggccccctcctgacttgccttatttatttgttcgacgcgtctctgaatgtatccgcctcggttcccaccactgccttcgctgcgcacgcccctcgtgtttcagggctgaccgtgtccccacccgactccgcatgtttgcgtctgtttcctccctctctggccctgtcttaccccatcacccgactctggccactgacctcagggccgaaggggaggtggtgtacataggaacgcgttgcggagtccgccccgtcccccgaggggaggggtcttgtacatactgtaacatacagagtatagtgaagaatctatttaaggcgccgcggggagggctgcacggccgggcttgtggttctctagcgcggcgggggcctcctgccggctccacgggcactttctacttgtgcatgggcttggtttatacgaattgccattaaacatcgctgcaccagccag

SEQ ID NO: 4313 - DNA, 7161 bp, Homo sapiens
  source 1..7161: mol_type = unassigned DNA
cgccatgtgaaggttagggccgggacatcccgaggagccgcggtgaaagatgggggatgctgcagaccccagggagatgagaaagacgttcattgttccagccatcaagccttttgaccactatgatttctccagggccaaaatcgcctgcaatctggcctggctggtggccaaagcctttgggacagaaaatgtgccagaggaacttcaagaaccattttacacagatcagtatgaccaggaacacatcaaaccacctgttgttaatttgcttctatcggctgaactatactgtcgtgctgggagtctcattctcaagagtgatgctgcaaaaccccttttgggccatgatgctgtaatccaggctttagcacagaaaggtctttatgtcactgaccaggaaaaattggtaactgaacgagatctccacaagaaacccatacagatgagtgcacatttggccatgatcgataccctcatgatggcttatactgtagaaatggtcagtatagaaaaagtaattgcgtgtgctcagcagtattcagctttttttcaagccacagatctgccctatgatattgaggacgctgtcatgtactggataaataaggtaaatgaacatttgaaagacataatggaacaagaacaaaaactgaaagaacatcacacagttgaagctccaggaggtcaaaagtctccttccaaatggttttggaaactggttccagctcgttatcggaaagagcaaacattgcttaagcaactgccttgcattccattggtagaaaatttgttgaaggatgggacagatggctgtgcattagctgcccttattcatttttactgtcctgatgttgtcagattagaggatatttgtttgaaagaaactatgtctttggctgatagcctgtataatctgcagctgattcaagaattttgccaagaatacttgaaccagtgttgccatttcactctggaagatatgctctatgctgcttcatccataaagagtaattatttggtgttcatggcggaactgttctggtggtttgaagtggtgaagccgtcttttgtacagcctcgtgttgttcgtccacaaggagctgaacctgtaaaagatatgccttcaattcctgtcttgaatgctgccaaaagaaatgtcttagatagtagttctgacttcccttcaagtggggaaggagctacatttacacagtctcatcatcatttgccttctaggtattcacgtccccaggctcattcttcagcctcaggaggaattagaaggtcttcatctatgtcttatgttgatggcttcatagggacatggcccaaagagaaaagatcatcagtgcatggcgtatcatttgatatttcttttgataaagaagatagtgtacagagatccactccaaaccgaggaatcactcgttctattagtaatgaaggacttactctgaacaacagtcatgtatctaaacacattaggaaaaatttgtccttcaagccaataaatggagaagaggaagcagagagcattgaagaagaacttaatatagattctcacagtgacctcaaatcttgtgtgccccttaacacaaatgaactaaattctaatgagaatattcattacaagcttccaaatggagctttacaaaatagaatacttcttgacgagtttggcaatcagatcgagacaccaagcattgaagaagcattacaaataattcatgatactgaaaaatctcctcatacacctcagccagaccaaattgctaatggcttctttcttcatagtcaagaaatgagtatcttaaattcaaatatcaagttaaatcaatctagtcctgataatgtaactgatacgaaaggtgccttgagtcccataactgacaatactgaagtagacactggaattcacgttccttcagaagatattcctgaaactatggacgaagattcttcgttgagagattatactgtaagcttggactctgacatggatgatgcatctaaatttcttcaggattatgatattcgaactggcaacaccagggaagctttgagtccttgtccaagtactgtaagtaccaagtctcagccaggcagcagtgcttcttctagttctggagttaaaatgaccagctttgctgaacaaaaattcaggaaactgaatcataccgatggaaaaagtagtggaagcagttctcaaaaaactacaccagaaggctctgaacttaatattcctcatgtggttgcttgggcacaaattccagaagaaacagggcttccacagggacgggacactacccagctgttggcctctgaaatggtgcatcttaggatgaaactagaagaaaagaggcgtgctatagaagcccagaaaaagaaaatggaagctgcttttaccaaacagagacagaaaatgggaaggacagcattccttactgtagtgaaaaagaaaggggatgggatatctcctctacgagaggaagcggcgggtgcagaagatgagaaagtatatactgatcgagcaaaagaaaaggaatcacaaaaaactgatggacaaaggagcaagtcactggcagatataaaagagagcatggagaatcctcaagccaaatggctaaagtctccaactacacctattgatcctgagaagcagtggaacctggcaagcccctcagaagaaactttaaatgaaggagagattttagaatataccaaatccattgaaaagttaaattcatccctgcattttctacaacaagaaatgcaacgcttgtcacttcagcaggagatgttaatgcagatgagagagcaacaatcttgggtgatttcacctccacaaccctctccacagaaacagattcgagattttaagccttctaagcaggcaggcctgtcatcagccattgcaccattctcctcagactcccctcgtcctactcacccatctccacagtcttctaacaggaaaagtgcatctttttctgttaaaagtcaaaggactcctaggccaaatgagttaaaaataacacctttgaatcgaaccttgacacctcctcggtctgtggatagccttcctcggttaaggaggttttcaccaagtcaagttcctattcaaactaggtcatttgtatgttttggggatgatggagaacctcagttaaaggaatccaaacctaaagaggaagttaaaaaggaggaattggaatccaaagggactttggaacagcgtggacataatccagaagaaaaggaaatcaaaccttttgagtcaacagtctctgaagtcctatcactgcctgtcacagagactgtatgtctgacaccaaatgaggaccaattgaatcaacccacagaaccccctcctaaacccgttttcccacccactgctccaaaaaatgttaatctgattgaagtttccctctcagatttgaaaccccctgaaaaggctgatgtacctgttgaaaaatatgatggagaaagtgataaagaacaatttgatgatgaccagaaagtatgctgtggattcttttttaaggatgatcaaaaagcagaaaatgatatggcaatgaaacgggcagctttgttggagaaaagattaagaagggaaaaggaaactcagctccggaaacaacagttggaagcagaaatggagcataagaaggaggaaacaaggcgtaaaactgaggaagaacgtcagaagaaagaagatgagagagcacgcagagaatttattaggcaagaatatatgaggcggaaacaactgaaactaatggaagatatggatacagtaattaaaccccgtcctcaagtagtaaaacaaaaaaaacagcgaccaaaatctattcacagagatcatattgaatcccccaaaacaccaataaagggtcctccagtctctagcctttctttggcatcgctgaacacgggtgataacgagagtgtacattcaggcaagaggacgccaagatcagagtctgtagaaggcttcttatctccaagtcgttgtggcagtcgaaatggagaaaaagactgggagaatgcatcaacaacttcttcagtggcttctggaacagaatatacaggaccaaagctctacaaagaacccagtgcaaaatccaataagcacataatacaaaatgctttagctcattgctgtttggctggaaaagtaaatgaaggtcagaagaaaaaaatactggaggaaatggagaaatcagatgccaacaacttcttaatcttgttccgggattcaggatgccagttcagatctttatacacttattgcccagaaactgaagaaatcaataaactgactgggataggccctaaatctatcactaaaaaaatgattgaaggactttacaaatataattctgacaggaaacagtttagccacatacccgctaaaactttatctgccagtgttgatgcaattaccattcatagccatttatggcagaccaaaagaccagtaacacccaaaaaacttttacccactaaggcatagaagttgggaaatacttgcttcagaacattcatggtaaatttgcacttcatctttcctgcctatagaaaatctttctaattgccaacaagacttttattaattaaaactggacattaagctctgttgtcatgaacaactggaatgtaaaccacagtattttggagtgcagaacattctcaattaagtgataagtccaaatgatgaaggaaatgttttaattcacaaatggagatttgtatgtgttatcaggttcacctgcttgatattagatacattaaagcactgaattttcatggatattagttggatttatcattgaaatatggttaagattacaaattatgtgttttatttgttgcttttttttaaccttttaatgtatattcttgtcttcagatggtttgctatttttctctcctgggggtttattctaagatacctttgtattttatttcatgtggagatcatgaaagtaggaaatatacctttagaagtaactcgcacctttcttatgatgttaagagaaacactagtgtttagttttacagtaaccctcatattttaatggtgttacagcatttgcaaaaattattctgctaagtatttacaactctatttattattcactcaagtattaacattctctattaaataagaggaggtgttgtaaagagctgctagtaggttcgctttaaaccacatgagcttaaccaagaatatgttatgagaagttgctgattaaatcagtgctgtttttacaccacttctggccaactcagaataatttagattgttcttttaacaaaaaaggctttctatctcttttaaagtaagtcactttataagttggcagaagtgaatgacactttgagagtagtctttcaatctgaagatgtaagacttcctgaaacaagttctcaagaagtctttacattatatttataactcatataaaaattatatttagaatttttaaacatgtacaaagggctacattttaattttaaaatagcttcacattattttacttatattgggtttttcttcattttaatccttttcaagtggaatggcttagaataagtatacacttgaaatctcctctacatgatctttgttctttaacagtgtataccagagggttagttggggaaaaacttcattctcaggaaaagacttgaatgattatgtgaccctgttatatttcagtgttgtgacaaatgtgtaaactagcgggggaagacagtattgtatcataaatgagatgcgtagtttgttttctttcatgggaagtagagataaaaatatatacatttctctaattgagttgtttagagaaagaactaatgtctcatatgatgtatttacttattttaaaaaaaagaataggaatgagatgtccctgagctgtacttttctattattataaggcctttaggcatcagtgcatctgggttatcaacattttctcaaatgctgtcaatattttactgtaatttatgttcttatatttatgtatatttgttaaaactgtaaaaaaatttcacagatttttttccaatacctgtgcaagatacatgtgtagctcaaaactatttgtgatctactgtttgcatgtaagagaccaggatatgtaactcttatattttaagtgtatacatattgtgtatataacatatggatattaaaaatggggaattgcacattttaccttttggacagtaatttctatcacagttagaaggaaatgatagtcaaatacacgtttagattaaaactagtttaaaaaattataaatgaatctaatcaaaatgtgaatagtagtcaaaaggataatttaataagcattttacgttactaaatttgttcatttcaatattaactaaatttccctcatcaaagcaatctttgtgatattacttcgctattaaataaagaaaattggatgcaagacaatggagaaactttaaaactaaacaggaccaccctttattcttaaatttgtgtgtgtccaacagttgaattgaatgtctataaggtctaaaggtagaatgtgaatattgccacagagttcattgctctcagtataagattttactttattaatgcagaaggaatatggatatatttctttaagtctgcagatttttttattatggtgcagcttttttttaattatgtttttaaaattatacagttgaaaaatatgccatttcataaagtctgaggattttcgtcaaccttactgaaacacactggtgctttcatcatcagaggtcaaattattatgataactattccattaagtttgccaaacatttgtcgtggttaccagtgcagcctgtcaaattctgctatttgacacagctttggaaagatttagttcttggtttttccgttttgtattagaatgactgttacagttttatttggctgtttaaagccaaattcagctatttaattatggtttcatggacactgttgagcaatgtacagtgtatggtgtgcttacctgtccactctagagcattgcttacaggttttttgttttttaagatgctgtgctgtaaaatactgtcatacttgctatttcctggtacagtgtagtttttcccctttcatttgaataaaagcatggcacc

SEQ ID NO: 4314 - DNA, 7352 bp, Homo sapiens
  source 1..7352: mol_type = unassigned DNA
acggggcggacctcgcgcggacggacggacggagacggcgccgccacattcctatgcccgggagcggcggcggcggcggcggcggctcccgcgggaggcggcaggcgcgcggcgcggacagctgagcttctcctccgtcggcgcccgggcggacatcgcccgggccccgatggtttgagcttgcttctccctccctcccgacccccgtggtggcgaggccacgccatgtgaaggttagggccgggacatcccgaggagccgcggtgaaagatgggggatgctgcagaccccagggagatgagaaagacgttcattgttccagccatcaagccttttgaccactatgatttctccagggccaaaatcgcctgcaatctggcctggctggtggccaaagcctttgggacagaaaatgtgccagaggaacttcaagaaccattttacacagatcagtatgaccaggaacacatcaaaccacctgttgttaatttgcttctatcggctgaactatactgtcgtgctgggagtctcattctcaagagtgatgctgcaaaaccccttttgggccatgatgctgtaatccaggctttagcacagaaaggtctttatgtcactgaccaggaaaaattggtaactgaacgagatctccacaagaaacccatacagatgagtgcacatttggccatgatcgataccctcatgatggcttatactgtagaaatggtcagtatagaaaaagtaattgcgtgtgctcagcagtattcagctttttttcaagccacagatctgccctatgatattgaggacgctgtcatgtactggataaataaggtaaatgaacatttgaaagacataatggaacaagaacaaaaactgaaagaacatcacacagttgaagctccaggaggtcaaaaggctcgttatcggaaagagcaaacattgcttaagcaactgccttgcattccattggtagaaaatttgttgaaggatgggacagatggctgtgcattagctgcccttattcatttttactgtcctgatgttgtcagattagaggatatttgtttgaaagaaactatgtctttggctgatagcctgtataatctgcagctgattcaagaattttgccaagaatacttgaaccagtgttgccatttcactctggaagatatgctctatgctgcttcatccataaagagtaattatttggtgttcatggcggaactgttctggtggtttgaagtggtgaagccgtcttttgtacagcctcgtgttgttcgtccacaaggagctgaacctgtaaaagatatgccttcaattcctgtcttgaatgctgccaaaagaaatgtcttagatagtagttctgacttcccttcaagtggggaaggagctacatttacacagtctcatcatcatttgccttctaggtattcacgtccccaggctcattcttcagcctcaggaggaattagaaggtcttcatctatgtcttatgttgatggcttcatagggacatggcccaaagagaaaagatcatcagtgcatggcgtatcatttgatatttcttttgataaagaagatagtgtacagagatccactccaaaccgaggaatcactcgttctattagtaatgaaggacttactctgaacaacagtcatgtatctaaacacattaggaaaaatttgtccttcaagccaataaatggagaagaggaagcagagagcattgaagaagaacttaatatagattctcacagtgacctcaaatcttgtgtgccccttaacacaaatgaactaaattctaatgagaatattcattacaagcttccaaatggagctttacaaaatagaatacttcttgacgagtttggcaatcagatcgagacaccaagcattgaagaagcattacaaataattcatgatactgaaaaatctcctcatacacctcagccagaccaaattgctaatggcttctttcttcatagtcaagaaatgagtatcttaaattcaaatatcaagttaaatcaatctagtcctgataatgtaactgatacgaaaggtgccttgagtcccataactgacaatactgaagtagacactggaattcacgttccttcagaagatattcctgaaactatggacgaagattcttcgttgagagattatactgtaagcttggactctgacatggatgatgcatctaaatttcttcaggattatgatattcgaactggcaacaccagggaagctttgagtccttgtccaagtactgtaagtaccaagtctcagccaggcagcagtgcttcttctagttctggagttaaaatgaccagctttgctgaacaaaaattcaggaaactgaatcataccgatggaaaaagtagtggaagcagttctcaaaaaactacaccagaaggctctgaacttaatattcctcatgtggttgcttgggcacaaattccagaagaaacagggcttccacagggacgggacactacccagctgttggcctctgaaatggtgcatcttaggatgaaactagaagaaaagaggcgtgctatagaagcccagaaaaagaaaatggaagctgcttttaccaaacagagacagaaaatgggaaggacagcattccttactgtagtgaaaaagaaaggggatgggatatctcctctacgagaggaagcggcgggtgcagaagatgagaaagtatatactgatcgagcaaaagaaaaggaatcacaaaaaactgatggacaaaggagcaagtcactggcagatataaaagagagcatggagaatcctcaagccaaatggctaaagtctccaactacacctattgatcctgagaagcagtggaacctggcaagcccctcagaagaaactttaaatgaaggagagattttagaatataccaaatccattgaaaagttaaattcatccctgcattttctacaacaagaaatgcaacgcttgtcacttcagcaggagatgttaatgcagatgagagagcaacaatcttgggtgatttcacctccacaaccctctccacagaaacagattcgagattttaagccttctaagcaggcaggcctgtcatcagccattgcaccattctcctcagactcccctcgtcctactcacccatctccacagtcttctaacaggaaaagtgcatctttttctgttaaaagtcaaaggactcctaggccaaatgagttaaaaataacacctttgaatcgaaccttgacacctcctcggtctgtggatagccttcctcggttaaggaggttttcaccaagtcaagttcctattcaaactaggtcatttgtatgttttggggatgatggagaacctcagttaaaggaatccaaacctaaagaggaagttaaaaaggaggaattggaatccaaagggactttggaacagcgtggacataatccagaagaaaaggaaatcaaaccttttgagtcaacagtctctgaagtcctatcactgcctgtcacagagactgtatgtctgacaccaaatgaggaccaattgaatcaacccacagaaccccctcctaaacccgttttcccacccactgctccaaaaaatgttaatctgattgaagtttccctctcagatttgaaaccccctgaaaaggctgatgtacctgttgaaaaatatgatggagaaagtgataaagaacaatttgatgatgaccagaaagtatgctgtggattcttttttaaggatgatcaaaaagcagaaaatgatatggcaatgaaacgggcagctttgttggagaaaagattaagaagggaaaaggaaactcagctccggaaacaacagttggaagcagaaatggagcataagaaggaggaaacaaggcgtaaaactgaggaagaacgtcagaagaaagaagatgagagagcacgcagagaatttattaggcaagaatatatgaggcggaaacaactgaaactaatggaagatatggatacagtaattaaaccccgtcctcaagtagtaaaacaaaaaaaacagcgaccaaaatctattcacagagatcatattgaatcccccaaaacaccaataaagggtcctccagtctctagcctttctttggcatcgctgaacacgggtgataacgagagtgtacattcaggcaagaggacgccaagatcagagtctgtagaaggcttcttatctccaagtcgttgtggcagtcgaaatggagaaaaagactgggagaatgcatcaacaacttcttcagtggcttctggaacagaatatacaggaccaaagctctacaaagaacccagtgcaaaatccaataagcacataatacaaaatgctttagctcattgctgtttggctggaaaagtaaatgaaggtcagaagaaaaaaatactggaggaaatggagaaatcagatgccaacaacttcttaatcttgttccgggattcaggatgccagttcagatctttatacacttattgcccagaaactgaagaaatcaataaactgactgggataggccctaaatctatcactaaaaaaatgattgaaggactttacaaatataattctgacaggaaacagtttagccacatacccgctaaaactttatctgccagtgttgatgcaattaccattcatagccatttatggcagaccaaaagaccagtaacacccaaaaaacttttacccactaaggcatagaagttgggaaatacttgcttcagaacattcatggtaaatttgcacttcatctttcctgcctatagaaaatctttctaattgccaacaagacttttattaattaaaactggacattaagctctgttgtcatgaacaactggaatgtaaaccacagtattttggagtgcagaacattctcaattaagtgataagtccaaatgatgaaggaaatgttttaattcacaaatggagatttgtatgtgttatcaggttcacctgcttgatattagatacattaaagcactgaattttcatggatattagttggatttatcattgaaatatggttaagattacaaattatgtgttttatttgttgcttttttttaaccttttaatgtatattcttgtcttcagatggtttgctatttttctctcctgggggtttattctaagatacctttgtattttatttcatgtggagatcatgaaagtaggaaatatacctttagaagtaactcgcacctttcttatgatgttaagagaaacactagtgtttagttttacagtaaccctcatattttaatggtgttacagcatttgcaaaaattattctgctaagtatttacaactctatttattattcactcaagtattaacattctctattaaataagaggaggtgttgtaaagagctgctagtaggttcgctttaaaccacatgagcttaaccaagaatatgttatgagaagttgctgattaaatcagtgctgtttttacaccacttctggccaactcagaataatttagattgttcttttaacaaaaaaggctttctatctcttttaaagtaagtcactttataagttggcagaagtgaatgacactttgagagtagtctttcaatctgaagatgtaagacttcctgaaacaagttctcaagaagtctttacattatatttataactcatataaaaattatatttagaatttttaaacatgtacaaagggctacattttaattttaaaatagcttcacattattttacttatattgggtttttcttcattttaatccttttcaagtggaatggcttagaataagtatacacttgaaatctcctctacatgatctttgttctttaacagtgtataccagagggttagttggggaaaaacttcattctcaggaaaagacttgaatgattatgtgaccctgttatatttcagtgttgtgacaaatgtgtaaactagcgggggaagacagtattgtatcataaatgagatgcgtagtttgttttctttcatgggaagtagagataaaaatatatacatttctctaattgagttgtttagagaaagaactaatgtctcatatgatgtatttacttattttaaaaaaaagaataggaatgagatgtccctgagctgtacttttctattattataaggcctttaggcatcagtgcatctgggttatcaacattttctcaaatgctgtcaatattttactgtaatttatgttcttatatttatgtatatttgttaaaactgtaaaaaaatttcacagatttttttccaatacctgtgcaagatacatgtgtagctcaaaactatttgtgatctactgtttgcatgtaagagaccaggatatgtaactcttatattttaagtgtatacatattgtgtatataacatatggatattaaaaatggggaattgcacattttaccttttggacagtaatttctatcacagttagaaggaaatgatagtcaaatacacgtttagattaaaactagtttaaaaaattataaatgaatctaatcaaaatgtgaatagtagtcaaaaggataatttaataagcattttacgttactaaatttgttcatttcaatattaactaaatttccctcatcaaagcaatctttgtgatattacttcgctattaaataaagaaaattggatgcaagacaatggagaaactttaaaactaaacaggaccaccctttattcttaaatttgtgtgtgtccaacagttgaattgaatgtctataaggtctaaaggtagaatgtgaatattgccacagagttcattgctctcagtataagattttactttattaatgcagaaggaatatggatatatttctttaagtctgcagatttttttattatggtgcagcttttttttaattatgtttttaaaattatacagttgaaaaatatgccatttcataaagtctgaggattttcgtcaaccttactgaaacacactggtgctttcatcatcagaggtcaaattattatgataactattccattaagtttgccaaacatttgtcgtggttaccagtgcagcctgtcaaattctgctatttgacacagctttggaaagatttagttcttggtttttccgttttgtattagaatgactgttacagttttatttggctgtttaaagccaaattcagctatttaattatggtttcatggacactgttgagcaatgtacagtgtatggtgtgcttacctgtccactctagagcattgcttacaggttttttgttttttaagatgctgtgctgtaaaatactgtcatacttgctatttcctggtacagtgtagtttttcccctttcatttgaataaaagcatggcaccaaa

SEQ ID NO: 4315 - DNA, 4498 bp, Homo sapiens
  source 1..4498: mol_type = unassigned DNA
cgccatgtgaaggttagggccgggacatcccgaggagccgcggtgaaagatgggggatgctgcagaccccagggagatgagaaagacgttcattgttccagccatcaagccttttgaccactatgatttctccagggccaaaatcgcctgcaatctggcctggctggtggccaaagcctttgggacagaaaatgtgccagaggaacttcaagaaccattttacacagatcagtatgaccaggaacacatcaaaccacctgttgttaatttgcttctatcggctgaactatactgtcgtgctgggagtctcattctcaagagtgatgctgcaaaaccccttttgggccatgatgctgtaatccaggctttagcacagaaaggtctttatgtcactgaccaggaaaaattggtaactgaacgagatctccacaagaaacccatacagatgagtgcacatttggccatgatcgataccctcatgatggcttatactgtagaaatggtcagtatagaaaaagtaattgcgtgtgctcagcagtattcagctttttttcaagccacagatctgccctatgatattgaggacgctgtcatgtactggataaataaggtaaatgaacatttgaaagacataatggaacaagaacaaaaactgaaagaacatcacacagttgaagctccaggaggtcaaaaggctcgttatcggaaagagcaaacattgcttaagcaactgccttgcattccattggtagaaaatttgttgaaggatgggacagatggctgtgcattagctgcccttattcatttttactgtcctgatgttgtcagattagaggatatttgtttgaaagaaactatgtctttggctgatagcctgtataatctgcagctgattcaagaattttgccaagaatacttgaaccagtgttgccatttcactctggaagatatgctctatgctgcttcatccataaagagtaattatttggtgttcatggcggaactgttctggtggtttgaagtggtgaagccgtcttttgtacagcctcgtgttgttcgtccacaaggagctgaacctgtaaaagatatgccttcaattcctgtcttgaatgctgccaaaagaaatgtcttagatagtagttctgacttcccttcaaggtattcacgtccccaggctcattcttcagcctcaggaggaattagaaggtcttcatctatgtcttatgttgatggcttcatagggacatggcccaaagagaaaagatcatcagtgcatggcgtatcatttgatatttcttttgataaagaagatagtgtacagagatccactccaaaccgaggaatcactcgttctattagtaatgaaggacttactctgaacaacagtcatgtatctaaacacattaggaaaaatttgtccttcaagccaataaatggagaagaggaagcagagagcattgaagaagaacttaatatagattctcacagtgacctcaaatcttgtgtgccccttaacacaaatgaactaaattctaatgagaatattcattacaagcttccaaatggagctttacaaaatagaatacttcttgacgagtttggcaatcagatcgagacaccaagcattgaagaagcattacaaataattcatgatactgaaaaatctcctcatacacctcagccagaccaaattgctaatggcttctttcttcatagtcaagaaatgagtatcttaaattcaaatatcaagttaaatcaatctagtcctgataatgtaactgatacgaaaggtgccttgagtcccataactgacaatactgaagtagacactggaattcacgttccttcagaagatattcctgaaactatggacgaagattcttcgttgagagattatactgtaagcttggactctgacatggatgatgcatctaaatttcttcaggattatgatattcgaactggcaacaccagggaagctttgagtccttgtccaagtactgtaagtaccaagtctcagccaggcagcagtgcttcttctagttctggagttaaaatgaccagctttgctgaacaaaaattcaggaaactgaatcataccgatggaaaaagtagtggaagcagttctcaaaaaactacaccagaaggctctgaacttaatattcctcatgtggttgcttgggcacaaattccagaagaaacagggcttccacagggacgggacactacccagctgttggcctctgaaatggtgcatcttaggatgaaactagaagaaaagaggcgtgctatagaagcccagaaaaagaaaatggaagctgcttttaccaaacagagacagaaaatgggaaggacagcattccttactgtagtgaaaaagaaaggggatgggatatctcctctacgagaggaagcggcgggtgcagaagatgagaaagtatatactgatcgagcaaaagaaaaggaatcacaaaaaactgatggacaaaggagcaagtcactggcagatataaaagagagcatggagaatcctcaagccaaatggctaaagtctccaactacacctattgatcctgagaagcagtggaacctggcaagcccctcagaagaaactttaaatgaaggagagattttagaatataccaaatccattgaaaagttaaattcatccctgcattttctacaacaagaaatgcaacgcttgtcacttcagcaggagatgttaatgcagatgagagagcaacaatcttgggtgatttcacctccacaaccctctccacagaaacagattcgagattttaagccttctaagcaggcaggcctgtcatcagccattgcaccattctcctcagactcccctcgtcctactcacccatctccacagtcttctaacaggaaaagtgcatctttttctgttaaaagtcaaaggactcctaggccaaatgagttaaaaataacacctttgaatcgaaccttgacacctcctcggtctgtggatagccttcctcggttaaggaggttttcaccaagtcaagttcctattcaaactaggtcatttgtatgttttggggatgatggagaacctcagttaaaggaatccaaacctaaagaggaagttaaaaaggaggaattggaatccaaagggactttggaacagcgtggacataatccagaagaaaaggaaatcaaaccttttgagtcaacagtctctgaagtcctatcactgcctgtcacagagactgtatgtctgacaccaaatgaggaccaattgaatcaacccacagaaccccctcctaaacccgttttcccacccactgctccaaaaaatgttaatctgattgaagtttccctctcagatttgaaaccccctgaaaaggctgatgtacctgttgaaaaatatgatggagaaagtgataaagaacaatttgatgatgaccagaaagtatgctgtggattcttttttaaggatgatcaaaaagcagaaaatgatatggcaatgaaacgggcagctttgttggagaaaagattaagaagggaaaaggaaactcagctccggaaacaacagttggaagcagaaatggagcataagaaggaggaaacaaggcgtaaaactgaggaagaacgtcagaagaaagaagatgagagagcacgcagagaatttattaggcaagaatatatgaggcggaaacaactgaaactaatggaagatatggatacagtaattaaaccccgtcctcaagtagtaaaacaaaaaaaacagcgaccaaaatctattcacagagatcatattgaatcccccaaaacaccaataaagggtcctccagtctctagcctttctttggcatcgctgaacacgggtgataacgagagtgtacattcaggcaagaggacgccaagatcagagtctgtagaaggcttcttatctccaagtcgttgtggcagtcgaaatggagaaaaagactgggagaatgcatcaacaacttcttcagtggcttctggaacagaatatacaggaccaaagctctacaaagaacccagtgcaaaatccaataagcacataatacaaaatgctttagctcattgctgtttggctggaaaagtaaatgaaggtcagaagaaaaaaatactggaggaaatggagaaatcagatgccaacaacttcttaatcttgttccgggattcaggatgccagttcagatctttatacacttattgcccagaaactgaagaaatcaataaactgactgggataggccctaaatctatcactaaaaaaatgattgaaggactttacaaatataattctgacaggaaacagtttagccacatacccgctaaaactttatctgccagtgttgatgcaattaccattcatagccatttatggcagaccaaaagaccagtaacacccaaaaaacttttacccactaaggcatagaagttgggaaatacttgcttcagaacattcatggtaaatttgcacttcatctttcctgcc

SEQ ID NO: 4316 - DNA, 1302 bp, Homo sapiens
  source 1..1302: mol_type = unassigned DNA
gagacagcccgccggccgcccggatctccacctgccaccccagagctgggacagcagccgggctgcggcactgggagggagaccccacagtggcctcttctgccacccacgcccccacccctggcatggccgaccagctgactgaggagcaggtcacagaattcaaggaggccttctccctgtttgacaaggatggggacggctgcatcaccacccgcgagctgggcacggtcatgcggtccctgggccagaaccccacggaggccgagctgcgggacatgatgagtgagatcgaccgggacggcaacggcaccgtggacttccccgagttcctgggcatgatggccaggaagatgaaggacacggacaacgaggaggagatccgcgaggccttccgcgtgttcgacaaggacggcaacggcttcgtcagcgccgccgagctgcgacacgtcatgacccggctgggggagaagctgagtgacgaggaggtggacgagatgatccgggccgcggacacggacggagacggacaggtgaactacgaggagtttgtccgtgtgctggtgtccaagtgaggccggcgcccaccatgctcctgggcgcccacgcggcccacagggcaagaacccggggcctcccgcctcctcccccatccccctgcctcccctgggcactgtggcttcctcctgcgcctggttgattcagcccacctctctgcatcccgcttcccgcgtctcttctctgcactcctgccgaccttcccacctgctcgtctgaatgacacggaacgctcccactgcaggcaaaccgtgacgccctccccactcgggagaagcagagctgaccttaggaccgagcaccagggcaggttgcgctgactctgcggccctccaggacggacaccgggtgaccccttagggcacccaggcaagatccctaagaggcacccaatgcccaggccaggggggctgcagccctcagcccccgccaggattcccgcaggctcctggactggaagctccctccgcggtcggattctggagggtgggaggcatcttggcctgcagtaagcggtgctgacggggactctggccacagaggtcaggcctcctgaaaacagcactgccttccgcgctgccccagcttgccccattccttgtccgccaacccaccgtgattcatcttctgaagctgggagtgaaactgggtcagctgtaacctgttcctattcatctggaaggagggaggcttggatgagcaggggatgagagctgcagggaaataaatgagatattcgtcctt

SEQ ID NO: 4317 - DNA, 1101 bp, Homo sapiens
  source 1..1101: mol_type = unassigned DNA
ggtaattagacccagacagggagggctcagtgcgggtctgaggagggaacacacgtgtgcaggcgtgtgctccacggtggcatgttgatacggaccagcctgggcaccaggccccctcgggagccagctttgctgttctgagtggaagggagatcaggtttccctgagaaaccccaaaatagcccccaactgtgcctggcttccagcgggcagcccagcccccaggccctgttttgctccctttcccccttcacccccagcccatgtcctgctgtctcctccctgaatggtggaccctcagcccctcctgtacaagatggtcaagcggtgcctcatgcatttgttcattcgacctgtcctgagagtttgtgacatgctggcacggggccaatgttgagtccaccaggatgggagggtggccaggctctgagccactgagcaccagctggccaggatgggtcttcaacaagaaatctcactgcagccctggtgtcaccaccctgcagaatcctgtcagacaaccaccgacatgacagagcgcctgtcggctgagcagatcaaggagtacaagggagtctttgagatgttcgacgaagagggcaacggggaggtgaagacgggggagctggagtggctcatgagcctgctgggtatcaaccccaccaagagtgagctggcctcaatggccaaggatgtggacagagacaacaaagggttcttcaactgcgatggtttcctggcactaatgggagtttaccatgagaaggcccagaaccaggagagcgagctgagggcggcattccgtgtctttgacaaagagggcaagggctacattgactggaacacactcaagtacgtgctaatgaacgcaggggagcccctcaacgaggtggaggcggagcagatgatgaaggaggccgacaaggatggggacaggaccatcgactatgaggagtttgtggccatgatgacgggggagtccttcaagctgatccagtaggtgcagctgccgcagccgggggaggcctgcccgggaaggctgctgcccctgccccctggcccccactcccccggctccgtgtaaaataaatgttccagccc

SEQ ID NO: 4318 - DNA, 769 bp, Homo sapiens
  source 1..769: mol_type = unassigned DNA
cctgaatggtggaccctcagcccctcctgtacaagatggtcaagcggtgcctcatgcatttgttcattcgacctgtcctgagagtttgtgacatgctggcacggggccaatgttgagtccaccaggatgggagggtggccaggctctgagccactgagcaccagctggccaggatgggtcttcaacaagaaatctcactgacagagcgcctgtcggctgagcagatcaaggagtacaagggagtctttgagatgttcgacgaagagggcaacggggaggtgaagacgggggagctggagtggctcatgagcctgctgggtatcaaccccaccaagagtgagctggcctcaatggccaaggatgtggacagagacaacaaagggttcttcaactgcgatggtttcctggcactaatgggagtttaccatgagaaggcccagaaccaggagagcgagctgagggcggcattccgtgtctttgacaaagagggcaagggctacattgactggaacacactcaagtacgtgctaatgaacgcaggggagcccctcaacgaggtggaggcggagcagatgatgaaggaggccgacaaggatggggacaggaccatcgactatgaggagtttgtggccatgatgacgggggagtccttcaagctgatccagtaggtgcagctgccgcagccgggggaggcctgcccgggaaggctgctgcccctgccccctggcccccactcccccggctccgtgtaaaataaatgttccagccc

SEQ ID NO: 4319 - DNA, 4260 bp, Homo sapiens
  source 1..4260: mol_type = unassigned DNA
actcaggggccaggggcgggcacagggccgggcttcgtgcggtggggctcgctcgcgcggcagcggtggccgaggcctcttggttctgcggcacgtgacggtcgggccgcctccgcctctctctttactgcggcgcggggcaaggtgtgcgggcgggaaggggcacgggcacccccgcggtccccgggaggctagagatcatggaagggaagtggttgctgtgtatgttactggtgcttggaactgctattgttgaggctcatgatggacatgatgatgatgtgattgatattgaggatgaccttgacgatgtcattgaagaggtagaagactcaaaaccagataccactgctcctccttcatctcccaaggttacttacaaagctccagttccaacaggggaagtatattttgctgattcttttgacagaggaactctgtcagggtggattttatccaaagccaagaaagacgataccgatgatgaaattgccaaatatgatggaaagtgggaggtagaggaaatgaaggagtcaaagcttccaggtgataaaggacttgtgttgatgtctcgggccaagcatcatgccatctctgctaaactgaacaagcccttcctgtttgacaccaagcctctcattgttcagtatgaggttaatttccaaaatggaatagaatgtggtggtgcctatgtgaaactgctttctaaaacaccagaactcaacctggatcagttccatgacaagaccccttatacgattatgtttggtccagataaatgtggagaggactataaactgcacttcatcttccgacacaaaaaccccaaaacgggtatctatgaagaaaaacatgctaagaggccagatgcagatctgaagacctattttactgataagaaaacacatctttacacactaatcttgaatccagataatagttttgaaatactggttgaccaatctgtggtgaatagtggaaatctgctcaatgacatgactcctcctgtaaatccttcacgtgaaattgaggacccagaagaccggaagcccgaggattgggatgaaagaccaaaaatcccagatccagaagctgtcaagccagatgactgggatgaagatgcccctgctaagattccagatgaagaggccacaaaacccgaaggctggttagatgatgagcctgagtacgtacctgatccagacgcagagaaacctgaggattgggatgaagacatggatggagaatgggaggctcctcagattgccaaccctagatgtgagtcagctcctggatgtggtgtctggcagcgacctgtgattgacaaccccaattataaaggcaaatggaagcctcctatgattgacaatcccagttaccagggaatctggaaacccaggaaaataccaaatccagatttctttgaagatctggaacctttcagaatgactccttttagtgctattggtttggagctgtggtccatgacctctgacattttttttgacaactttatcatttgtgctgatcgaagaatagttgatgattgggccaatgatggatggggcctgaagaaagctgctgatggggctgctgagccaggcgttgtggggcagatgatcgaggcagctgaagagcgcccgtggctgtgggtagtctatattctaactgtagcccttcctgtgttcctggttatcctcttctgctgttctggaaagaaacagaccagtggtatggagtataagaaaactgatgcacctcaaccggatgtgaaggaagaggaagaagagaaggaagaggaaaaggacaagggagatgaggaggaggaaggagaagagaaacttgaagagaaacagaaaagtgatgctgaagaagatggtggcactgtcagtcaagaggaggaagacagaaaacctaaagcagaggaggatgaaattttgaacagatcaccaagaaacagaaagccacgaagagagtgaaacaatcttaagagcttgatctgtgatttcttctccctcctcccctgcaagagtggtcctaggagaggacctggcacaccttaggttgacattcagaaaacttcaagacatcaccatcagcaggctccagttgaacactagtctgtgtaactttaaacatctagcagtaaatacttgcagttgtgatataaaggaccctgtttctgtagaaaagaaaacatttaacataatggttgtgaaatgtaacatgaagcaaactaacttttttttttttaacatctttgtttttaaaatagaatgatagaactttgccagtctttaagatcttggcttaatttaatgtattaatctgtttgtgcaaacataataccaccatttaaaaatgttagggagatgagttgcagtttttataatagattttttttaaagtttggtattgtaaaacattcacacctctgtccctcaaaattgataattacgtttaaagtgcagtcatttgtggttagaatcttgttttgtttgcttccattattgagttcctcctaaggaaattgaggagagggactgaatagaagcccaaattcatataaaagttgcgtttaagttgtattaaaaatagatatataagaaaaaattctttcacttgatgtttgttagaccagaaagtgtgtgtgttctgtagctcagttcccagacagctttttaggtagtggaggaggtggcttcatgtggcacttgggcatttatattccacttgggagggtcaggctgtggccttctggagcaggtggcttgttaaggaatgctagcagggcatggcacgtgagctccggaatagatgtcttcatcacttcttccactgtgtgttgacactgttttccttacctatttcctcagatccccagctttctcctctgctatgcattttcttcacagtgcagcttgcagtccgttgctgaaaatgattataagccctgcataatgttaagctttattgtgattacgtgtatgtttcttctttcttttaagcagacccatacctttccagggtcaaagtacagaatagaatacattgatacaaagtacagaaaaatactttgatttttatccatttcttttactctgtgtaaagacttgagaagtctaattcacaggcaaaccaatacagaattgactgcagttgaacagactagaagtatttgtgggaggagtgacatgaagcatgagttatctgattttttttgtagctgctatatattttaagccttcatttgcaattcatgtaacagttgtgtcataaattacacaataaagcagtcctgttcaaatttttttttaacgtggcttgtagaatttttaaaaaagtgatcttaggtttgttttttcatgcgggatgcagatgggtgctatcagagcctctcccacaccactatagtgtaataatgttattattactctacactgaaacgtattcagagttagatattattttagcttcagttgttctttagaggctttcaaatgtaccgatgatactgtttcttgcactgaatatataaacactccacagtgtttatattgggaagatattgggaaggaaatatatttgtaaaagatgaaggctgtatctatttttttttctttttaaagtttgttcacttaaattcttttgaggatgggatgtatttttcttgctgttcagtgctttttccttttcatctgttgttctgtggtcacagtgaccttagctacatagcagactttcccaaatgtattgattacaaataaacagttgttacttagcaagacctgaaaatatgtctgcaggtttctccttgaagcaaatgtgtgggatcattgcatttccagaaatctgcctccttcaccctccgttgacagtatatgtcatgcctcactttcttctagctgagctttaaatcattagagcttaaattgtcagatcgttcattgcctttccagggttatttagtaaagtttgttgaaaacaaaaacgccttttcttggttcttttttcagttattttgaaggtccagcatcctgattaaatgtctgacacattaatgaatgaccagcagcagctttcagctcttaaaaagacacttatattttgattttacatgctggttacctgttccattgttgtcaaatgcccactctccatcagatgtgttcctccattttcttatccacaaagtactcctcacttttcaatttgtcatgttactaaatggtgttacattaaagccctgtgttaagtgtc

SEQ ID NO: 4320 - DNA, 984 bp, Homo sapiens
  source 1..984: mol_type = unassigned DNA
ggcacgtgacggtcgggccgcctccgcctctctctttactgcggcgcggggcaaggtgtgcgggcgggaaggggcacgggcacccccgcggtccccgggaggctagagatcatggaagggaagtggttgctgtgtatgttactggtgcttggaactgctattgttgaggctcatgatggacatgatgatgatgtgattgatattgaggatgaccttgacgatgtcattgaagaggtagaagactcaaaaccagataccactgctcctccttcatctcccaaggttacttacaaagctccagttccaacaggggaagtatattttgctgattcttttgacagaggaactctgtcagggtggattttatccaaagccaagaaagacgataccgatgatgaaattgccaaatatgatggaaagtgggaggtagaggaaatgaaggagtcaaagcttccaggtgataaaggacttgtgttgatgtctcgggccaagcatcatgccatctctgctaaactgaacaagcccttcctgtttgacaccaagcctctcattgttcagtatgaggttaatttccaaaatggaatagaatgtggtggtgcctataactgctttctaaaacaccagaactcaacctgggatcagttccatgacaagaccccttatacgattatgtttggtccagataaatgtggagaggactataaactgcacttcatcttccgacacaaaaaccccaaaacgggtatctatgaagaaaaacatgctaagaggccagatgcagatctgaagacctattttactgataagaaaacacatctttacacactaatcttgaatccagataatagttttgaaatactggttgaccaatctgtgcctcctgtaaatccttcacgtgaaattgaggacccagaagaccggaagcccgaggattgggatgaaagaccaaaaatcccagatccagaagctgtcaagccagatgac

SEQ ID NO: 4321 - DNA, 984 bp, Homo sapiens
  source 1..984: mol_type = unassigned DNA
atggaagggaagtggttgctgtgtatgttactggtgcttggaactgctattgttgaggctcatgatggacatgatgatgatgtgattgatattgaggatgaccttgacgatgtcattgaagaggtagaggaaatgaaggagtcaaagcttccaggtgataaaggacttgtgttgatgtctcgggccaagcatcatgccatctctgctaaactgaacaagcccttcctgtttgacaccaagcctctcattgttcagtatgaggttaatttccaaaatggaatagaatgtggtggtgcctatgtgaaactgctttctaaaacaccagaactcaacctggatcagttccatgacaagaccccttatacgattatgtttggtccagataaatgtggagaggactataaactgcacttcatcttccgacacaaaaaccccaaaacgggtatctatgaagaaaaacatgctaagaggccagatgcagatctgaagacctattttactgataagaaaacacatctttacacactaatcttgaatccagataatagttttgaaatactggttgaccaatctgtggtgaatagtggaaatctgctcaatgacatgactcctcctgtaaatccttcacgtgaaattgaggacccagaagaccggaagcccgaggattgggatgaaagaccaaaaatcccagatccagaagctgtcaagccagatgactgggatgaagatgcccctgctaagattccagatgaagaggccacaaaacccgaaggctggttagatgatgagcctgagtacgtacctgatccagacgcagagaaacctgaggattgggatgaagacatggatggagaatgggaggctcctcagattgccaaccctagatgtgagtcagctcctggatgtggtgtctggcagcgacctgtggttgacattcagaaaacttcaagacatcaccatcagcaggctccagttgaacactag

SEQ ID NO: 4322 - DNA, 2222 bp, Homo sapiens
  source 1..2222: mol_type = unassigned DNA
aatccggccaggcgctcgcgctgggttctgctcacgcccgtaggggcccgcgttcgctgcaacgggcccttcctgatggccgatcgtcggactcctaccccttttgccggctgccgtttgccccgtcagcgaagggcgcgcgatgcgtcccaagtctcggctccaggaaccagacggatcatggaagggaagtggttgctgtgtatgttactggtgcttggaactgctattgttgaggctcatgatggacatgatgatgatgtgattgatattgaggatgaccttgacgatgtcattgaagaggtagaagactcaaaaccagataccactgctcctccttcatctcccaaggttacttacaaagctccagttccaacaggggaagtatattttgctgattcttttgacagaggaactctgtcagggtggattttatccaaagccaagaaagacgataccgatgatgaaattgccaaatatgatggaaagtgggaggtagaggaaatgaaggagtcaaagcttccaggtgataaaggacttgtgttgatgtctcgggccaagcatcatgccatctctgctaaactgaacaagcccttcctgtttgacaccaagcctctcattgttcagtatgaggttaatttccaaaatggaatagaatgtggtggtgcctatgtgaaactgctttctaaaacaccagaactcaacctggatcagttccatgacaagaccccttatacgattatgtttggtccagataaatgtggagaggactataaactgcacttcatcttccgacacaaaaaccccaaaacgggtatctatgaagaaaaacatgctaagaggccagatgcagatctgaagacctattttactgataagaaaacacatctttacacactaatcttgaatccagataatagttttgaaatactggttgaccaatctgtggtgaatagtggaaatctgctcaatgacatgactcctcctgtaaatccttcacgtgaaattgaggacccagaagaccggaagcccgaggattgggatgaaagaccaaaaatcccagatccagaagctgtcaagccagatgactgggatgaagatgcccctgctaagattccagatgaagaggccacaaaacccgaaggctggttagatgatgagcctgagtacgtacctgatccagacgcagagaaacctgaggattgggatgaagacatggatggagaatgggaggctcctcagattgccaaccctagatgtgagtcagctcctggatgtggtgtctggcagcgacctgtgattgacaaccccaattataaaggcaaatggaagcctcctatgattgacaatcccagttaccagggaatctggaaacccaggaaaataccaaatccagatttctttgaagatctggaacctttcagaatgactccttttagtgctattggtttggagctgtggtccatgacctctgacattttttttgacaactttatcatttgtgctgatcgaagaatagttgatgattgggccaatgatggatggggcctgaagaaagctgctgatggggctgctgagccaggcgttgtggggcagatgatcgaggcagctgaagagcgcccgtggctgtgggtagtctatattctaactgtagcccttcctgtgttcctggttatcctcttctgctgttctggaaagaaacagaccagtggtatggagtataagaaaactgatgcacctcaaccggatgtgaaggaagaggaagaagagaaggaagaggaaaaggacaagggagatgaggaggaggaaggagaagagaaacttgaagagaaacagaaaagtgatgctgaagaagatggtggcactgtcagtcaagaggaggaagacagaaaacctaaagcagaggaggatgaaattttgaacagatcaccaagaaacagaaagccacgaagagagtgaaacaatcttaagagcttgatctgtgatttcttctccctcctcccctgcaagagtggtcctaggagaggacctggcacaccttaggttgacattcagaaaacttcaagacatcaccatcagcaggctccagttgaacactagtctgtgtaactttaaacatctagcagtaaatacttgcagttgtgatataaaggaccctgtttctgtagaaaagaaaacatttaacataatggttgtgaaatgtaacatgaagcaaactaact

SEQ ID NO: 4323 - DNA, 4207 bp, Homo sapiens
  source 1..4207: mol_type = unassigned DNA
actcaggggccaggggcgggcacagggccgggcttcgtgcggtggggctcgctcgcgcggcagcggtggccgaggcctcttggttctgcggcacgtgacggtcgggccgcctccgcctctctctttactgcggcgcggggcaagatcatggaagggaagtggttgctgtgtatgttactggtgcttggaactgctattgttgaggctcatgatggacatgatgatgatgtgattgatattgaggatgaccttgacgatgtcattgaagaggtagaagactcaaaaccagataccactgctcctccttcatctcccaaggttacttacaaagctccagttccaacaggggaagtatattttgctgattcttttgacagaggaactctgtcagggtggattttatccaaagccaagaaagacgataccgatgatgaaattgccaaatatgatggaaagtgggaggtagaggaaatgaaggagtcaaagcttccaggtgataaaggacttgtgttgatgtctcgggccaagcatcatgccatctctgctaaactgaacaagcccttcctgtttgacaccaagcctctcattgttcagtatgaggttaatttccaaaatggaatagaatgtggtggtgcctatgtgaaactgctttctaaaacaccagaactcaacctggatcagttccatgacaagaccccttatacgattatgtttggtccagataaatgtggagaggactataaactgcacttcatcttccgacacaaaaaccccaaaacgggtatctatgaagaaaaacatgctaagaggccagatgcagatctgaagacctattttactgataagaaaacacatctttacacactaatcttgaatccagataatagttttgaaatactggttgaccaatctgtggtgaatagtggaaatctgctcaatgacatgactcctcctgtaaatccttcacgtgaaattgaggacccagaagaccggaagcccgaggattgggatgaaagaccaaaaatcccagatccagaagctgtcaagccagatgactgggatgaagatgcccctgctaagattccagatgaagaggccacaaaacccgaaggctggttagatgatgagcctgagtacgtacctgatccagacgcagagaaacctgaggattgggatgaagacatggatggagaatgggaggctcctcagattgccaaccctagatgtgagtcagctcctggatgtggtgtctggcagcgacctgtgattgacaaccccaattataaaggcaaatggaagcctcctatgattgacaatcccagttaccagggaatctggaaacccaggaaaataccaaatccagatttctttgaagatctggaacctttcagaatgactccttttagtgctattggtttggagctgtggtccatgacctctgacattttttttgacaactttatcatttgtgctgatcgaagaatagttgatgattgggccaatgatggatggggcctgaagaaagctgctgatggggctgctgagccaggcgttgtggggcagatgatcgaggcagctgaagagcgcccgtggctgtgggtagtctatattctaactgtagcccttcctgtgttcctggttatcctcttctgctgttctggaaagaaacagaccagtggtatggagtataagaaaactgatgcacctcaaccggatgtgaaggaagaggaagaagagaaggaagaggaaaaggacaagggagatgaggaggaggaaggagaagagaaacttgaagagaaacagaaaagtgatgctgaagaagatggtggcactgtcagtcaagaggaggaagacagaaaacctaaagcagaggaggatgaaattttgaacagatcaccaagaaacagaaagccacgaagagagtgaaacaatcttaagagcttgatctgtgatttcttctccctcctcccctgcaagagtggtcctaggagaggacctggcacaccttaggttgacattcagaaaacttcaagacatcaccatcagcaggctccagttgaacactagtctgtgtaactttaaacatctagcagtaaatacttgcagttgtgatataaaggaccctgtttctgtagaaaagaaaacatttaacataatggttgtgaaatgtaacatgaagcaaactaacttttttttttttaacatctttgtttttaaaatagaatgatagaactttgccagtctttaagatcttggcttaatttaatgtattaatctgtttgtgcaaacataataccaccatttaaaaatgttagggagatgagttgcagtttttataatagattttttttaaagtttggtattgtaaaacattcacacctctgtccctcaaaattgataattacgtttaaagtgcagtcatttgtggttagaatcttgttttgtttgcttccattattgagttcctcctaaggaaattgaggagagggactgaatagaagcccaaattcatataaaagttgcgtttaagttgtattaaaaatagatatataagaaaaaattctttcacttgatgtttgttagaccagaaagtgtgtgtgttctgtagctcagttcccagacagctttttaggtagtggaggaggtggcttcatgtggcacttgggcatttatattccacttgggagggtcaggctgtggccttctggagcaggtggcttgttaaggaatgctagcagggcatggcacgtgagctccggaatagatgtcttcatcacttcttccactgtgtgttgacactgttttccttacctatttcctcagatccccagctttctcctctgctatgcattttcttcacagtgcagcttgcagtccgttgctgaaaatgattataagccctgcataatgttaagctttattgtgattacgtgtatgtttcttctttcttttaagcagacccatacctttccagggtcaaagtacagaatagaatacattgatacaaagtacagaaaaatactttgatttttatccatttcttttactctgtgtaaagacttgagaagtctaattcacaggcaaaccaatacagaattgactgcagttgaacagactagaagtatttgtgggaggagtgacatgaagcatgagttatctgattttttttgtagctgctatatattttaagccttcatttgcaattcatgtaacagttgtgtcataaattacacaataaagcagtcctgttcaaatttttttttaacgtggcttgtagaatttttaaaaaagtgatcttaggtttgttttttcatgcgggatgcagatgggtgctatcagagcctctcccacaccactatagtgtaataatgttattattactctacactgaaacgtattcagagttagatattattttagcttcagttgttctttagaggctttcaaatgtaccgatgatactgtttcttgcactgaatatataaacactccacagtgtttatattgggaagatattgggaaggaaatatatttgtaaaagatgaaggctgtatctatttttttttctttttaaagtttgttcacttaaattcttttgaggatgggatgtatttttcttgctgttcagtgctttttccttttcatctgttgttctgtggtcacagtgaccttagctacatagcagactttcccaaatgtattgattacaaataaacagttgttacttagcaagacctgaaaatatgtctgcaggtttctccttgaagcaaatgtgtgggatcattgcatttccagaaatctgcctccttcaccctccgttgacagtatatgtcatgcctcactttcttctagctgagctttaaatcattagagcttaaattgtcagatcgttcattgcctttccagggttatttagtaaagtttgttgaaaacaaaaacgccttttcttggttcttttttcagttattttgaaggtccagcatcctgattaaatgtctgacacattaatgaatgaccagcagcagctttcagctcttaaaaagacacttatattttgattttacatgctggttacctgttccattgttgtcaaatgcccactctccatcagatgtgttcctccattttcttatccacaaagtactcctcacttttcaatttgtcatgttactaaatggtgttacattaaagccctgtgttaagtgtc

SEQ ID NO: 4324 - DNA, 825 bp, Homo sapiens
  source 1..825: mol_type = unassigned DNA
cagcgcggagcagtgcacgccaatccggccaggcgctcgcgctgggttctgctcacgcccgtaggggcccgcgttcgctgcaacgggcccttcctgatggccgatcgtcggactcctaccccttttgccggctgccgtttgccccgtcagcgaagggcgcgcgatgcgtcccaagtctcggctccaggaaccagacgggtgagggctactgggggttgggttggaacgccccgaaggcaccacagcaaccgacgcgggaacgcctgttaaaccagccccgccccgagacgcgcgcgcccggcggtctcgatccagcgtggcccgcccctcacctcccgcccaaccaacagccacttcctgcctcactcccggccaatcttcacactccacgaagaatagccgtagggggcgtatgggacgatcatggaagggaagtggttgctgtgtatgttactggtgcttggaactgctattgttgaggctcatgatggacatgatgatgatgtgattgatattgaggatgaccttgacgatgtcattgaagaggtagaagactcaaaaccagataccactgctcctccttcatctcccaaggttacttacaaagctccagttccaacaggggaagtatattttgctgattcttttgacagaggaactctgtcagggtggattttatccaaagccaagaaagacgataccgatgatgaaattgccaaatatgatggaaagtgggaggtagaggaaatgaaggagtcaaagcttccaggtgataaaggacttgtgttgatgtctcgggccaagcatcatgccatctctgctaaa

SEQ ID NO: 4325 - DNA, 570 bp, Homo sapiens
  source 1..570: mol_type = unassigned DNA
gcggtggggctcgctcgcgcggcagcggtggccgaggcctcttggttctgcggcacgtgacgatcatggaagggaagtggttgctgtgtatgttactggtgcttggaactgctattgttgaggctcatgatggacatgatgatgatgtgattgatattgaggatgaccttgacgatgtcattgaagaggtagaagactcaaaaccagataccactgctcctccttcatctcccaaggttacttacaaagctccagttccaacaggggaagtatattttgctgattcttttgacagaggaactctgtcagggtggattttatccaaagccaagaaagacgataccgatgatgaaattgccaaatatgatggaaagtgggaggtagaggaaatgaaggagtcaaagcttccaggtgataaaggacttgtgttgatgtctcgggccaagcatcatgccatctctgctaaactgaacaagcccttcctgtttgacaccaagcctctcattgttcagtatgaggttaatttccaaaatggaatagaatgtggtggtgcctatgtgaaactgcttt

SEQ ID NO: 4326 - DNA, 2232 bp, Homo sapiens
  source 1..2232: mol_type = unassigned DNA
agtgcacgccaatccggccaggcgctcgcgctgggttctgctcacgcccgtaggggcccgcgttcgctgcaacgggcccttcctgatggccgatcgtcggactcctaccccttttgccggctgccgtttgccccgtcagcgaagggcgcgcgatgcgtcccaagtctcggctccaggaaccagacggatcatggaagggaagtggttgctgtgtatgttactggtgcttggaactgctattgttgaggctcatgatggacatgatgatgatgtgattgatattgaggatgaccttgacgatgtcattgaagaggtagaagactcaaaaccagataccactgctcctccttcatctcccaaggttacttacaaagctccagttccaacaggggaagtatattttgctgattcttttgacagaggaactctgtcagggtggattttatccaaagccaagaaagacgataccgatgatgaaattgccaaatatgatggaaagtgggaggtagaggaaatgaaggagtcaaagcttccaggtgataaaggacttgtgttgatgtctcgggccaagcatcatgccatctctgctaaactgaacaagcccttcctgtttgacaccaagcctctcattgttcagtatgaggttaatttccaaaatggaatagaatgtggtggtgcctatgtgaaactgctttctaaaacaccagaactcaacctggatcagttccatgacaagaccccttatacgattatgtttggtccagataaatgtggagaggactataaactgcacttcatcttccgacacaaaaaccccaaaacgggtatctatgaagaaaaacatgctaagaggccagatgcagatctgaagacctattttactgataagaaaacacatctttacacactaatcttgaatccagataatagttttgaaatactggttgaccaatctgtggtgaatagtggaaatctgctcaatgacatgactcctcctgtaaatccttcacgtgaaattgaggacccagaagaccggaagcccgaggattgggatgaaagaccaaaaatcccagatccagaagctgtcaagccagatgactgggatgaagatgcccctgctaagattccagatgaagaggccacaaaacccgaaggctggttagatgatgagcctgagtacgtacctgatccagacgcagagaaacctgaggattgggatgaagacatggatggagaatgggaggctcctcagattgccaaccctagatgtgagtcagctcctggatgtggtgtctggcagcgacctgtgattgacaaccccaattataaaggcaaatggaagcctcctatgattgacaatcccagttaccagggaatctggaaacccaggaaaataccaaatccagatttctttgaagatctggaacctttcagaatgactccttttagtgctattggtttggagctgtggtccatgacctctgacattttttttgacaactttatcatttgtgctgatcgaagaatagttgatgattgggccaatgatggatggggcctgaagaaagctgctgatggggctgctgagccaggcgttgtggggcagatgatcgaggcagctgaagagcgcccgtggctgtgggtagtctatattctaactgtagcccttcctgtgttcctggttatcctcttctgctgttctggaaagaaacagaccagtggtatggagtataagaaaactgatgcacctcaaccggatgtgaaggaagaggaagaagagaaggaagaggaaaaggacaagggagatgaggaggaggaaggagaagagaaacttgaagagaaacagaaaagtgatgctgaagaagatggtggcactgtcagtcaagaggaggaagacagaaaacctaaagcagaggaggatgaaattttgaacagatcaccaagaaacagaaagccacgaagagagtgaaacaatcttaagagcttgatctgtgatttcttctccctcctcccctgcaagagtggtcctaggagaggacctggcacaccttaggttgacattcagaaaacttcaagacatcaccatcagcaggctccagttgaacactagtctgtgtaactttaaacatctagcagtaaatacttgcagttgtgatataaaggaccctgtttctgtagaaaagaaaacatttaacataatggttgtgaaatgtaacatgaagcaaactaact

SEQ ID NO: 4327 - DNA, 582 bp, Homo sapiens
  source 1..582: mol_type = unassigned DNA
gctcgcgcggcagcggtggccgaggcctcttggttctgcggcacgtgacggtcgggccgcctccgcctctctctttactgcggcgcggggcaaggtgtgcgggcgggaaggggcacgggcacccccgcggtccccgggaggctagagcggagactggaccctagttccctgaagagaaaggggaatgtaccagaaggagaacacgcagtggttgagaaacttagcagttacagcacctattctggaggcgagtaatccagttggagagggacagggcgttaaaagcaggaaagcccccgaaagctcatctaagtgcatctctttccacaccggaggcctggagatcatggaagggaagtggttgctgtgtatgttactggtgcttggaactgctattgttgaggctcatgatggacatgatgatgatgtgattgatattgaggatgaccttgacgatgtcattgaagaggtagaagactcaaaaccagataccactgctcctccttcatctcccaaggttacttacaaagctccagttccaacaggggaagtatattttgctgattcttttgacagaggaac

SEQ ID NO: 4328 - DNA, 569 bp, Homo sapiens
  source 1..569: mol_type = unassigned DNA
gggcatgacacaagtgattgctggttgagggaagttaaactgagcttaatattaaaagattgagaggacaagattaaccatagttaagtctttttacctctgatttaggaaatggaagattttgcttaattttttaataagtagatttttttaagggggaagaattttattgatctttaaaatcattctgtatctcagtcttttcccaacattgtttgagggtcatgaatagaagcaactgccatatggatcaactgttgtacatttggtataattatacttagagcagaggtaaaggactatgtgggagttctcctgtgcatcagccagggtgcacacacaagccagacggagtctcgctctgtcactcaggctggagtgcagtggcgcgatctcggctcactgcaagctccgcctcccgggttcacgccattctcctgcctcagcctcccttgtagctgggactacagatcatggaagggaagtggttgctgtgtatgttactggtgcttggaactgctattgttgaggctcatgatggacatgatgatgatgtgattgatattgag

SEQ ID NO: 4329 - DNA, 1876 bp, Homo sapiens
  source 1..1876: mol_type = unassigned DNA
gttctgcggcacgtgacggtcgggccgcctccgcctctctctttactgcggcgcggggcaaggtgtgcgggcgggaaggggcacgggcacccccgcggtccccgggaggctagagatcatggaagggaagtggttgctgtgtatgttactggtgcttggaactgctattgttgaggctcatgatggacatgatgatgatgtgattgatattgaggatgaccttgacgatgtcattgaagaggtagaagactcaaaaccagataccactgctcctccttcatctcccaaggttacttacaaagctccagttccaacaggggaagtatattttgctgattcttttgacagaggaactctgtcagggaaagtgggaggtagaggaaatgaaggagtcaaagcttccaggtgataaaggacttgtgttgatgtctcgggccaagcatcatgccatctctgctaaactgaacaagcccttcctgtttgacaccaagcctctcattgttcagtatgaggttaatttccaaaatggaatagaatgtggtggtgcctatgtgaaactgctttctaaaacaccagaactcaacctggatcagttccatgacaagaccccttatacgattatgtttggtccagataaatgtggagaggactataaactgcacttcatcttccgacacaaaaaccccaaaacgggtatctatgaagaaaaacatgctaagaggccagatgcagatctgaagacctattttactgataagaaaacacatctttacacactaatcttgaatccagataatagttttgaaatactggttgaccaatctgtggtgaatagtggaaatctgctcaatgacatgactcctcctgtaaatccttcacgtgaaattgaggacccagaagaccggaagcccgaggattgggatgaaagaccaaaaatcccagatccagaagctgtcaagccagatgactgggatgaagatgcccctgctaagattccagatgaagaggccacaaaacccgaaggctggttagatgatgagcctgagtacgtacctgatccagacgcagagaaacctgaggattgggatgaagacatggatggagaatgggaggctcctcagattgccaaccctagatgtgagtcagctcctggatgtggtgtctggcagcgacctgtgattgacaaccccaattataaaggcaaatggaagcctcctatgattgacaatcccagttaccagggaatctggaaacccaggaaaataccaaatccagatttctttgaagatctggaacctttcagaatgactccttttagtgctattggtttggagctgtggtccatgacctctgacattttttttgacaactttatcatttgtgctgatcgaagaatagttgatgattgggccaatgatggatggggcctgaagaaagctgctgatggggctgctgagccaggcgttgtggggcagatgatcgaggcagctgaagagcgcccgtggctgtgggtagtctatattctaactgtagcccttcctgtgttcctggttatcctcttctgctgttctggaaagaaacagaccagtggtatggagtataagaaaactgatgcacctcaaccggatgtgaaggaagaggaagaagagaaggaagaggaaaaggacaagggagatgaggaggaggaaggagaagagaaacttgaagagaaacagaaaagtgatgctgaagaagatggtggcactgtcagtcaagaggaggaagacagaaaacctaaagcagaggaggatgaaattttgaacagatcaccaagaaacagaaagccacgaagagagtgaaacaatcttaagagcttgatctgtgatttcttctccct

SEQ ID NO: 4330 - DNA, 727 bp, Homo sapiens
  source 1..727: mol_type = unassigned DNA
gaggcctcttggttctgcggcacgtgacggtcgggccgcctccgcctctctctttactgcggcgcggggcaaggtgtgcgggcgggaaggggcacgggcacccccgcggtccccgggaggctagagatctgtggtcctccgtggaaagagagccactaccccaagacacatctaatataatacacagggcgcttacgtggttagaaaagaagagataagccgggtgcggtggctcactcctgtaatcccagcactttggaaggccgaggcgggcagatcacgacgtcaagagattgagactatcctggccaacacggtgaaaccctgtctctattaaaaataacaaaaattagctggatgtggtggtgcacacctgtcatcccacctacttgggaggctgagatcatggaagggaagtggttgctgtgtatgttactggtgcttggaactgctattgttgaggctcatgatggacatgatgatgatgtgattgatattgaggatgaccttgacgatgtcattgaagaggtagaagactcaaaaccagataccactgctcctccttcatctcccaaggttacttacaaagctccagttccaacaggggaagtatattttgctgattcttttgacagaggaactctgtcagggtggattttatccaaagccaagaaagacgataccgatgatgaaattgccaaatatgatggaaagtgggaggtagagg

SEQ ID NO: 4331 - DNA, 585 bp, Homo sapiens
  source 1..585: mol_type = unassigned DNA
gctggcgcctgcgcgcttgcgcatcttcctctgcccggcgcgcgccgcagccgtcgggatcacctcggggttgcgctgcttctccagcaagtgcatgcgcgccatggtctcagtcagcatgtctatgagcagttcctgctgcagcttcagatcatggaagggaagtggttgctgtgtatgttactggtgcttggaactgctattgttgaggctcatgatggacatgatgatgatgtgattgatattgaggatgaccttgacgatgtcattgaagaggtagaagactcaaaaccagataccactgctcctccttcatctcccaaggttacttacaaagctccagttccaacaggggaagtatattttgctgattcttttgacagaggaactctgtcagggtggattttatccaaagccaagaaagacgataccgatgatgaaattgccaaatatgatggaaagtgggaggtagaggaaatgaaggagtcaaagcttccaggtgataaaggacttgtgttgatgtctcgggccaagcatcatgccatctctgctaaactgaacaagcccttcctgtttgacaccaag

SEQ ID NO: 4332 - DNA, 1267 bp, Homo sapiens
  source 1..1267: mol_type = unassigned DNA
gcggggccctcgggcttggagggctgggccgggcggggaacgggcggggcgggccggaggcggcggcggctgactcgccttctctccggggctgcgaccccgaggcaaccggctgcagatgggagcccgcggagccgaggatgcgggcgggccggggcgcgacgccggcgagggagctgttccgggacgccgccttccccgccgcggactcctcgctcttctgcgacttgtctacgccgctggcccagttccgcgaggacatcacgtggaggcggccccaggagatttgtgccacaccccggctgtttccagatgacccacgggaagggcaggtgaagcaggggctgctgggggattgctggttcctgtgtgcctgcgccgcgctgcagaagagcaggcacctcctggaccaggtctcttgccctgtgcagcttcctgcagactggacttgcaaagtccagcctgtatggctggagttcccatgcctgccaatctcctgtcgactgcgagtcagctccgatacttcaccagattcagccacctgggggagctggaagtgaatctcatcttagctgagccttctgatgagactgcagccccagctgacacctggattgcagactcatgaaagacctgaaactctaccaacagccacctgggggagctggaagtgaatctcctcgtagctgagccttctgatgagactgcagccccggctgacacctggattgcagactcatgaaagacctgaaactctaccaacagccacctgggggagctggaagtgaatctcctcgtagctgagccttctgatgagactgcagccccggctgacacctggattgcagactcatgaaagaccctgagcagaggacccagtttggcagagcccgaattcctgacccacaggaactgggagataaaactctgtggttttaatcttctcattttagaggtaatttttttgtgtagcaataggtagctgacaatgcacagctaaaataatagataattaaccctaatgctagtttcattcatccatcagggtttgcaaagtagtgatattctacttctgtcttccttcattatttattagcagaaatgtatctataaaaagaagtgttccttcattaactctttggtcatgttgaggtacagtttgcataggaaaggcagggcaaatgcttgattctttcccttcctttcctcatttataaaataatgaactgttttcctggcatctttcaacaatgactaatgagttttt

SEQ ID NO: 4333 - DNA, 862 bp, Homo sapiens
  source 1..862: mol_type = unassigned DNA
ccgaggcaaccggctgcagatgggagcccgcggagccgaggatgcgggcgggccggggcgcgacgccggcgagggagctgttccgggacgccgccttccccgccgcggactcctcgctcttctgcgacttgtctacgccgctggcccagttccgcgaggacatcacgtggaggcggccccaggtcccagagggtggaaggagccaggacgcacccccactgctgctgcaggagccgctgctgagctgcgtgccacatcgctacgcccaggaggtgagccggctctgcctcctgcctgcgggcacctacaaggttgtgccctccacctacctgccggacacagagggggccttcacagtgaccatcgcaaccaggattgacaggccatccattcacagccaggagatgctgggccagttcctccaagaggtctccatcatggcagtgatgaaaacctaacagggtggccccctgtgccagctcaggtgactggagcccgagggcctgacaggttcccagcagctgggccggccagccttgcactgtgggggctggtcctgagtcttggcctgcctcccagccctgccaggaggctgcggcctaggggtccacgggaagcctccgtcaggagagacgcagccctgggggccagctggtgctgcaaggaagggtgggaagcttgctggcttctgttgcgccactgagacggcagagaccccaggatcccagagcttcccaggatccctcccagatcctctgctgactccatatggaggcctcacacccagagggtagggcagcagatcttctttataactatttattgttcgaatcacttttaggatgtaactttataaataaac

SEQ ID NO: 4334 - DNA, 1999 bp, Homo sapiens
  source 1..1999: mol_type = unassigned DNA
ccgaggcaaccggctgcagatgggagcccgcggagccgaggatgcgggcgggccggggcgcgacgccggcgagggagctgttccgggacgccgccttccccgccgcggactcctcgctcttctgcgacttgtctacgccgctggcccagttccgcgaggacatcacgtggaggcggccccaggagatttgtgccacaccccggctgtttccagatgacccacgggaagggcaggtgaagcaggggctgctgggggattgctggttcctgtgtgcctgcgccgcgctgcagaagagcaggcacctcctggaccaggtcattcctccgggacagccgagctgggccgaccaggagtaccggggctccttcacctgtcgcatttggcagtttggacgctgggtggaggtgaccacagatgaccgcctgccgtgccttgcagggagactctgtttctcccgctgccagagggaggatgtgttctggctccccttactggaaaaggtctacgccaaggtccatgggtcctacgagcacctgtgggccgggcaggtggcggatgccctggtggacctgaccggcggcctggcagaaagatggaacctgaagggcgtagcaggaagcggaggccagcaggacaggccaggccgctgggagcacaggacttgtcggcagctgctccacctgaaggaccagtgtctgatcagctgctgcgtgctcagccccagagcaggtgcccgggagctgggggagttccatgccttcattgtctcggacctgcgggagctccagggtcaggcgggccagtgcatcctgctgctgcggatccagaacccctggggccggcggtgctggcaggggctctggagagaggggggtgaagggtggagccaggtagatgcagcggtagcatctgagctcctgtcccagctccaggaaggggagttctgggtggaggaggaggagttcctcagggagtttgacgagctcaccgttggctacccggtcacggaggccggccacctgcagagcctctacacagagaggctgctctgccatacgcgggcgctgcctggggcctgggtcaagggccagtcagcaggaggctgccggaacaacagcggctttcccagcaaccccaaattctggctgcgggtctcagaaccgagtgaggtgtacattgccgtcctgcagagatccaggctgcacgcggcggactgggcaggccgggcccgggcactggtgggtgacagtcatacttcgtggagcccagcgagcatcccgggcaagcactaccaggctgtgggtctgcacctctggaaggtcccagagggtggaaggagccaggacgcacccccactgctgctgcaggagccgctgctgagctgcgtgccacatcgctacgcccaggaggtgagccggctctgcctcctgcctgcgggcacctacaaggttgtgccctccacctacctgccggacacagagggggccttcacagtgaccatcgcaaccaggattgacaggccatccattcacagccaggagatgctgggccagttcctccaagaggtctccatcatggcagtgatgaaaacctaacagggtggccccctgtgccagctcaggtgactggagcccgagggcctgacaggttcccagcagctgggccggccagccttgcactgtgggggctggtcctgagtcttggcctgcctcccagccctgccaggaggctgcggcctaggggtccacgggaagcctccgtcaggagagacgcagccctgggggccagctggtgctgcaaggaagggtgggaagcttgctggcttctgttgcgccactgagacggcagagaccccaggatcccagagcttcccaggatccctcccagatcctctgctgactccatatggaggcctcacacccagagggtagggcagcagatcttctttataactatttattgttcgaatcacttttaggatgtaactttataaataaac

SEQ ID NO: 4335 - DNA, 1512 bp, Homo sapiens
  source 1..1512: mol_type = unassigned DNA
gactagcgggccggcgtactggcctggtccagcacctgcggggccctcgggcttggagggctgggccgggcggggaacgggcggggcgggccggaggcggcggcggctgactcgccttctctccggggctgcgaccccgaggcaaccggctgcagatgggagcccgcggagccgaggatgcgggcgggccggggcgcgacgccggcgagggagctgttccgggacgccgccttccccgccgcggactcctcgctcttctgcgacttgtctacgccgctggcccagttccgcgaggacatcacgtggaggcggccccaggagatttgtgccacaccccggctgtttccagatgacccacgggaagggcaggtgaagcaggggctgctgggggattgctggttcctgtgtgcctgcgccgcgctgcagaagagcaggcacctcctggaccaggtcattcctccgggacagccgagctgggccgaccaggagtaccggggctccttcacctgtcgcatttggcagtttggacgctgggtggaggtgaccacagatgaccgcctgccgtgccttgcagggagactctgtttctcccgctgccagagggaggatgtgttctggctccccttactggaaaaggtctacgccaaggtccatgggtcctacgagcacctgtgggccgggcaggtggcggatgccctggtggacctgaccggcggcctggcagaaagatggaacctgaagggcgtagcaggaagcggaggccagcaggacaggccaggccgctgggagcacaggacttgtcggcagctgctccacctgaaggaccagtgtctgatcagctgctgcgtgctcagccccagagcaggtgcccgggagctgggggagttccatgccttcattgtctcggacctgcgggagctccagggtcaggcgggccagtgcatcctgctgctgcggatccagaacccctggggccggcggtgctggcaggggctctggagagaggggggtgaagggtggagccaggtagatgcagcggtagcatctgagctcctgtcccagctccaggaaggggagttctgggtggaggaggaggagttcctcagggagtttgacgagctcaccgttggctacccggtcacggaggccggccacctgcagagcctctacacagagaggctgctctgccatacgcgggcgctgcctggggcctgggtcaagggccagtcagcaggaggctgccggaacaacagcggctttcccagcaaccccaaattctggctgcgggtctcagaaccgagtgaggtgtacattgccgtcctgcagagatccaggctgcacgcggcggactgggcaggccgggcccgggcactggtgggtgacagtcatacttcgtggagcccagcgagcatcccgggcaagcactaccaggctgtgggtctgcacctctggaagggtgtgacacttggcaccacactgttccctgtcccttcatggatgtggcccacatga

SEQ ID NO: 4336 - DNA, 2644 bp, Homo sapiens
  source 1..2644: mol_type = unassigned DNA
cgcctggttaccaatgggagactagcgggccggcgtactggcctggtccagcacctgcggggccctcgggcttggagggctgggccgggcggggaacgggcggggcgggccggaggcggcggcggctgactcgccttctctccggggctgcgaccccgaggcaaccggctgcagatgggagcccgcggagccgaggatgcgggcgggccggggcgcgacgccggcgagggagctgttccgggacgccgccttccccgccgcggactcctcgctcttctgcgacttgtctacgccgctggcccagttccgcgaggacatcacgtggaggcggccccaggagatttgtgccacaccccggctgtttccagatgacccacgggaagggcaggtgaagcaggggctgctgggggattgctggttcctgtgtgcctgcgccgcgctgcagaagagcaggcacctcctggaccaggtcattcctccgggacagccgagctgggccgaccaggagtaccggggctccttcacctgtcgcatttggcagtttggacgctgggtggaggtgaccacagatgaccgcctgccgtgccttgcagggagactctgtttctcccgctgccagagggaggatgtgttctggctccccttactggaaaaggtctacgccaaggtccatgggtcctacgagcacctgtgggccgggcaggtggcggatgccctggtggacctgaccggcggcctggcagaaagatggaacctgaagggcgtagcaggaagcggaggccagcaggacaggccaggccgctgggagcacaggacttgtcggcagctgctccacctgaaggaccagtgtctgatcagctgctgcgtgctcagccccagagcaggtgcccgggagctgggggagttccatgccttcattgtctcggacctgcgggagctccagggtcaggcgggccagtgcatcctgctgctgcggatccagaacccctggggccggcggtgctggcaggggctctggagagaggggggtgaagggtggagccaggtagatgcagcggtagcatctgagctcctgtcccagctccaggaaggggagttctgggtggaggaggaggagttcctcagggagtttgacgagctcaccgttggctacccggtcacggaggccggccacctgcagagcctctacacagagaggctgctctgccatacgcgggcgctgcctggggcctgggtcaagggccagtcagcaggaggctgccggaacaacagcggctttcccagcaaccccaaattctggctgcgggtctcagaaccgagtgaggtgtacattgccgtcctgcagagatccaggctgcacgcggcggactgggcaggccgggcccgggcactggtgggtgacagtcatacttcgtggagcccagcgagcatcccgggcaagcactaccaggctgtgggtctgcacctctggaaggtagagaagcggcgggtcaatctgcctagggtcctgtccatgccccccgtggctggcaccgcgtgccatgcatacgaccgggaggtccacctgcgttgtgagctctcaccgggctactacctggctgtccccagcaccttcctgaaggacgcgccaggggagttcctgctccgagtcttctctaccgggcgagtctcccttagcgccatcagggcagtggccaagaacaccacccccggggcagccctgcctgcgggggagtgggggaccgtgcagctacggggttcttggagagtcggccagacggcggggggcagcaggaactttgcctcataccccaccaacccctgcttccccttctcggtccccgagggccctggcccccgctgcgtccgcatcactctgcatcagcactgccggcccagtgacaccgagttccaccccatcggcttccatatcttccaggtcccagagggtggaaggagccaggacgcacccccactgctgctgcaggagccgctgctgagctgcgtgccacatcgctacgcccaggaggtgagccggctctgcctcctgcctgcgggcacctacaaggttgtgccctccacctacctgccggacacagagggggccttcacagtgaccatcgcaaccaggattgacaggccatccattcacagccaggagatgctgggccagttcctccaagaggtctccatcatggcagtgatgaaaacctaacagggtggccccctgtgccagctcaggtgactggagcccgagggcctgacaggttcccagcagctgggccggccagccttgcactgtgggggctggtcctgagtcttggcctgcctcccagccctgccaggaggctgcggcctaggggtccacgggaagcctccgtcaggagagacgcagccctgggggccagctggtgctgcaaggaagggtgggaagcttgctggcttctgttgcgccactgagacggcagagaccccaggatcccagagcttcccaggatccctcccagatcctctgctgactccatatggaggcctcacacccagagggtagggcagcagatcttctttataactatttattgttcgaatcacttttaggatgtaactttataaataaacatgagcgctgatgatttgcagatca

SEQ ID NO: 4337 - DNA, 2728 bp, Homo sapiens
  source 1..2728: mol_type = unassigned DNA
agaaccttcaactgtcaagcaccgagctagccaccagcatgctgtactccccagggccgagtcttccggagtcagcagagagcctggatggatcacaggaggataagcctcggggctcatgtgcggagcccacttttactgatacgggaatggtggctcacataaacaacagccggctcaaggccaagggcgtgggccagcacgacaacgcccagaactttggtaaccagagctttgaggagctgcgagcagcctgtctaagaaagggggagctcttcgaggaccccttattccctgctgaacccagctcactgggcttcaaggacctgggccccaactccaaaaatgtgcagaacatctcctggcagcggcccaaggatatcataaacaaccctctattcatcatggatgggatttctccaacagacatctgccaggggatcctcggggactgctggctgctggctgccatcggctcccttaccacctgccccaaactgctataccgcgtggtgcccagaggacagagcttcaagaaaaactatgctggcatcttccattttcagatttggcagtttggacagtgggtgaacgtggtggtagatgaccggctgcccacaaagaatgacaagctggtgtttgtgcactcaaccgaacgcagtgagttctggagtgccctgctggagaaggcgtatgccaagctgagtgggtcctatgaagcattgtcagggggcagtaccatggagggccttgaggacttcacaggaggcgtggcccagagcttccaactccagaggccccctcagaacctgctcaggctccttaggaaggccgtggagcgatcctccctcatgggttgctccattgaagtcaccagtgatagtgaactggaatccatgactgacaagatgctggtgagagggcacgcttactctgtgactggccttcaggatgtccactacagaggcaaaatggaaacactgattcgggtccggaatccctggggccggattgagtggaatggagcttggagtgacagtgccagggagtgggaagaggtggcctcagacatccagatgcagctgctgcacaagacggaggacggggagttctggatgtcctaccaagatttcctgaacaacttcacgctcctggagatctgcaacctcacgcctgatacactctctggggactacaagagctactggcacaccaccttctacgagggcagctggcgcagaggcagctccgcagggggctgcaggaaccaccctggcacgttctggaccaacccccagtttaagatctctcttcctgagggggatgacccagaggatgacgcagagggcaatgttgtggtctgcacctgcctggtggccctaatgcagaagaactggcggcatgcacggcagcagggagcccagctgcagaccattggctttgtcctctacgcggtcccaaaagagtttcagaacattcaggatgtccacttgaagaaggaattcttcacgaagtatcaggaccacggcttctcagagatcttcaccaactcacgggaggtgagcagccaactccggctgcctccgggggaatatatcattattccctccacctttgagccacacagagatgctgacttcctgcttcgggtcttcaccgagaagcacagcgagtcatgggaattggatgaagtcaactatgctgagcaactccaagaggaaaaggtctctgaggatgacatggaccaggacttcctacatttgtttaagatagtggcaggagagggcaaggagataggggtgtatgagctccagaggctgctcaacaggatggccatcaaattcaaaagcttcaagaccaagggctttggcctggatgcttgccgctgcatgatcaacctcatggataaagatggctctggcaagctggggcttctagagttcaagatcctgtggaaaaaactcaagaaatggatggacatcttcagagagtgtgaccaggaccattcaggcaccttgaactcctatgagatgcgcctggttattgagaaagcaggcatcaagctgaacaacaaggtaatgcaggtcctggtggccaggtatgcagatgatgacctgatcatagactttgacagcttcatcagctgtttcctgaggctaaagaccatgttcacattctttctaaccatggaccccaagaatactggccatatttgcttgagcctggaacagtggctgcagatgaccatgtggggatagaggcgctgtaggagcctggtcatctctaccagcagcagcagcagcgaggttctagcccaggagggtggggtgcttcttgtagccctcagctctccggtctctgctgatgaaatgggctccaggtggcagtgcccgggtcccaggtgccgtgtttactgcagcagtgggacctccgtgcccactcccccagctcagaggctttctcttttttccccaacccggcttctgatggctggctttcccccaccatcgctctctcagagtatattttactaaagagtagttgatgcttccccagggtccccctggctggggaggccaagaatagggaagggacttgtagcccgtttcttaccctccatgcttgctgtcctgctcacacctacctgctgaccacccatcctggcacagcctctgttttcctccccatctgtggatactattctaataaatagcacatgccattggct

SEQ ID NO: 4338 - DNA, 2728 bp, Homo sapiens
  source 1..2728: mol_type = unassigned DNA
agaaccttcaactgtcaagcaccgagctagccaccagcatgctgtactccccagggccgagtcttccggagtcagcagagagcctggatggatcacaggaggataagcctcggggctcatgtgcggagcccacttttactgatacgggaatggtggctcacataaacaacagccggctcaaggccaagggcgtgggccagcacgacaacgcccagaactttggtaaccagagctttgaggagctgcgagcagcctgtctaagaaagggggagctcttcgaggaccccttattccctgctgaacccagctcactgggcttcaaggacctgggccccaactccaaaaatgtgcagaacatctcctggcagcggcccaaggatatcataaacaaccctctattcatcatggatgggatttctccaacagacatctgccaggggatcctcggggactgctggctgctggctgccatcggctcccttaccacctgccccaaactgctataccgcgtggtgcccagaggacagagcttcaagaaaaactatgctggcatcttccattttcagatttggcagtttggacagtgggtgaacgtggtggtagatgaccggctgcccacaaagaatgacaagctggtgtttgtgcactcaaccgaacgcagtgagttctggagtgccctgctggagaaggcgtatgccaagctgagtgggtcctatgaagcattgtcagggggcagtaccatggagggccttgaggacttcacaggaggcgtggcccagagcttccaactccagaggccccctcagaacctgctcaggctccttaggaaggccgtggagcgatcctccctcatgggttgctccattgaagtcaccagtgatagtgaactggaatccatgactgacaagatgctggtgagagggcacgcttactctgtgactggccttcaggatgtccactacagaggcaaaatggaaacactgattcgggtccggaatccctggggccggattgagtggaatggagcttggagtgacagtgccagggagtgggaagaggtggcctcagacatccagatgcagctgctgcacaagacggaggacggggagttctggatgtcctaccaagatttcctgaacaacttcacgctcctggagatctgcaacctcacgcctgatacactctctggggactacaagagctactggcacaccaccttctacgagggcagctggcgcagaggcagctccgcagggggctgcaggaaccaccctggcacgttctggaccaacccccagtttaagatctctcttcctgagggggatgacccagaggatgacgcagagggcaatgttgtggtctgcacctgcctggtggccctaatgcagaagaactggcggcatgcacggcagcagggagcccagctgcagaccattggctttgtcctctacgcggtggcctccccatttcagaacattcaggatgtccacttgaagaaggaattcttcacgaagtatcaggaccacggcttctcagagatcttcaccaactcacgggaggtgagcagccaactccggctgcctccgggggaatatatcattattccctccacctttgagccacacagagatgctgacttcctgcttcgggtcttcaccgagaagcacagcgagtcatgggaattggatgaagtcaactatgctgagcaactccaagaggaaaaggtctctgaggatgacatggaccaggacttcctacatttgtttaagatagtggcaggagagggcaaggagataggggtgtatgagctccagaggctgctcaacaggatggccatcaaattcaaaagcttcaagaccaagggctttggcctggatgcttgccgctgcatgatcaacctcatggataaagatggctctggcaagctggggcttctagagttcaagatcctgtggaaaaaactcaagaaatggatggacatcttcagagagtgtgaccaggaccattcaggcaccttgaactcctatgagatgcgcctggttattgagaaagcaggcatcaagctgaacaacaaggtaatgcaggtcctggtggccaggtatgcagatgatgacctgatcatagactttgacagcttcatcagctgtttcctgaggctaaagaccatgttcacattctttctaaccatggaccccaagaatactggccatatttgcttgagcctggaacagtggctgcagatgaccatgtggggatagaggcgctgtaggagcctggtcatctctaccagcagcagcagcagcgaggttctagcccaggagggtggggtgcttcttgtagccctcagctctccggtctctgctgatgaaatgggctccaggtggcagtgcccgggtcccaggtgccgtgtttactgcagcagtgggacctccgtgcccactcccccagctcagaggctttctcttttttccccaacccggcttctgatggctggctttcccccaccatcgctctctcagagtatattttactaaagagtagttgatgcttccccagggtccccctggctggggaggccaagaatagggaagggacttgtagcccgtttcttaccctccatgcttgctgtcctgctcacacctacctgctgaccacccatcctggcacagcctctgttttcctccccatctgtggatactattctaataaatagcacatgccattggct

SEQ ID NO: 4339 - DNA, 3129 bp, Homo sapiens
  source 1..3129: mol_type = unassigned DNA
actgacctccttcttggtgctctgacagcggcagccggtcctccctcagctctgcccgccttctctcctgctgctggccaagcccattaagctgctaccttggccacaactgaaggccccacgccctgggaagaaagctactgaagaggcgtccctgctccccagcaccccaaaccatcaattaatattaacgagggaaggctcctcattgcctaaagaccccactggggctccaatggaagagaggccccgcccccgtgactcaggaggttaaagggcctggtgccggcttgtgaggccagtgtccagatggcatccagcagtgggagggtcaccatccagctcgtggatgaggaggctggggtcggagccgggcgcctgcagctttttcggggccagagctatgaggcaattcgggcagcctgcctggattcggggatcctgttccgcgacccttacttccctgctggccctgatgcccttggctatgaccagctggggccggactcggagaaggccaaaggcgtgaaatggatgaggccccatgagttctgtgctgagccgaagttcatctgtgaagacatgagccgcacagacgtgtgtcaggggagcctgggtaactgctggttccttgcagctgccgcctcccttactctgtatccccggctcctgcgccgggtggtccctcctggacaggatttccagcatggctacgcaggcgtcttccacttccagctctggcagtttggccgctggatggacgtcgtggtggatgacaggctgcccgtgcgtgaggggaagctgatgttcgtgcgctcggaacagcggaatgagttctgggccccactcctggagaaggcctacgccaagctccacggctcctatgaggtgatgcggggcggccacatgaatgaggcttttgtggatttcacaggcggcgtgggcgaggtgctctatctgagacaaaacagcatggggctgttctctgccctgcgccatgccctggccaaggagtccctcgtgggcgccactgccctgagtgatcggggtgagtaccgcacagaagagggcctggtaaagggacacgcgtattccatcacgggcacacacaaggtgttcctgggcttcaccaaggtgcggctgctgcggctgcggaacccatggggctgcgtggagtggacgggggcctggagcgacagctgcccacgctgggacacactccccaccgagtgccgcgatgccctgctggtgaaaaaggaggatggcgagttctggatggagctgcgggacttcctcctccatttcgacaccgtgcagatctgctcgctgagcccggaggtgctgggccccagcccggaggggggcggctggcacgtccacaccttccaaggccgctgggtgcgtggcttcaactccggcgggagccagcctaatgctgaaaccttctggaccaatcctcagttccgtttaacgctgctggagcctgatgaggaggatgacgaggatgaggaagggccctgggggggctggggggctgcaggggcacggggcccagcgcgggggggccgcacgcccaagtgcacggtccttctgtccctcatccagcgcaaccggcggcgcctgagagccaagggcctcacttacctcaccgttggcttccacgtgttccagattccagaggagctgctgggcctctgggattccccgcgcagccatgcgctcctgccccggctgctgcgcgccgaccgctcgcccctcagcgcccgccgcgacgtgacccgccgctgctgcctgcgtccaggccactacctggtggtgccgagcaccgcccacgccggcgacgaggctgacttcactctgcgtgtcttctccgagcgccgccacacggccgtggagatcgacgacgtgatcagcgcagacctgcagtctctccagggcccctacctgcccctggagctggggttggagcagctgtttcaggagctggctggagaggaggaagaactcaatgcctctcagctccaggccttactaagcattgccctggagcctgccagggcccatacctccacccccagagagatcgggctcaggacctgtgagcagctgctgcagtgtttcgggcatgggcaaagcctggccttacaccacttccagcagctctggggctacctcctggagtggcaggccatatttaacaagttcgatgaggacacctctggaaccatgaactcctacgagctgaggctggcactgaatgcagcaggcttccacctgaacaaccagctgacccagaccctcaccagccgctaccgggatagccgtctgcgtgtggacttcgagcggttcgtgtcctgtgtggcccacctcacctgcatcttctgccactgcagccagcacctggatgggggtgagggggtcatctgcctgacccacagacagtggatggaggtggccaccttctcctaggatctccggatgggcgcacctgctgctcagggcagggttgctgagcaagaccacctccctaggccttgcctggcatgggtgccactctctctggcatccacctgtctggggctagtctctggccctcactgctcacggccgggtgaccactctggcctgcgtactcctcactcagaaacaagaacagcgacagcccttctcgagcagatgacacgagctagtccacgttgacagcttaagacagtgctagctctgccctggctctcctagaaggtggaggacagacacaggagaaataaaaaaagatgatgctgcaggaatccttcttaaaaatattacatgttttattatcctgtccccagagggtggtttatccagaaaccaagaaaaaaaatcaatcagaataaactcaaaaaaaaaaggtagggggagcaaaaccatcaaccaccaggcagccaggccatcagcccacctccacctctggagggtccccagagacccacgcccgacgcagacccggaggagcatcagcaaggggcccgggcagagaatcggctatgtcttcattatgagagcaggagagacggcagagatatgttgctaggtgaatatatatttatataataaatccgtaagttaataaagtaaatagtaattctc

SEQ ID NO: 4340 - DNA, 2669 bp, Homo sapiens
  source 1..2669: mol_type = unassigned DNA
atttctcaggagaacttatggcttcagaatcacagctcggtttttaagatggacataacctgtacgaccttctgatgggctttcaactttgaactggatgtggacacttttctctcagatgacagaattactccaacttcccctttgcagttgcttcctttccttgaaggtagctgtatcttattttctttaaaaagctttttcttccaaagccacttgccatgccgaccgtcattagcgcatctgtggctccaaggacagcggctgagccccggtccccagggccagttcctcacccggcccagagcaaggccactgaggctgggggtggaaacccaagtggcatctattcagccatcatcagccgcaattttcctattatcggagtgaaagagaagacattcgagcaacttcacaagaaatgtctagaaaagaaagttctttatgtggaccctgagttcccaccggatgagacctctctcttttatagccagaagttccccatccagttcgtctggaagagacctccggaaatttgcgagaatccccgatttatcattgatggagccaacagaactgacatctgtcaaggagagctaggggactgctggtttctcgcagccattgcctgcctgaccctgaaccagcaccttcttttccgagtcataccccatgatcaaagtttcatcgaaaactacgcagggatcttccacttccagttctggcgctatggagagtgggtggacgtggttatagatgactgcctgccaacgtacaacaatcaactggttttcaccaagtccaaccaccgcaatgagttctggagtgctctgctggagaaggcttatgctaagctccatggttcctacgaagctctgaaaggtgggaacaccacagaggccatggaggacttcacaggaggggtggcagagttttttgagatcagggatgctcctagtgacatgtacaagatcatgaagaaagccatcgagagaggctccctcatgggctgctccattgatgatggcacgaacatgacctatggaacctctccttctggtctgaacatgggggagttgattgcacggatggtaaggaatatggataactcactgctccaggactcagacctcgaccccagaggctcagatgaaagaccgacccggacaatcattccggttcagtatgagacaagaatggcctgcgggctggtcagaggtcacgcctactctgtcacggggctggatgaggtcccgttcaaaggtgagaaagtgaagctggtgcggctgcggaatccgtggggccaggtggagtggaacggttcttggagtgatagatggaaggactggagctttgtggacaaagatgagaaggcccgtctgcagcaccaggtcactgaggatggagagttctggatgtcctatgaggatttcatctaccatttcacaaagttggagatctgcaacctcacggccgatgctctgcagtctgacaagcttcagacctggacagtgtctgtgaacgagggccgctgggtacggggttgctctgccggaggctgccgcaacttcccagatactttctggaccaaccctcagtaccgtctgaagctcctggaggaggacgatgaccctgatgactcggaggtgatttgcagcttcctggtggccctgatgcagaagaaccggcggaaggaccggaagctaggggccagtctcttcaccattggcttcgccatctacgaggttccccatcagatgcacgggaacaagcagcacctgcagaaggacttcttcctgtacaacgcctccaaggccaggagcaaaacctacatcaacatgcgggaggtgtcccagcgcttccgcctgcctcccagcgagtacgtcatcgtgccctccacctacgagccccaccaggagggggaattcatcctccgggtcttctctgaaaagaggaacctctctgaggaagttgaaaataccatctccgtggatcggccagtgcccatcatcttcgtttcggacagagcaaacagcaacaaggagctgggtgtggaccaggagtcagaggagggcaaaggcaaaacaagccctgataagcaaaagcagtccccacagccacagcctggcagctctgatcaggaaagtgaggaacagcaacaattccggaacattttcaagcagatagcaggagatgacatggagatctgtgcagatgagctcaagaaggtccttaacacagtcgtgaacaaacacaaggacctgaagacacacgggttcacactggagtcctgccgtagcatgattgcgctcatggatacagatggctctggaaagctcaacctgcaggagttccaccacctctggaacaagattaaggcctggcagaaaattttcaaacactatgacacagaccagtccggcaccatcaacagctacgagatgcgaaatgcagtcaacgacgcaggattccacctcaacaaccagctctatgacatcattaccatgcggtacgcagacaaacacatgaacatcgactttgacagtttcatctgctgcttcgttaggctggagggcatgttcagagcttttcatgcatttgacaaggatggagatggtatcatcaagctcaacgttctggagtggctgcagctcaccatgtatgcctga

SEQ ID NO: 4341 - DNA, 3241 bp, Homo sapiens
  source 1..3241: mol_type = unassigned DNA
attccagtgtttcagcgaggtggaagtgtgataccaataaagacaactgtaggaaaatccacaggctggatgactgaatcctcctatggactccgggttgctctaagcactaagggttcttcagtgggtgagttatatcttgatgatggccattcattccaatacctccaccagaagcaatttttgcacaggaagttttcattctgttccagtgttctgatcaatagttttgctgaccagaggggtcattatcccagcaagtgtgtggtggagaagatcttggtcttaggcttcaggaaggagccatcttctgtgactacccactcatctgatggtaaagatcagcctgtggcttttacgtattgtgccaaaacatccatcctgagcctggagaagctctcactcaacattgccactgactgggagggttcctaaaaaagctctaaaatgaatgcatagtgtgtctttccttcaagatgtaaatgtcaaggaatgagttggcaaatcagtttaaaaacacaaactacccaacagaaaaatgaaatttgcgagaatccccgatttatcattgatggagccaacagaactgacatctgtcaaggagagctaggggactgctggtttctcgcagccattgcctgcctgaccctgaaccagcaccttcttttccgagtcataccccatgatcaaagtttcatcgaaaactacgcagggatcttccacttccagttctggcgctatggagagtgggtggacgtggttatagatgactgcctgccaacgtacaacaatcaactggttttcaccaagtccaaccaccgcaatgagttctggagtgctctgctggagaaggcttatgctaagctccatggttcctacgaagctctgaaaggtgggaacaccacagaggccatggaggacttcacaggaggggtggcagagttttttgagatcagggatgctcctagtgacatgtacaagatcatgaagaaagccatcgagagaggctccctcatgggctgctccattgatgatggcacgaacatgacctatggaacctctccttctggtctgaacatgggggagttgattgcacggatggtaaggaatatggataactcactgctccaggactcagacctcgaccccagaggctcagatgaaagaccgacccggacaatcattccggttcagtatgagacaagaatggcctgcgggctggtcagaggtcacgcctactctgtcacggggctggatgaggtcccgttcaaaggtgagaaagtgaagctggtgcggctgcggaatccgtggggccaggtggagtggaacggttcttggagtgatagatggaaggactggagctttgtggacaaagatgagaaggcccgtctgcagcaccaggtcactgaggatggagagttctggatgtcctatgaggatttcatctaccatttcacaaagttggagatctgcaacctcacggccgatgctctgcagtctgacaagcttcagacctggacagtgtctgtgaacgagggccgctgggtacggggttgctctgccggaggctgccgcaacttcccagatactttctggaccaaccctcagtaccgtctgaagctcctggaggaggacgatgaccctgatgactcggaggtgatttgcagcttcctggtggccctgatgcagaagaaccggcggaaggaccggaagctaggggccagtctcttcaccattggcttcgccatctacgaggttcccaaagagatgcacgggaacaagcagcacctgcagaaggacttcttcctgtacaacgcctccaaggccaggagcaaaacctacatcaacatgcgggaggtgtcccagcgcttccgcctgcctcccagcgagtacgtcatcgtgccctccacctacgagccccaccaggagggggaattcatcctccgggtcttctctgaaaagaggaacctctctgaggaagttgaaaataccatctccgtggatcggccagtgagaaaagaaacttacaagcccatcatcttcgtttcggacagagcaaacagcaacaaggagctgggtgtggaccaggagtcagaggagggcaaaggcaaaacaagccctgataagcaaaagcagtccccacagccacagcctggcagctctgatcaggaaagtgaggaacagcaacaattccggaacattttcaagcagatagcaggagatgacatggagatctgtgcagatgagctcaagaaggtccttaacacagtcgtgaacaaacacaaggacctgaagacacacgggttcacactggagtcctgccgtagcatgattgcgctcatggatacagatggctctggaaagctcaacctgcaggagttccaccacctctggaacaagattaaggcctggcagaaaattttcaaacactatgacacagaccagtccggcaccatcaacagctacgagatgcgaaatgcagtcaacgacgcaggattccacctcaacaaccagctctatgacatcattaccatgcggtacgcagacaaacacatgaacatcgactttgacagtttcatctgctgcttcgttaggctggagggcatgttcagagcttttcatgcatttgacaaggatggagatggtatcatcaagctcaacgttctggagtggctgcagctcaccatgtatgcctgaaccaggctggcctcatccaaagccatgcaggatcactcaggatttcagtttcaccctctatttccaaagccatttacctcaaaggacccagcagctacacccctacaggcttccaggcacctcatcagtcatgctcctcctccattttaccccctacccatccttgatcggtcatgcctagcctgaccctttagtaaagcaatgaggtaggaagaacaaacccttgtccctttgccatgtggaggaaagtgcctgcctctggtccgagccgcctcggttctgaagcgagtgctcctgcttaccttgctctaggctgtctgcagaagcacctgccggtggcactcagcacctccttgtgctagagccctccatcaccttcacgctgtcccaccatgggccaggaaccaaaccagcactgggttctactgctgtggggtaaactaactcagtggaatagggctggttactttgggctgtccaactcataagtttggctgcattttgaaaaaagctgatctaaataaaggcatgtgtatggctggtc

SEQ ID NO: 4342 - DNA, 1271 bp, Homo sapiens
  source 1..1271: mol_type = unassigned DNA
cataatcctgaccctgagccagtgccaggtctccaagtgccttctgaatgaccacaggcgattggttttagtggtaggtgtgtggggatctgttctggtcatctggatgctggtcatcggtgtgcagtattgatcaggacctgcaaacccaaaagcttatgggagctggcacgtcacccacagcctggcagctctgatcaggaaagtgaggaacagcaacaattccggaacattttcaagcagatagcaggagatgacatggagatctgtgcagatgagctcaagaaggtccttaacacagtcgtgaacaaacacaaggacctgaagacacacgggttcacactggagtcctgccgtagcatgattgcgctcatggatacagatggctctggaaagctcaacctgcaggagttccaccacctctggaacaagattaaggcctggcagaaaattttcaaacactatgacacagaccagtccggcaccatcaacagctacgagatgcgaaatgcagtcaacgacgcaggattccacctcaacaaccagctctatgacatcattaccatgcggtacgcagacaaacacatgaacatcgactttgacagtttcatctgctgcttcgttaggctggagggcatgttcagagcttttcatgcatttgacaaggatggagatggtatcatcaagctcaacgttctggagtggctgcagctcaccatgtatgcctgaaccaggctggcctcatccaaagccatgcaggatcactcaggatttcagtttcaccctctatttccaaagccatttacctcaaaggacccagcagctacacccctacaggcttccaggcacctcatcagtcatgctcctcctccattttaccccctacccatccttgatcggtcatgcctagcctgaccctttagtaaagcaatgaggtaggaagaacaaacccttgtccctttgccatgtggaggaaagtgcctgcctctggtccgagccgcctcggttctgaagcgagtgctcctgcttaccttgctctaggctgtctgcagaagcacctgccggtggcactcagcacctccttgtgctagagccctccatcaccttcacgctgtcccaccatgggccaggaaccaaaccagcactgggttctactgctgtggggtaaactaactcagtggaatagggctggttactttgggctgtccaactcataagtttggctgcattttgaaaaaagctgatctaaataaaggcatgtgtatggctgg

SEQ ID NO: 4343 - DNA, 2955 bp, Homo sapiens
  source 1..2955: mol_type = unassigned DNA
atttctcaggagaacttatggcttcagaatcacagctcggtttttaagatggacataacctgtacgaccttctgatgggctttcaactttgaactggatgtggacacttttctctcagatgacagaattactccaacttcccctttgcagttgcttcctttccttgaaggtagctgtatcttattttctttaaaaagctttttcttccaaagccacttgccatgccgaccgtcattagcgcatctgtggctccaaggacagcggctgagccccggtccccagggccagttcctcacccggcccagagcaaggccactgaggctgggggtggaaacccaagtggcatctattcagccatcatcagccgcaattttcctattatcggagtgaaagagaagacattcgagcaacttcacaagaaatgtctagaaaagaaagttctttatgtggaccctgagttcccaccggatgagacctctctcttttatagccagaagttccccatccagttcgtctggaagagacctccggaaatttgcgagaatccccgatttatcattgatggagccaacagaactgacatctgtcaaggagagctaggggactgctggtttctcgcagccattgcctgcctgaccctgaaccagcaccttcttttccgagtcataccccatgatcaaagtttcatcgaaaactacgcagggatcttccacttccagttctggcgctatggagagtgggtggacgtggttatagatgactgcctgccaacgtacaacaatcaactggttttcaccaagtccaaccaccgcaatgagttctggagtgctctgctggagaaggcttatgctaagctccatggttcctacgaagctctgaaaggtgggaacaccacagaggccatggaggacttcacaggaggggtggcagagttttttgagatcagggatgctcctagtgacatgtacaagatcatgaagaaagccatcgagagaggctccctcatgggctgctccattgatacaatcattccggttcagtatgagacaagaatggcctgcgggctggtcagaggtcacgcctactctgtcacggggctggatgaggtcccgttcaaaggtgagaaagtgaagctggtgcggctgcggaatccgtggggccaggtggagtggaacggttcttggagtgatagatggaaggactggagctttgtggacaaagatgagaaggcccgtctgcagcaccaggtcactgaggatggagagttctggatgtcctatgaggatttcatctaccatttcacaaagttggagatctgcaacctcacggccgatgctctgcagtctgacaagcttcagacctggacagtgtctgtgaacgagggccgctgggtacggggttgctctgccggaggctgccgcaacttcccagatactttctggaccaaccctcagtaccgtctgaagctcctggaggaggacgatgaccctgatgactcggaggtgatttgcagcttcctggtggccctgatgcagaagaaccggcggaaggaccggaagctaggggccagtctcttcaccattggcttcgccatctacgaggttcccaaagagatgcacgggaacaagcagcacctgcagaaggacttcttcctgtacaacgcctccaaggccaggagcaaaacctacatcaacatgcgggaggtgtcccagcgcttccgcctgcctcccagcgagtacgtcatcgtgccctccacctacgagccccaccaggagggggaattcatcctccgggtcttctctgaaaagaggaacctctctgaggaagttgaaaataccatctccgtggatcggccagtgccacagcctggcagctctgatcaggaaagtgaggaacagcaacaattccggaacattttcaagcagatagcaggagatgacatggagatctgtgcagatgagctcaagaaggtccttaacacagtcgtgaacaaacacaaggacctgaagacacacgggttcacactggagtcctgccgtagcatgattgcgctcatggatacagatggctctggaaagctcaacctgcaggagttccaccacctctggaacaagattaaggcctggcagaaaattttcaaacactatgacacagaccagtccggcaccatcaacagctacgagatgcgaaatgcagtcaacgacgcaggattccacctcaacaaccagctctatgacatcattaccatgcggtacgcagacaaacacatgaacatcgactttgacagtttcatctgctgcttcgttaggctggagggcatgttcagagcttttcatgcatttgacaaggatggagatggtatcatcaagctcaacgttctggagtggctgcagctcaccatgtatgcctgaaccaggctggcctcatccaaagccatgcaggatcactcaggatttcagtttcaccctctatttccaaagccatttacctcaaaggacccagcagctacacccctacaggcttccaggcacctcatcagtcatgctcctcctccattttaccccctacccatccttgatcggtcatgcctagcctgaccctttagtaaagcaatgaggtaggaagaacaaacccttgtccctttgccatgtggaggaaagtgcctgcctctggtccgagccgcctcggttctgaagcgagtgctcctgcttaccttgctctaggctgtctgcagaagcacctgccggtggcactcagcacctccttgtgctagagccctccatcaccttcacgctgtcccaccatgggccaggaaccaaaccagcactgggttctactgctgtggggtaaactaactcagtggaatagggctggttactttgggctgtccaactcataagtttggctgcattttgaaaaaagctgatctaaataaaggcatgtgtatggctggtc

SEQ ID NO: 4344 - DNA, 3223 bp, Homo sapiens
  source 1..3223: mol_type = unassigned DNA
attccagtgtttcagcgaggtggaagtgtgataccaataaagacaactgtaggaaaatccacaggctggatgactgaatcctcctatggactccgggttgctctaagcactaagggttcttcagtgggtgagttatatcttgatgatggccattcattccaatacctccaccagaagcaatttttgcacaggaagttttcattctgttccagtgttctgatcaatagttttgctgaccagaggggtcattatcccagcaagtgtgtggtggagaagatcttggtcttaggcttcaggaaggagccatcttctgtgactacccactcatctgatggtaaagatcagcctgtggcttttacgtattgtgccaaaacatccatcctgagcctggagaagctctcactcaacattgccactgactgggagggttcctaaaaaagctctaaaatgaatgcatagtgtgtctttccttcaagatgtaaatgtcaaggaatgagttggcaaatcagtttaaaaacacaaactacccaacagaaaaatgaaatttgcgagaatccccgatttatcattgatggagccaacagaactgacatctgtcaaggagagctaggggactgctggtttctcgcagccattgcctgcctgaccctgaaccagcaccttcttttccgagtcataccccatgatcaaagtttcatcgaaaactacgcagggatcttccacttccagttctggcgctatggagagtgggtggacgtggttatagatgactgcctgccaacgtacaacaatcaactggttttcaccaagtccaaccaccgcaatgagttctggagtgctctgctggagaaggcttatgctaagctccatggttcctacgaagctctgaaaggtgggaacaccacagaggccatggaggacttcacaggaggggtggcagagttttttgagatcagggatgctcctagtgacatgtacaagatcatgaagaaagccatcgagagaggctccctcatgggctgctccattgatgatggcacgaacatgacctatggaacctctccttctggtctgaacatgggggagttgattgcacggatggtaaggaatatggataactcactgctccaggactcagacctcgaccccagaggctcagatgaaagaccgacccggacaatcattccggttcagtatgagacaagaatggcctgcgggctggtcagaggtcacgcctactctgtcacggggctggatgaggtcccgttcaaaggtgagaaagtgaagctggtgcggctgcggaatccgtggggccaggtggagtggaacggttcttggagtgatagatggaaggactggagctttgtggacaaagatgagaaggcccgtctgcagcaccaggtcactgaggatggagagttctggatgtcctatgaggatttcatctaccatttcacaaagttggagatctgcaacctcacggccgatgctctgcagtctgacaagcttcagacctggacagtgtctgtgaacgagggccgctgggtacggggttgctctgccggaggctgccgcaacttcccagatactttctggaccaaccctcagtaccgtctgaagctcctggaggaggacgatgaccctgatgactcggaggtgatttgcagcttcctggtggccctgatgcagaagaaccggcggaaggaccggaagctaggggccagtctcttcaccattggcttcgccatctacgaggttcccaaagagatgcacgggaacaagcagcacctgcagaaggacttcttcctgtacaacgcctccaaggccaggagcaaaacctacatcaacatgcgggaggtgtcccagcgcttccgcctgcctcccagcgagtacgtcatcgtgccctccacctacgagccccaccaggagggggaattcatcctccgggtcttctctgaaaagaggaacctctctgaggaagttgaaaataccatctccgtggatcggccagtgcccatcatcttcgtttcggacagagcaaacagcaacaaggagctgggtgtggaccaggagtcagaggagggcaaaggcaaaacaagccctgataagcaaaagcagtccccacagccacagcctggcagctctgatcaggaaagtgaggaacagcaacaattccggaacattttcaagcagatagcaggagatgacatggagatctgtgcagatgagctcaagaaggtccttaacacagtcgtgaacaaacacaaggacctgaagacacacgggttcacactggagtcctgccgtagcatgattgcgctcatggatacagatggctctggaaagctcaacctgcaggagttccaccacctctggaacaagattaaggcctggcagaaaattttcaaacactatgacacagaccagtccggcaccatcaacagctacgagatgcgaaatgcagtcaacgacgcaggattccacctcaacaaccagctctatgacatcattaccatgcggtacgcagacaaacacatgaacatcgactttgacagtttcatctgctgcttcgttaggctggagggcatgttcagagcttttcatgcatttgacaaggatggagatggtatcatcaagctcaacgttctggagtggctgcagctcaccatgtatgcctgaaccaggctggcctcatccaaagccatgcaggatcactcaggatttcagtttcaccctctatttccaaagccatttacctcaaaggacccagcagctacacccctacaggcttccaggcacctcatcagtcatgctcctcctccattttaccccctacccatccttgatcggtcatgcctagcctgaccctttagtaaagcaatgaggtaggaagaacaaacccttgtccctttgccatgtggaggaaagtgcctgcctctggtccgagccgcctcggttctgaagcgagtgctcctgcttaccttgctctaggctgtctgcagaagcacctgccggtggcactcagcacctccttgtgctagagccctccatcaccttcacgctgtcccaccatgggccaggaaccaaaccagcactgggttctactgctgtggggtaaactaactcagtggaatagggctggttactttgggctgtccaactcataagtttggctgcattttgaaaaaagctgatctaaataaaggcatgtgtatggctggtc

SEQ ID NO: 4345 - DNA, 3298 bp, Homo sapiens
  source 1..3298: mol_type = unassigned DNA
cactctctttctctctccctctggcatgcatgctgctggtaggagacccccaagtcaacattgcttcagaaatcctttagcactcatttctcaggagaacttatggcttcagaatcacagctcggtttttaagatggacataacctgtacgaccttctgatgggctttcaactttgaactggatgtggacacttttctctcagatgacagaattactccaacttcccctttgcagttgcttcctttccttgaaggtagctgtatcttattttctttaaaaagctttttcttccaaagccacttgccatgccgaccgtcattagcgcatctgtggctccaaggacagcggctgagccccggtccccagggccagttcctcacccggcccagagcaaggccactgaggctgggggtggaaacccaagtggcatctattcagccatcatcagccgcaattttcctattatcggagtgaaagagaagacattcgagcaacttcacaagaaatgtctagaaaagaaagttctttatgtggaccctgagttcccaccggatgagacctctctcttttatagccagaagttccccatccagttcgtctggaagagacctccggaaatttgcgagaatccccgatttatcattgatggagccaacagaactgacatctgtcaaggagagctaggggactgctggtttctcgcagccattgcctgcctgaccctgaaccagcaccttcttttccgagtcataccccatgatcaaagtttcatcgaaaactacgcagggatcttccacttccagttctggcgctatggagagtgggtggacgtggttatagatgactgcctgccaacgtacaacaatcaactggttttcaccaagtccaaccaccgcaatgagttctggagtgctctgctggagaaggcttatgctaagctccatggttcctacgaagctctgaaaggtgggaacaccacagaggccatggaggacttcacaggaggggtggcagagttttttgagatcagggatgctcctagtgacatgtacaagatcatgaagaaagccatcgagagaggctccctcatgggctgctccattgatgatggcacgaacatgacctatggaacctctccttctggtctgaacatgggggagttgattgcacggatggtaaggaatatggataactcactgctccaggactcagacctcgaccccagaggctcagatgaaagaccgacccggacaatcattccggttcagtatgagacaagaatggcctgcgggctggtcagaggtcacgcctactctgtcacggggctggatgaggtcccgttcaaaggtgagaaagtgaagctggtgcggctgcggaatccgtggggccaggtggagtggaacggttcttggagtgatagatggaaggactggagctttgtggacaaagatgagaaggcccgtctgcagcaccaggtcactgaggatggagagttctggatgtcctatgaggatttcatctaccatttcacaaagttggagatctgcaacctcacggccgatgctctgcagtctgacaagcttcagacctggacagtgtctgtgaacgagggccgctgggtacggggttgctctgccggaggctgccgcaacttcccagatactttctggaccaaccctcagtaccgtctgaagctcctggaggaggacgatgaccctgatgactcggaggtgatttgcagcttcctggtggccctgatgcagaagaaccggcggaaggaccggaagctaggggccagtctcttcaccattggcttcgccatctacgaggttcccaaagagatgcacgggaacaagcagcacctgcagaaggacttcttcctgtacaacgcctccaaggccaggagcaaaacctacatcaacatgcgggaggtgtcccagcgcttccgcctgcctcccagcgagtacgtcatcgtgccctccacctacgagccccaccaggagggggaattcatcctccgggtcttctctgaaaagaggaacctctctgaggaagttgaaaataccatctccgtggatcggccagtgcccatcatcttcgtttcggacagagcaaacagcaacaaggagctgggtgtggaccaggagtcagaggagggcaaaggcaaaacaagccctgataagcaaaagcagtccccacagccacagcctggcagctctgatcaggaaagtgaggaacagcaacaattccggaacattttcaagcagatagcaggagatgacatggagatctgtgcagatgagctcaagaaggtccttaacacagtcgtgaacaaacacaaggacctgaagacacacgggttcacactggagtcctgccgtagcatgattgcgctcatggatacagatggctctggaaagctcaacctgcaggagttccaccacctctggaacaagattaaggcctggcagaaaattttcaaacactatgacacagaccagtccggcaccatcaacagctacgagatgcgaaatgcagtcaacgacgcaggattccacctcaacaaccagctctatgacatcattaccatgcggtacgcagacaaacacatgaacatcgactttgacagtttcatctgctgcttcgttaggctggagggcatgttcagagcttttcatgcatttgacaaggatggagatggtatcatcaagctcaacgttctggagtggctgcagctcaccatgtatgcctgaaccaggctggcctcatccaaagccatgcaggatcactcaggatttcagtttcaccctctatttccaaagccatttacctcaaaggacccagcagctacacccctacaggcttccaggcacctcatcagtcatgctcctcctccattttaccccctacccatccttgatcggtcatgcctagcctgaccctttagtaaagcaatgaggtaggaagaacaaacccttgtccctttgccatgtggaggaaagtgcctgcctctggtccgagccgcctcggttctgaagcgagtgctcctgcttaccttgctctaggctgtctgcagaagcacctgccggtggcactcagcacctccttgtgctagagccctccatcaccttcacgctgtcccaccatgggccaggaaccaaaccagcactgggttctactgctgtggggtaaactaactcagtggaatagggctggttactttgggctgtccaactcataagtttggctgcattttgaaaaaagctgatctaaataaaggcatgtgtatggctggtc

SEQ ID NO: 4346 - DNA, 3316 bp, Homo sapiens
  source 1..3316: mol_type = unassigned DNA
cactctctttctctctccctctggcatgcatgctgctggtaggagacccccaagtcaacattgcttcagaaatcctttagcactcatttctcaggagaacttatggcttcagaatcacagctcggtttttaagatggacataacctgtacgaccttctgatgggctttcaactttgaactggatgtggacacttttctctcagatgacagaattactccaacttcccctttgcagttgcttcctttccttgaaggtagctgtatcttattttctttaaaaagctttttcttccaaagccacttgccatgccgaccgtcattagcgcatctgtggctccaaggacagcggctgagccccggtccccagggccagttcctcacccggcccagagcaaggccactgaggctgggggtggaaacccaagtggcatctattcagccatcatcagccgcaattttcctattatcggagtgaaagagaagacattcgagcaacttcacaagaaatgtctagaaaagaaagttctttatgtggaccctgagttcccaccggatgagacctctctcttttatagccagaagttccccatccagttcgtctggaagagacctccggaaatttgcgagaatccccgatttatcattgatggagccaacagaactgacatctgtcaaggagagctaggggactgctggtttctcgcagccattgcctgcctgaccctgaaccagcaccttcttttccgagtcataccccatgatcaaagtttcatcgaaaactacgcagggatcttccacttccagttctggcgctatggagagtgggtggacgtggttatagatgactgcctgccaacgtacaacaatcaactggttttcaccaagtccaaccaccgcaatgagttctggagtgctctgctggagaaggcttatgctaagctccatggttcctacgaagctctgaaaggtgggaacaccacagaggccatggaggacttcacaggaggggtggcagagttttttgagatcagggatgctcctagtgacatgtacaagatcatgaagaaagccatcgagagaggctccctcatgggctgctccattgatgatggcacgaacatgacctatggaacctctccttctggtctgaacatgggggagttgattgcacggatggtaaggaatatggataactcactgctccaggactcagacctcgaccccagaggctcagatgaaagaccgacccggacaatcattccggttcagtatgagacaagaatggcctgcgggctggtcagaggtcacgcctactctgtcacggggctggatgaggtcccgttcaaaggtgagaaagtgaagctggtgcggctgcggaatccgtggggccaggtggagtggaacggttcttggagtgatagatggaaggactggagctttgtggacaaagatgagaaggcccgtctgcagcaccaggtcactgaggatggagagttctggatgtcctatgaggatttcatctaccatttcacaaagttggagatctgcaacctcacggccgatgctctgcagtctgacaagcttcagacctggacagtgtctgtgaacgagggccgctgggtacggggttgctctgccggaggctgccgcaacttcccagatactttctggaccaaccctcagtaccgtctgaagctcctggaggaggacgatgaccctgatgactcggaggtgatttgcagcttcctggtggccctgatgcagaagaaccggcggaaggaccggaagctaggggccagtctcttcaccattggcttcgccatctacgaggttcccaaagagatgcacgggaacaagcagcacctgcagaaggacttcttcctgtacaacgcctccaaggccaggagcaaaacctacatcaacatgcgggaggtgtcccagcgcttccgcctgcctcccagcgagtacgtcatcgtgccctccacctacgagccccaccaggagggggaattcatcctccgggtcttctctgaaaagaggaacctctctgaggaagttgaaaataccatctccgtggatcggccagtgaaaaagaaaaaaaccaagcccatcatcttcgtttcggacagagcaaacagcaacaaggagctgggtgtggaccaggagtcagaggagggcaaaggcaaaacaagccctgataagcaaaagcagtccccacagccacagcctggcagctctgatcaggaaagtgaggaacagcaacaattccggaacattttcaagcagatagcaggagatgacatggagatctgtgcagatgagctcaagaaggtccttaacacagtcgtgaacaaacacaaggacctgaagacacacgggttcacactggagtcctgccgtagcatgattgcgctcatggatacagatggctctggaaagctcaacctgcaggagttccaccacctctggaacaagattaaggcctggcagaaaattttcaaacactatgacacagaccagtccggcaccatcaacagctacgagatgcgaaatgcagtcaacgacgcaggattccacctcaacaaccagctctatgacatcattaccatgcggtacgcagacaaacacatgaacatcgactttgacagtttcatctgctgcttcgttaggctggagggcatgttcagagcttttcatgcatttgacaaggatggagatggtatcatcaagctcaacgttctggagtggctgcagctcaccatgtatgcctgaaccaggctggcctcatccaaagccatgcaggatcactcaggatttcagtttcaccctctatttccaaagccatttacctcaaaggacccagcagctacacccctacaggcttccaggcacctcatcagtcatgctcctcctccattttaccccctacccatccttgatcggtcatgcctagcctgaccctttagtaaagcaatgaggtaggaagaacaaacccttgtccctttgccatgtggaggaaagtgcctgcctctggtccgagccgcctcggttctgaagcgagtgctcctgcttaccttgctctaggctgtctgcagaagcacctgccggtggcactcagcacctccttgtgctagagccctccatcaccttcacgctgtcccaccatgggccaggaaccaaaccagcactgggttctactgctgtggggtaaactaactcagtggaatagggctggttactttgggctgtccaactcataagtttggctgcattttgaaaaaagctgatctaaataaaggcatgtgtatggctggtc

SEQ ID NO: 4347 - DNA, 1643 bp, Homo sapiens
  source 1..1643: mol_type = unassigned DNA
ccctcctccacgcttacagccacacacacagtcacacagacgcgttctgagggtggctgcccgcttgggatggaggaatcacttccctcagaacccagccaagtcctctaggcctccttgggggtccttccagcctgaggggcttcggagctgaggagcagctgttctgatgcacgggaacaagcagcacctgcagaaggacttcttcctgtacaacgcctccaaggccaggagcaaaacctacatcaacatgcgggaggtgtcccagcgcttccgcctgcctcccagcgagtacgtcatcgtgccctccacctacgagccccaccaggagggggaattcatcctccgggtcttctctgaaaagaggaacctctctgaggaagttgaaaataccatctccgtggatcggccagtgaaaaagaaaaaaaccaagcccatcatcttcgtttcggacagagcaaacagcaacaaggagctgggtgtggaccaggagtcagaggagggcaaaggcaaaacaagccctgataagcaaaagcagtccccacagccacagcctggcagctctgatcaggaaagtgaggaacagcaacaattccggaacattttcaagcagatagcaggagatgacatggagatctgtgcagatgagctcaagaaggtccttaacacagtcgtgaacaaacacaaggacctgaagacacacgggttcacactggagtcctgccgtagcatgattgcgctcatggatacagatggctctggaaagctcaacctgcaggagttccaccacctctggaacaagattaaggcctggcagaaaattttcaaacactatgacacagaccagtccggcaccatcaacagctacgagatgcgaaatgcagtcaacgacgcaggattccacctcaacaaccagctctatgacatcattaccatgcggtacgcagacaaacacatgaacatcgactttgacagtttcatctgctgcttcgttaggctggagggcatgttcagagcttttcatgcatttgacaaggatggagatggtatcatcaagctcaacgttctggagtggctgcagctcaccatgtatgcctgaaccaggctggcctcatccaaagccatgcaggatcactcaggatttcagtttcaccctctatttccaaagccatttacctcaaaggacccagcagctacacccctacaggcttccaggcacctcatcagtcatgctcctcctccattttaccccctacccatccttgatcggtcatgcctagcctgaccctttagtaaagcaatgaggtaggaagaacaaacccttgtccctttgccatgtggaggaaagtgcctgcctctggtccgagccgcctcggttctgaagcgagtgctcctgcttaccttgctctaggctgtctgcagaagcacctgccggtggcactcagcacctccttgtgctagagccctccatcaccttcacgctgtcccaccatgggccaggaaccaaaccagcactgggttctactgctgtggggtaaactaactcagtggaatagggctggttactttgggctgtccaactcataagtttggctgcattttgaaaaaagctgatctaaataaaggcatgtgtatggctggtc

SEQ ID NO: 4348 - DNA, 1291 bp, Homo sapiens
  source 1..1291: mol_type = unassigned DNA
cataatcctgaccctgagccagtgccaggtctccaagtgccttctgaatgaccacaggcgattggttttagtggtaggtgtgtggggatctgttctggtcatctggatgctggtcatcggtgtgcagtattgatcaggacctgcaaacccaaaagcttatgggagctggcacgtcacaaaaagaaaaaaaccaagccacagcctggcagctctgatcaggaaagtgaggaacagcaacaattccggaacattttcaagcagatagcaggagatgacatggagatctgtgcagatgagctcaagaaggtccttaacacagtcgtgaacaaacacaaggacctgaagacacacgggttcacactggagtcctgccgtagcatgattgcgctcatggatacagatggctctggaaagctcaacctgcaggagttccaccacctctggaacaagattaaggcctggcagaaaattttcaaacactatgacacagaccagtccggcaccatcaacagctacgagatgcgaaatgcagtcaacgacgcaggattccacctcaacaaccagctctatgacatcattaccatgcggtacgcagacaaacacatgaacatcgactttgacagtttcatctgctgcttcgttaggctggagggcatgttcagagcttttcatgcatttgacaaggatggagatggtatcatcaagctcaacgttctggagtggctgcagctcaccatgtatgcctgaaccaggctggcctcatccaaagccatgcaggatcactcaggatttcagtttcaccctctatttccaaagccatttacctcaaaggacccagcagctacacccctacaggcttccaggcacctcatcagtcatgctcctcctccattttaccccctacccatccttgatcggtcatgcctagcctgaccctttagtaaagcaatgaggtaggaagaacaaacccttgtccctttgccatgtggaggaaagtgcctgcctctggtccgagccgcctcggttctgaagcgagtgctcctgcttaccttgctctaggctgtctgcagaagcacctgccggtggcactcagcacctccttgtgctagagccctccatcaccttcacgctgtcccaccatgggccaggaaccaaaccagcactgggttctactgctgtggggtaaactaactcagtggaatagggctggttactttgggctgtccaactcataagtttggctgcattttgaaaaaagctgatctaaataaaggcatgtgtatggctggtc

SEQ ID NO: 4349 - DNA, 4397 bp, Homo sapiens
  source 1..4397: mol_type = unassigned DNA
gaatgcgagcgccagcccccgccgcaggccagtcccagctggatctccggccagagcccgaggctgctgcgccgggcggctgcagcctccgctccagcgcccgcgccgtgccctgcatcccgggagcccggctggacccgcggcggctcggccggtgttccccctcccctccctggggcagcagccaccatgttctcgtgtgtgaagccctatgaggaccagaactactcagccctgaggcgggactgccggcgcaggaaggtgctcttcgaggaccccctcttccccgccactgacgactcactctactataagggcacgccggggcccgccgtcaggtggaagcgacccaagggcatctgcgaggacccccgcctctttgtggatggcatcagctcccacgacctgcaccagggccaggtgggcaactgctggtttgtggcagcctgctcgtcacttgcctcccgggagtcgctgtggcaaaaggtcatcccagactggaaggagcaggaatgggaccccgaaaagcccaacgcctacgcgggcatcttccacttccacttctggcgcttcggggaatgggtggacgtggtcatcgatgaccggctgcccacagtcaacaaccagctcatctactgccactccaactcccgcaatgagttttggtgcgccctagtggagaaggcctatgccaaactggcaggctgttaccaggccctggatggaggcaacacagcagacgcactggtggacttcacgggtggtgtttctgagcccatcgacctgaccgagggtgactttgccaacgatgagactaagaggaaccagctctttgagcgcatgttaaaggtgcacagccggggcggcctcatcagtgcctccatcaaggcagtgacagcagctgacatggaggcccgcctggcgtgcggcctggtaaagggccacgcatacgccgtcactgatgtgcgcaaggtgcgcctgggccacggcctactggccttcttcaagtcagagaagttggacatgatccgcctgcgcaacccctggggcgagcgggagtggaacgggccctggagtgacacctcggaggagtggcagaaagtgagcaagagtgagcgggagaagatgggtgtgaccgtgcaggacgacggtgagttctggatgaccttcgaggacgtgtgccggtacttcacggacatcatcaagtgccgcgtgatcaacacatcccacctgagcatccacaagacgtgggaggaggcccggctgcatggcgcctggacgctgcatgaggacccgcgacagaaccgcggtggcggctgcatcaaccacaaggacaccttcttccagaacccacagtacatcttcgaagtcaagaagccagaagatgaagtcctgatctgcatccagcagcggccaaagcggtctacgcgccgggagggcaagggtgagaacctggccattggctttgacatctacaaggtggaggagaaccgccagtaccgcatgcacagcctgcagcacaaggccgccagctccatctacatcaactcacgcagcgtcttcctgcgcaccgaccagcccgagggccgctatgtcatcatccccacaaccttcgagccaggccacactggcgagttcctgctccgagtcttcactgatgtgccctccaactgccgggagctgcgcctggatgagcccccacacacctgctggagctccctctgtggctacccccagctggtgacccaggtacatgtcctgggagctgctggcctcaaggactccccaacaggggctaactcttatgtgatcatcaagtgtgagggagacaaagtccgctcggctgtgcagaagggcacctccacaccagagtacaatgtgaaaggcatcttctaccgcaagaagctgagccagcccatcactgtacaggtctggaaccaccgagtgctgaaggatgaatttctgggccaggtgcacctaaaggctgacccggacaacctccaggccctgcataccctccacctccgggaccgaaatagccggcagcccagcaacctgccaggcactgtggccgtgcacattctcagcagcacctccctcatggctgtctgacacctgcccacctacctggctctgaccgttcccaccaccatctgcatgtccccactgggcctgagtctagcctgggagccaggatactggggtccttttcccactcttccactgacttgctgtgtgaccttaggaagtctctgcccctctctcagcctcagtgtcccgagggccccgaagcattccattctcgtggaggagtttccttgctgagatttcaaatagtcctccccacctcaactgtcaccactgctaagggactctatccattgagcacattttcctaaggccctgctgtctgccgaggagcgccaagaagatgtcacttgtttacacacgaactgccacatccccaagctccgttcttgcccctcgtgtcctaggcccaacccagcctcccagacctcactttccccatcagcaatacctggtgttctcccaccttgaaaggactcttggctcctgccgggttcctgctcaggctggaattgggaaaatatgcaggtgacatttgttcattctctaatcccatcctctcacccatccatttcctcactcagtggagatttgccaaatgaataaacgacacctttgaggccccaggtgaagcggggccctactccggcctctgccttgggcctcgcctctgtcctcaggtcctctcagaggcagatacctaggggagctgctgctgcctgctcattctagcttccgattccattcccagcccctgcgttaaggtccctggagaggtggcgtcagtgggggtgaggaagggcatcttcctgactcctctgcccagtgctggaaggagcatgcctgggttagtgggccaggggccaggcagctgggggcctttggggaccagaaggggagatgtgctcccagagcctctctgctgtaagaccccagcttttcctggaagatgggactctggggtgtgtggtgctcaccagagtcaggccacccactgggctcggcaggagatagggagccccatcacctgaccacagccccccaccaacattcccccaaaatgcagcctaggaggccgcagtgctcttcttcctgcccagaccaaaatgttccttttagtcctcaatgttttatattctttttgttttgaaaatctcaattttaatcaggggttttaaaagaaaattgaaagcctgaacctccatttttcttcttggctccagttttgctggtcctctggagaactcttcgtgagcactggtgccgtgacccacttgggatctctgctgtgcccttctcgggcttccagaccaggtgtagcaaatgaaaaagtgcagttaattcaagaacaggaatccctgtgtccttgctgggatttccttttgggaacctgactttccgactccagatcctgctgtctggatcagtgttctggctggaggtgctggattctctgattttgcctcctcactctgtgtctggctttgctcctgggtcttggccctgggccatatgaggggccaggaaatgaacgacaaggaggataagagtgttctttcttgaaagccgggacttcccctcaagaacctgggcctggggccgggactctgcatgactgggagcaagtcacttaaacctcctgtgcctcgatttcccccttctacaaagtggggccaatgattcttgtgtgtcagcactgttactaccgagtgctgagtaagggcaaaataatacccctttctctatgtatctctgtatgcacacgcactatatatatatatatatatatatatacattcatgtaatcaccacttctcgatgtctatttcaaatcaaggctcctgagtagggggtgaagtgagccagcttgcacctcaggctaacacataggactttgctcagccatgtcccctgggatacaggggcacaccaggaccaagtggcagacctgtgggcttcagcctcggggccggggcatgcctgccaccccctgacaaaaacaggttccacagtgctacccttgcttcctgccccttgaggtgggccaggctggctcctggctatgcagggatctctggtccccaggagaccttgggggccaggcaggtaaggatcaggggtgataggggagagcaattactttgttcactgtatgcacccgcgggggcctgggagtccccatttgcaggtgggtagggcctccagcccacaccacccagacctaggcttccctcttctcaggatccaccacagggttaggggacaggaagcctgttctattctcaataaatcttacaaaattccaaaaa

SEQ ID NO: 4350 - DNA, 3397 bp, Homo sapiens
  source 1..3397: mol_type = unassigned DNA
agtcccagctggatctccggccagagcccgaggctgctgcgccgggcggctgcagcctccgctccagcgcccgcgccgtgccctgcatcccgggagcccggctggacccgcggcggctcggccggttgtctctccggtggggagtgagcgagcacacagcccccaccccaccccgggtgagagagaatgtcctgcacagggacgcccagctgtatctacctgctgtcagcactttctctgcaggacctggtgctggactgggagccccgaggtgttccccctcccctccctggggcagcagccaccatgttctcgtgtgtgaagccctatgaggaccagaactactcagccctgaggcgggactgccggcgcaggaaggtgctcttcgaggaccccctcttccccgccactgacgactcactctactataagggcacgccggggcccgccgtcaggtggaagcgacccaagggcatctgcgaggacccccgcctctttgtggatggcatcagctcccacgacctgcaccagggccaggtgggcaactgctggtttgtggcagcctgctcgtcacttgcctcccgggagtcgctgtggcaaaaggtcatcccagactggaaggagcaggaatgggaccccgaaaagcccaacgcctacgcgggcatcttccacttccacttctggcgcttcggggaatgggtggacgtggtcatcgatgaccggctgcccacagtcaacaaccagctcatctactgccactccaactcccgcaatgagttttggtgcgccctagtggagaaggcctatgccaaactggcaggctgttaccaggccctggatggaggcaacacagcagacgcactggtggacttcacgggtggtgtttctgagcccatcgacctgaccgagggtgactttgccaacgatgagactaagaggaaccagctctttgagcgcatgttaaaggtgcacagccggggcggcctcatcagtgcctccatcaaggcagtgacagcagctgacatggaggcccgcctggcgtgcggcctggtaaagggccacgcatacgccgtcactgatgtgcgcaaggtgcgcctgggccacggcctactggccttcttcaagtcagagaagttggacatgatccgcctgcgcaacccctggggcgagcgggagtggaacgggccctggagtgacacctcggaggagtggcagaaagtgagcaagagtgagcgggagaagatgggtgtgaccgtgcaggacgacggtgagttctggatgaccttcgaggacgtgtgccggtacttcacggacatcatcaagtgccgcgtgatcaacacatcccacctgagcatccacaagacgtgggaggaggcccggctgcatggcgcctggacgctgcatgaggacccgcgacagaaccgcggtggcggctgcatcaaccacaaggacaccttcttccagaacccacagtacatcttcgaagtcaagaagccagaagatgaagtcctgatctgcatccagcagcggccaaagcggtctacgcgccgggagggcaagggtgagaacctggccattggctttgacatctacaaggtggaggagaaccgccagtaccgcatgcacagcctgcagcacaaggccgccagctccatctacatcaactcacgcagcgtcttcctgcgcaccgaccagcccgagggccgctatgtcatcatccccacaaccttcgagccaggccacactggcgagttcctgctccgagtcttcactgatgtgccctccaactgccgggagctgcgcctggatgagcccccacacacctgctggagctccctctgtggctacccccagctggtgacccaggtacatgtcctgggagctgctggcctcaaggactccccaacaggggctaactcttatgtgatcatcaagtgtgagggagacaaagtccgctcggctgtgcagaagggcacctccacaccagagtacaatgtgaaaggcatcttctaccgcaagaagctgagccagcccatcactgtacaggtctggaaccaccgagtgctgaaggatgaatttctgggccaggtgcacctaaaggctgacccggacaacctccaggccctgcataccctccacctccgggaccgaaatagccggcagcccagcaacctgccaggcactgtggccgtgcacattctcagcagcacctccctcatggctgtctgacacctgcccacctacctggctctgaccgttcccaccaccatctgcatgtccccactgggcctgagtctagcctgggagccaggatactggggtccttttcccactcttccactgacttgctgtgtgaccttaggaagtctctgcccctctctcagcctcagtgtcccgagggccccgaagcattccattctcgtggaggagtttccttgctgagatttcaaatagtcctccccacctcaactgtcaccactgctaagggactctatccattgagcacattttcctaaggccctgctgtctgccgaggagcgccaagaagatgtcacttgtttacacacgaactgccacatccccaagctccgttcttgcccctcgtgtcctaggcccaacccagcctcccagacctcactttccccatcagcaatacctggtgttctcccaccttgaaaggactcttggctcctgccgggttcctgctcaggctggaattgggaaaatatgcaggtgacatttgttcattctctaatcccatcctctcacccatccatttcctcactcagtggagatttgccaaatgaataaacgacacctttgaggccccaggtgaagcggggccctactccggcctctgccttgggcctcgcctctgtcctcaggtcctctcagaggcagatacctaggggagctgctgctgcctgctcattctagcttccgattccattcccagcccctgcgttaaggtccctggagaggtggcgtcagtgggggtgaggaagggcatcttcctgactcctctgcccagtgctggaaggagcatgcctgggttagtgggccaggggccaggcagctgggggcctttggggaccagaaggggagatgtgctcccagagcctctctgctgtaagaccccagcttttcctggaagatgggactctggggtgtgtggtgctcaccagagtcaggccacccactgggctcggcaggagataggggagagcaattactttgttcactgtatgcacccgcgggggcctgggagtccccatttgcaggtgggtagggcctccagcccacaccacccagacctaggcttccctcttctcaggatccaccacagggttaggggacaggaagcctgttctattctcaataaatcttacaaaattcc

SEQ ID NO: 4351 - DNA, 597 bp, Homo sapiens
  source 1..597: mol_type = unassigned DNA
agtcccagctggatctccggccagagcccgaggctgctgcgccgggcggctgcagcctccgctccagcgcccgcgccgtgccctgcatcccgggagcccggctggacccgcggcggctcggccggttgtctctccggtggggagtgagcgagcacacagcccccaccccaccccgggtgagagagaatgtcctgcacagggacgcccagctgtatctacctgctgtcagcactttctctgcaggacctggtgctggactgggagccccgaggtgttccccctcccctccctggggcagcagccaccatgttctcgtgtgtgaagccctatgaggaccagaactactcagccctgaggcgggactgccggcgcaggaaggtgctcttcgaggaccccctcttccccgccactgacgactcactctactataagggcacgccggggcccgccgtcaggtggaagcgacccaagggcatctgcgaggacccccgcctctttgtggatggcatcagctcccacgacctgcaccagggccaggtgggcaactgctggtttgtggcagcctgctcgtcacttgcctcccgggagtcgctgtgg

SEQ ID NO: 4352 - DNA, 2333 bp, Homo sapiens
  source 1..2333: mol_type = unassigned DNA
agctggatctccggccagagcccgaggctgctgcgccgggcggctgcagcctccgctccagcgcccgcgccgtgccctgcatcccgggagcccggctggacccgcggcggctcggccgatgagaattctgaagcacaaagaggttaactgctttgcacctcgctggcctcagtctccccatctgaggacgggtgttccccctcccctccctggggcagcagccaccatgttctcgtgtgtgaagccctatgaggaccagaactactcagccctgaggcgggactgccggcgcaggaaggtgctcttcgaggaccccctcttccccgccactgacgactcactctactataagggcacgccggggcccgccgtcaggtggaagcgacccaagggcatctgcgaggacccccgcctctttgtggatggcatcagctcccacgacctgcaccagggccaggtgggcaactgctggtttgtggcagcctgctcgtcacttgcctcccgggagtcgctgtggcaaaaggtcatcccagactggaaggagcaggaatgggaccccgaaaagcccaacgcctacgcgggcatcttccacttccacttctggcgcttcggggaatgggtggacgtggtcatcgatgaccggctgcccacagtcaacaaccagctcatctactgccactccaactcccgcaatgagttttggtgcgccctagtggagaaggcctatgccaaactggcaggctgttaccaggccctggatggaggcaacacagcagacgcactggtggacttcacgggtggtgtttctgagcccatcgacctgaccgagggtgactttgccaacgatgagactaagaggaaccagctctttgagcgcatgttaaaggtgcacagccggggcggcctcatcagtgcctccatcaaggcagtgacagcagctgacatggaggcccgcctggcgtgcggcctggtaaagggccacgcatacgccgtcactgatgtgcgcaaggtgcgcctgggccacggcctactggccttcttcaagtcagagaagttggacatgatccgcctgcgcaacccctggggcgagcgggagtggaacgggccctggagtgacacctcggaggagtggcagaaagtgagcaagagtgagcgggagaagatgggtgtgaccgtgcaggacgacggtgagttctggatgaccttcgaggacgtgtgccggtacttcacggacatcatcaagtgccgcgtgatcaacacatcccacctgagcatccacaagacgtgggaggaggcccggctgcatggcgcctggacgctgcatgaggacccgcgacagaaccgcggtggcggctgcatcaaccacaaggacaccttcttccagaacccacagtacatcttcgaagtcaagaagccagaagatgaagtcctgatctgcatccagcagcggccaaagcggtctacgcgccgggagggcaagggtgagaacctggccattggctttgacatctacaaggtggaggagaaccgccagtaccgcatgcacagcctgcagcacaaggccgccagctccatctacatcaactcacgcagcgtcttcctgcgcaccgaccagcccgagggccgctatgtcatcatccccacaaccttcgagccaggccacactggcgagttcctgctccgagtcttcactgatgtgccctccaactgccgggagctgcgcctggatgagcccccacacacctgctggagctccctctgtggctacccccagctggtgacccaggtacatgtcctgggagctgctggcctcaaggactccccaacaggggctaactcttatgtgatcatcaagtgtgagggagacaaagtccgctcggctgtgcagaagggcacctccacaccagagtacaatgtgaaaggcatcttctaccgcaagaagctgagccagcccatcactgtacaggtctggaaccaccgagtgctgaaggatgaatttctgggccaggtgcacctaaaggctgacccggacaacctccaggccctgcataccctccacctccgggaccgaaatagccggcagcccagcaacctgccaggcactgtggccgtgcacattctcagcagcacctccctcatggctgtctgacacctgcccacctacctggctctgaccgttcccaccaccatctgcatgtccccactgggcctgagtctagcctgggagccaggatactggggtccttttcccactcttccactgacttgctgtgtgaccttaggaagtctctgcccctctctcagcctcagtgtcccgagggccccgaagcatt

SEQ ID NO: 4353 - DNA, 2804 bp, Homo sapiens
  source 1..2804: mol_type = unassigned DNA
agagcccgaggctgctgcgccgggcggctgcagcctccgctccagcgcccgcgccgtgccctgcatcccgggagcccggctggacccgcggcggctcggccggtgttccccctcccctccctggggcagcagccaccatgttctcgtgtgtgaagccctatgaggaccagaactactcagccctgaggcgggactgccggcgcaggaaggtgctcttcgaggaccccctcttccccgccactgacgactcactctactataagggcacgccggggcccgccgtcaggtggaagcgacccaagtacagtggccattcgctggcccctcacaggcctggctggggagatgcacggagaatggagaatgtccccaggcctgggagctcagggtgtccgtcctcctcgctcagggcccgggacctgggcatctgcgaggacccccgcctctttgtggatggcatcagctcccacgacctgcaccagggccaggtgggcaactgctggtttgtggcagcctgctcgtcacttgcctcccgggagtcgctgtggcaaaaggtcatcccagactggaaggagcaggaatgggaccccgaaaagcccaacgcctacgcgggcatcttccacttccacttctggcgcttcggggaatgggtggacgtggtcatcgatgaccggctgcccacagtcaacaaccagctcatctactgccactccaactcccgcaatgagttttggtgcgccctagtggagaaggcctatgccaaactggcaggctgttaccaggccctggatggaggcaacacagcagacgcactggtggacttcacgggtggtgtttctgagcccatcgacctgaccgagggtgactttgccaacgatgagactaagaggaaccagctctttgagcgcatgttaaaggtgcacagccggggcggcctcatcagtgcctccatcaaggcagtgacagcagctgacatggaggcccgcctggcgtgcggcctggtaaagggccacgcatacgccgtcactgatgtgcgcaaggtgcgcctgggccacggcctactggccttcttcaagtcagagaagttggacatgatccgcctgcgcaacccctggggcgagcgggagtggaacgggccctggagtgacacctcggaggagtggcagaaagtgagcaagagtgagcgggagaagatgggtgtgaccgtgcaggacgacggtgagttctggatgaccttcgaggacgtgtgccggtacttcacggacatcatcaagtgccgcgtgatcaacacatcccacctgagcatccacaagacgtgggaggaggcccggctgcatggcgcctggacgctgcatgaggacccgcgacagaaccgcggtggcggctgcatcaaccacaaggacaccttcttccagaacccacagtacatcttcgaagtcaagaagccagaagatgaagtcctgatctgcatccagcagcggccaaagcggtctacgcgccgggagggcaagggtgagaacctggccattggctttgacatctacaaggtggaggagaaccgccagtaccgcatgcacagcctgcagcacaaggccgccagctccatctacatcaactcacgcagcgtcttcctgcgcaccgaccagcccgagggccgctatgtcatcatccccacaaccttcgagccaggccacactggcgagttcctgctccgagtcttcactgatgtgccctccaactgccgggagctgcgcctggatgagcccccacacacctgctggagctccctctgtggctacccccagtggtgacccaggtacatgtcctgggagctgctggcctcaaggactccccaacaggggctaactcttatgtgatcatcaagtgtgagggagacaaagtccgctcggctgtgcagaagggcacctccacaccagagtacaatgtgaaaggcatcttctaccgcaagaagctgagccagcccatcactgtacaggtctggaaccaccgagtgctgaaggatgaatttctgggccaggtgcacctaaaggctgacccggacaacctccaggccctgcataccctccacctccgggaccgaaatagccggcagcccagcaacctgccaggcactgtggccgtgcacattctcagcagcacctccctcatggctgtctgacacctgcccacctacctggctctgaccgttcccaccaccatctgcatgtccccactgggcctgagtctagcctgggagccaggatactggggtccttttcccactcttccactgacttgctgtgtgaccttaggaagtctctgcccctctctcagcctcagtgtcccgagggccccgaagcattccattctcgtggaggagtttccttgctgagatttcaaatagtcctccccacctcaactgtcaccactgctaagggactctatccattgagcacattttcctaaggccctgctgtctgccgaggagcgccaagaagatgtcacttgtttacacacgaactgccacatccccaagctccgttcttgcccctcgtgtcctaggcccaacccagcctcccagacctcactttccccatcagcaatacctggtgttctcccaccttgaaaggactcttggctcctgccgggttcctgctcaggctggaattgggaaaatatgcaggtgacatttgttcattctctaatcccatcctctcacccatccatttcctcactcagtggagatttgccaaatgaataaacgacacctttgaggccccaggtgaagcggggccctactccgg

SEQ ID NO: 4354 - DNA, 4353 bp, Homo sapiens
  source 1..4353: mol_type = unassigned DNA
ggcgagggccgctggggccgcgaagtggggcggccgggtgggctacaagccgggtctgggctgaggggcgcggcttcgcggtggaccccagcccggcaacgggaaggcgagctctcctccaccgtccaaagtaaactttgccgctccttccgcggcgctcccgagtcctcgccgccgccgggccgccgcagtccgcgaagagccgtcctgcgtcagggcctccttccctgccccggcgcggggccactgcgccatggacgccacagcactggagcgggacgctgtgcagttcgcccgtctggcggttcagcgcgaccacgaaggccgctactccgaggcggtgttttattacaaggaagctgcacaagccttaatttatgctgagatggcaggatcaagcctagaaaatattcaagaaaaaataactgagtatctggaaagagttcaagctctacattcagcagttcagtcaaagagtgctgatcctttgaagtcaaaacatcagttggacttagagcgtgctcatttccttgttacacaagcttttgatgaagatgaaaaagagaatgttgaagatgctatagaattgtacacagaagctgtggatctctgtctgaaaacatcttatgaaactgctgataaagtcctgcaaaataaactgaaacagttggctcgacaggcactagacagagcagaagcgctgagtgagcctttgaccaagccagttggcaaaatcagttcaacaagtgttaagccaaagccacctccagtgagagcacattttccactgggcgctaatcccttccttgaaagacctcagtcatttataagtcctcagtcatgtgatgcacaaggacagagatacacagcagaagaaatagaagtactcaggacaacatcaaaaataaatggtatagaatatgttcctttcatgaatgttgacctgagagaacgttttgcctatccaatgcctttctgtgatagatggggcaagctaccattatcacctaaacaaaaaactacattttccaagtgggtacgaccagaagacctcaccaacaatcctacaatgatatatactgtgtccagttttagcataaagcagacaatagtatcggattgctcctttgtggcatcactggccatcagtgcagcttatgaaagacgttttaataagaagttaattaccggcataatttaccctcaaaacaaggatggtgaaccagaatacaatccatgtgggaagtatatggtaaaacttcacctcaatggtgtcccaagaaaggtgataattgatgaccagttacctgttgatcacaagggagaattgctctgttcttattccaacaacaaaagtgaattatgggtttctctcatagaaaaagcatacatgaaagtcatgggaggatatgattttccaggatccaactccaatattgatcttcatgcactgactggctggataccagaaagaattgctatgcattcagatagccaaactttcagtaaggataattctttcagaatgctttatcaaagatttcacaaaggagatgtcctcatcactgcgtcaactggaatgatgacagaagctgaaggagagaagtggggtctggttcccacacacgcatatgctgttttggatattagagagttcaaggggctgcgatttatccagttgaaaaatccttggagtcatttacgttggaaaggaagatacagtgaaaatgatgtaaaaaactggactccagagttgcaaaagtatttaaactttgatccccgaacagctcagaaaatagacaacggaatattttggatttcctgggatgatctctgccagtattatgatgtgatttatttgagttggaatccaggtctttttaaagaatcaacatgtattcacagtacttgggatgctaagcaaggacctgtgaaagatgcctatagcctggccaacaacccccagtacaaactggaggtgcagtgtccacaggggggtgctgcagtttgggttttgcttagtagacacataacagacaaggatgattttgcgaataatcgagaatttatcacaatggttgtatacaagactgatgggaaaaaagtttattacccagctgacccacctccatacattgatggaattcgaattaacagccctcattatttgactaagataaagctgaccacacctggcacccatacctttacattagtggtttctcaatatgaaaaacagaacacaatccattacacggttcgggtatattcagcatgcagctttactttttcaaagattccttcaccatacaccttatcaaaacggattaatggaaagtggagtggtcagagtgctggaggatgtggaaatttccaagagactcacaaaaataaccccatctaccaattccatatagaaaagactgggccgttactgattgagctacgaggaccaaggcaatatagcgttggatttgaggttgtaacagtttctactctaggagatcctggtccccatggctttctgaggaaatctagtggtgactataggtgtgggttttgctacctggaattagaaaatataccttctgggatcttcaatatcattcctagtacctttttgcctaaacaagaaggaccttttttcttggactttaatagtattatccccatcaagatcacacaacttcagtgatggagaaatctcaagttactggcttttatacttaccaaacatcagttcttcaaataaggacgcaaatcttcaggacagtaagcagaacaatcagaatggaattaaatctctaaaaacgtgttacagtggaatctggtgcttgtcagggtgtttggtaagaactgtatatagtcagaattacctaaatcacctagaggtaccgtttacatggttttgtgtatatagagttggcttgcattttaggggccattttgtataaaaagtgcatatgattaaaattagactcagtcatcactgtgagatgcctttgctaagaggataaaggaactgagaccagatgagaaaaagaaaggatatagattccttgagtggaatagtgggctagattaatataccgaaatatttccattgtttcccttttttgcagagcatgtggaagttaaacctgcttgattctactatacatcttgggcaactagttaccaaatgaattgtgccaccataactgattttaattttgcattatttatgattttaaaatatttgttgcccaggtgttatgaaagaataaagcttttaagtatagactaccttagcatgaagatgctcatgcctaagaatgaaaattgttgaggttatctcccattcaatcatgtagcaagaacttaaagaaattcactactgcagtttttatttttaaaaaacagtaattgagatattgaagacattacaatttagtttgtgtggtctttttttaaattgctgtatcgttcagtctcttgtggcaatagcactttgaagaaaatagagaatttaatatatggtgattgggatatgtagcattcaaaaaaagtgaattgccaagatactggtgtcatgtaaattcccactttacataaaaacccatcaggacagaatgatgctcaatattttaaaattctaaaaatagggtgggatttttcattgtctctactttataattatcaaaacttattttgtattgctactaccttaaattgaaataaaatgtttatacttacggatattgcatagtttaagttagatttattgaaagatttcatctgtcgtgtttcatgtaaatgagaacagattatttgcatgaaaatatatacttcaacaaaaatctgttctttaacagagtagtggtagattattacactaatgagatttcactttggtaaatacttcatgctttcagttttagcctattaattttaggtggacaaatttaacaagttttctgttactttttaaaaagaaaaaatccagaacataagaactatattatgaacacatgatttgaacctgttgtggtaaagatcttgtacaggatgcaaactaaaaacctaatccctgccatcaaatttattagaagagacctatatatgaacaacttaaaggcactgatttctataatagagctctaaaaacatgccaccagtgtatgaataagggaaagattaattttggctggaccaatataaaaaattgtatttgaagaattgatactttaacttggaccttgaaggtaaagcttcaaaagacaggttactgaccattgagtgtttactatgtacccaatgtgtatatttttctttttaatcttcccaatagctgaataaagtatagatactatt

SEQ ID NO: 4355 - DNA, 2362 bp, Homo sapiens
  source 1..2362: mol_type = unassigned DNA
actcagcccagtggccctctgagctgttccttcttgaccggcacacacagctcgcttcttcactttcttttccatccactgccggacccaagccagccttccagggagcagccatgccttacctctaccgggccccagggcctcaggcacacccggttcccaaggacgcccggatcacccactcctcaggccagagctttgagcaaatgaggcaggagtgcctgcagagaggcaccctgtttgaggatgcagacttcccagccagcaattcctccctgttctacagtgagaggccgcagatcccctttgtgtggaaacgaccaggggaaatcgtgaaaaacccagaattcattcttggaggggccaccaggactgatatctgccagggagagctgggagactgctggctattagccgccatcgcctcccttacgcttaatcaaaaagcactggccagagtcatcccccaggaccaaagctttggccctggttatgccgggatattccatttccagttctggcagcacagtgagtggctggacgtggtgatcgatgaccgcctgcccaccttcagggaccgcttggttttcctccactctgccgaccacaacgagttctggagcgccttgctggaaaaagcctacgccaagctaaatgggagctatgaagctctgaagggaggcagcgccatcgaggccatggaagacttcactgggggtgtggcagagaccttccaaactaaagaggcccccgagaacttctatgagattctagagaaggctttgaagagaggctccctgctgggctgcttcattgataccagaagtgctgcagaatctgaggcccggacgccgtttggtcttattaagggtcatgcctacagtgtaacgggaattgaccaggtaagcttccgaggccagagaatcgagctcatccgaatccggaacccttggggccaggttgagtggaacgggtcgtggagcgacagttctccggagtggcgttctgttggtccagctgagcagaagcgtctgtgtcacactgctctggatgatggggaattctggatggcatttaaggacttcaaggcccactttgataaagtggagatctgcaacctcactcccgatgccctggaggaagacgcgatccacaaatgggaggtgacggtccatcagggaagctgggttcgcggctccacggctgggggctgccgcaatttcctggataccttttggaccaatccacaaataaaattgtctctgactgagaaagatgaggggcaggaggagtgtagtttccttgtagccctgatgcagaaagatagaaggaaactcaagagatttggtgccaatgtgctgacaatcggctatgccatttatgagtgccctgacaaagacgaacacctgaacaaagacttcttcagataccacgcttctcgggccagaagcaagacgttcatcaacctgagagaagtctccgaccggttcaagctgccccctggggagtacatcctgattcccagcacttttgagccccaccaggaagctgatttctgtctgagaatcttttcagagaaaaaagccattacccgggatatggatggaaatgtagacattgaccttcctgagcctccaaagccaactccacctgaccaggagacagaggaggagcagcggtttcgggctctgtttgaacaagtcgctggtgaggacatggaggtgacagcagaggaacttgagtatgttttaaatgctgtgctgcaaaagaaaaaggacatcaaattcaagaagctaagcctgatctcctgtaaaaacatcatttccctgatggacaccagcggcaatgggaagctggagtttgatgaattcaaagtgttctgggacaagctgaagcagtggattaaccttttccttcggtttgatgctgacaagtccggcaccatgtctacctatgaactacggactgcactgaaagctgcaggctttcagctgagcagccacctcctgcagctgattgtgctcaggtatgcggatgaggagctccagctggacttcgatgacttcctcaactgcctggtccggctggagaatgcgagccgggtgttccaggctctcagtacaaagaacaaggagttcattcatctcaatataaatgagttcatccatttgacaatgaacatctgaggctgccttgtagagatgcagcctgcccagctgaatcttggcttctggaccttgaccttcagaacttctcttggtgtggaaccattacgcccagggttcactcccctctcatcgtccggccttctcccttcatcttgatctgggaagaatgaaatgaactcagctacactctctga

SEQ ID NO: 4356 - DNA, 2484 bp, Homo sapiens
  source 1..2484: mol_type = unassigned DNA
tcttgaccggcacacacagctcgcttcttcactttcttttccatccactgccggacccaagccagccttccagggagcagccatgccttacctctaccgggccccagggcctcaggcacacccggttcccaaggacgcccggatcacccactcctcaggccagagctttgagcaaatgaggcaggagtgcctgcagagaggcaccctgtttgaggatgcagacttcccagccagcaattcctccctgttctacagtgagaggccgcagatcccctttgtgtggaaacgaccaggggaaatcgtgaaaaacccagaattcattcttggaggggccaccaggactgatatctgccagggagagctgggagactgctggctattagccgccatcgcctcccttacgcttaatcaaaaagcactggccagagtcatcccccaggaccaaagctttggccctggttatgccgggatattccatttccagttctggcagcacagtgagtggctggacgtggtgatcgatgaccgcctgcccaccttcagggaccgcttggttttcctccactctgccgaccacaacgagttctggagcgccttgctggaaaaagcctacgccaagctaaatgggagctatgaagctctgaagggaggcagcgccatcgaggccatggaagacttcactgggggtgtggcagagaccttccaaactaaagaggcccccgagaacttctatgagattctagagaaggctttgaagagaggctccctgctgggctgcttcattgataccagaagtgctgcagaatctgaggcccggacgccgtttggtcttattaagggtcatgcctacagtgtaacgggaattgaccaggtaagcttccgaggccagagaatcgagctcatccgaatccggaacccttggggccaggttgagtggaacgggtcgtggagcgacaggatggcatttaaggacttcaaggcccactttgataaagtggagatctgcaacctcactcccgatgccctggaggaagacgcgatccacaaatgggaggtgacggtccatcagggaagctgggttcgcggctccacggctgggggctgccgcaatttcctggataccttttggaccaatccacaaataaaattgtctctgactgagaaagatgaggggcaggaggagtgtagtttccttgtagccctgatgcagaaagatagaaggaaactcaagagatttggtgccaatgtgctgacaatcggctatgccatttatgagtgccctgacaaagacgaacacctgaacaaagacttcttcagataccacgcttctcgggccagaagcaagacgttcatcaacctgagagaagtctccgaccggttcaagctgccccctggggagtacatcctgattcccagcacttttgagccccaccaggaagctgatttctgtctgagaatcttttcagagaaaaaagccattacccgggatatggatggaaatgtagacattgaccttcctgagcctccaaagccaactccacctgaccaggagacagaggaggagcagcggtttcgggctctgtttgaacaagtcgctggtgaggacatggaggtgacagcagaggaacttgagtatgttttaaatgctgtgctgcaaaagaaaaaggacatcaaattcaagaagctaagcctgatctcctgtaaaaacatcatttccctgatggacaccagcggcaatgggaagctggagtttgatgaattcaaagtgttctgggacaagctgaagcagtggattaaccttttccttcggtttgatgctgacaagtccggcaccatgtctacctatgaactacggactgcactgaaagctgcaggctttcagctgagcagccacctcctgcagctgattgtgctcaggtatgcggatgaggagctccagctggacttcgatgacttcctcaactgcctggtccggctggagaatgcgagccgggtgttccaggctctcagtacaaagaacaaggagttcattcatctcaatataaatgagttcatccatttgacaatgaacatctgaggctgccttgtagagatgcagcctgcccagctgaatcttggcttctggaccttgaccttcagaacttctcttggtgtggaaccattacgcccagggttcactcccctctcatcgtccggccttctcccttcatcttgatctgggaagaatgaaatgaactcagctacactctctgattttgtgctactcctttgtaaagtcactgccttaagggggctgatggcgccacctgtgccttacatccaggttcaggcatcactagctttcccacactctactttccttatttccttccattaagaattactcagagttctaacgcacagaatcctgacttccatgtagctccagtcattgtgatcagacatcctttataaaacatgtttttataaatgtgtatgtggaat

SEQ ID NO: 4357 - DNA, 2123 bp, Homo sapiens
  source 1..2123: mol_type = unassigned DNA
gctcgcttcttcactttcttttccatccactgccggacccaagccagccttccagggagcagccatgccttacctctaccgggccccagggcctcaggcacacccggttcccaaggacgcccggatcacccactcctcaggccagagctttgagcaaatgaggcaggagtgcctgcagagaggcaccctgtttgaggatgcagacttcccagccagcaattcctccctgttctacagtgagaggccgcagatcccctttgtgtggaaacgaccagggttctggcagcacagtgagtggctggacgtggtgatcgatgaccgcctgcccaccttcagggaccgcttggttttcctccactctgccgaccacaacgagttctggagcgccttgctggaaaaagcctacgccaagctaaatgggagctatgaagctctgaagggaggcagcgccatcgaggccatggaagacttcactgggggtgtggcagagaccttccaaactaaagaggcccccgagaacttctatgagattctagagaaggctttgaagagaggctccctgctgggctgcttcattgataccagaagtgctgcagaatctgaggcccggacgccgtttggtcttattaagggtcatgcctacagtgtaacgggaattgaccaggtaagcttccgaggccagagaatcgagctcatccgaatccggaacccttggggccaggttgagtggaacgggtcgtggagcgacagttctccggagtggcgttctgttggtccagctgagcagaagcgtctgtgtcacactgctctggatgatggggaattctggatggcatttaaggacttcaaggcccactttgataaagtggagatctgcaacctcactcccgatgccctggaggaagacgcgatccacaaatgggaggtgacggtccatcagggaagctgggttcgcggctccacggctgggggctgccgcaatttcctggataccttttggaccaatccacaaataaaattgtctctgactgagaaagatgaggggcaggaggagtgtagtttccttgtagccctgatgcagaaagatagaaggaaactcaagagatttggtgccaatgtgctgacaatcggctatgccatttatgagtgccctgacaaagacgaacacctgaacaaagacttcttcagataccacgcttctcgggccagaagcaagacgttcatcaacctgagagaagtctccgaccggttcaagctgccccctggggagtacatcctgattcccagcacttttgagccccaccaggaagctgatttctgtctgagaatcttttcagagaaaaaagccattacccgggatatggatggaaatgtagacattgaccttcctgagcctccaaagccaactccacctgaccaggagacagaggaggagcagcggtttcgggctctgtttgaacaagtcgctggtgaggacatggaggtgacagcagaggaacttgagtatgttttaaatgctgtgctgcaaaagaaaaaggacatcaaattcaagaagctaagcctgatctcctgtaaaaacatcatttccctgatggacaccagcggcaatgggaagctggagtttgatgaattcaaagtgttctgggacaagctgaagcagtggattaaccttttccttcggtttgatgctgacaagtccggcaccatgtctacctatgaactacggactgcactgaaagctgcaggctttcagctgagcagccacctcctgcagctgattgtgctcaggtatgcggatgaggagctccagctggacttcgatgacttcctcaactgcctggtccggctggagaatgcgagccgggtgttccaggctctcagtacaaagaacaaggagttcattcatctcaatataaatgagttcatccatttgacaatgaacatctgaggctgccttgtagagatgcagcctgcccagctgaatcttggcttctggaccttgaccttcagaacttctcttggtgtggaaccattacgcccagggttcactcccctctcatcgtccggccttctcccttcatcttgatctgggaagaatgaaatgaactcagctacactctctg

SEQ ID NO: 4358 - DNA, 1477 bp, Homo sapiens
  source 1..1477: mol_type = unassigned DNA
cgggcgacagcagggccgcggtgcagtgtccgacccgagagttgcggcctgagtcaccggccccgccctccggagccggacgctgcgggaggcccgggagcggcagtggaaccgactcccagaactccggacgtgtgcggcgcagtgagtcgcagccatgttcctggttaactcgttcttgaagggcggcggcggcggcggcgggggaggcgggggcctgggtgggggcctgggaaatgtgcttggaggcctgatcagcggggccgggggcggcggcggcggcggcggcggcggcggcggtggtggaggcggcggtggcggtggaacggccatgcgcatcctaggcggagtcatcagcgccatcagcgaggcggctgcgcagtacaacccggagcccccgcccccacgcacacattactccaacattgaggccaacgagagtgaggaggtccggcagttccggagactctttgcccagctggctggagatgacatggaggtcagcgccacagaactcatgaacattctcaataaggttgtgacacgacaccctgatctgaagactgatggttttggcattgacacatgtcgcagcatggtggccgtgatggatagcgacaccacaggcaagctgggctttgaggaattcaagtacttgtggaacaacatcaaaaggtggcaggccatatacaaacagttcgacactgaccgatcagggaccatttgcagtagtgaactcccaggtgcctttgaggcagcagggttccacctgaatgagcatctctataacatgatcatccgacgctactcagatgaaagtgggaacatggattttgacaacttcatcagctgcttggtcaggctggacgccatgttccgtgccttcaaatctcttgacaaagatggcactggacaaatccaggtgaacatccaggagtggctgcagctgactatgtattcctgaactggagccccagacccgccccctcactgccttgctataggagtcacctggagcctcggtctctcccagggccgatcctgtctgcagtcacatctttgtggggcctgctgacccacaagcttttgttctctcagtacttgttacccagcttctcaacatccagggcccaatttgccctgcctggagttccccctggctctaggacactctaacaagctctgtccacgggtctccccattcccaccaggccctgcacacacccactccgtaacctctcccctgtacctgtgccaagcctagcacttgtgatgcctccatgccccgagggccctctctcagttctgggaggatgactccagtccctgcacgccctggcacacccttcacggttgctacccaggcggccaagctccagaccgtgccagacccaggtgccccagtgcctttgtctatattctgctcccagcctgccaggcccaggaggaaataaacatgccccagttgctgatctct

SEQ ID NO: 4359 - DNA, 4282 bp, Homo sapiens
  source 1..4282: mol_type = unassigned DNA
cactcagagagctgggctggagctccaagcggaaaccgcgggagccgagcccagctaggaatgcagacctcctgaaaaccaagccgaggactgcggggtccggtgtccacgcagagtgtcagcttcctctggtgcaaccagcaagtcttccagtatgaatcccacagaaaccaaggctgtaaaaacagaacctgagaagaagtcacagtcaaccaagctgtctgtggttcatgagaaaaaatcccaagaaggaaagccaaaagaacacacagagccaaaaagcctacccaagcaggcatcagatacaggaagtaacgatgctcacaataaaaaagcagtttccagatcagctgaacagcagccatcagagaaatcaacagaaccaaagactaaaccacaagacatgatttctgctggtggagagagtgttgctggtatcactgcaatatctggcaagccgggtgacaagaaaaaagaaaagaaatcattaaccccagctgtgccagttgaatctaaaccggataaaccatcgggaaagtcaggcatggatgctgctttggatgacttaatagatactttaggaggacctgaagaaactgaagaagaaaatacaacgtatactggaccagaagtttcagatccaatgagttccacctacatagaggaattgggtaaaagagaagtcacaattcctccaaaatatagggaactattggctaaaaaggaagggatcacagggcctcctgcagactcttcgaaacccatagggccagatgatgctatagacgccttgtcatctgacttcacctgtgggtcgcctacagctgctggaaagaaaactgaaaaagaggaatctacagaagttttaaaagctcagtcagcagggacagtcagaagtgctgctccaccccaagagaagaaaagaaaggtggagaaggatacaatgagtgatcaagcactcgaggctctgtcggcttcactgggcacccggcaagcagaacctgagctcgacctccgctcaattaaggaagtcgatgaggcaaaagctaaagaagaaaaactagagaagtgtggtgaggatgatgaaacaatcccatctgagtacagattaaaaccagccacggataaagatggaaaaccactattgccagagcctgaagaaaaacccaagcctcggagtgaatcagaactcattgatgaactttcagaagattttgaccggtctgaatgtaaagagaaaccatctaagccaactgaaaagacagaagaatctaaggccgctgctccagctcctgtgtcggaggctgtgtgtcggacctccatgtgtagtatacagtcagcaccccctgagccggctaccttgaagggcacagtgccagatgatgctgtagaagccttggctgatagcctggggaaaaaggaagcagatccagaagatggaaaacctgtgatggataaagtcaaggagaaggccaaagaagaagaccgtgaaaagcttggtgaaaaagaagaaacaattcctcctgattatagattagaagaggtcaaggataaagatggaaagccactcctgccaaaagagtctaaggaacagcttccacccatgagtgaagacttccttctggatgctttgtctgaggacttctctggtccacaaaatgcttcatctcttaaatttgaagatgctaaacttgctgctgccatctctgaagtggtttcccaaaccccagcttcaacgacccaagctggagccccaccccgtgatacctcgcagagtgacaaagacctcgatgatgccttggataaactctctgacagtctaggacaaaggcagcctgacccagatgagaacaaaccaatggaagataaagtaaaggaaaaagctaaagctgaacatagagacaagcttggagaaagagatgacactatcccacctgaatacagacatctcctggatgataatggacaggacaaaccagtgaagccacctacaaagaaatcagaggattcaaagaaacctgcagatgaccaagaccccattgatgctctctcaggagatctggacagctgtccctccactacagaaacctcacagaacacagcaaaggataagtgcaagaaggctgcttccagctccaaagcacctaagaatggaggtaaagcgaaggattcagcaaagacaacagaggaaacttccaagccaaaagatgactaaagaaatacaagttaaggtatctggtatctgcatgtaaaatcttcagctggtggatggtgacttttgaagaacaaaaggctttggcaacagaaaacaattgttctgggtgatttctagaatggtttttgttgagtctctgaacatcctaaatattggtttgttattcttttccagaaagaaaatgaatttgactggttcacctgtgtactgagtattgataaactttgaatttttttaattgccttcaattgggagagaaagctttatatttgtaagaaatatatttgataaagtttcttaaagcaacaccaaaaaaacaaaagaaaagctaagtgaatttttgcacattctacacacagtgcctgtaaatctcatttgtattttcagtttgcccttaattttttttgttagtgtttagaaaacaatgttttaaacattcttcagtgttctgatttcttattaccccctttcctcttgggcttttgaactgtatttgatgttgctttgggataatgtttataagtcaaacataagatattgtacattgggcacatatctcctcttgggctgctaataataaattaataacaggtaacctggacaaaccaggaagcaccaaaccccttttcagtttgaactcttctttgccaggtgtgaggacttctgcatcttacagtcagcacagaacacactgagacttgaatcaagtcagcaacagagcaaaataaaggttagataagtccttgtgtagcaaatttcgagcataagaaataaaatctaattaattcttagggtactcatctgacttgaactctgttggtttactgtgttagtaaactgtgctttctattatctatacataaaacctgagcagcaactgtgtctttagagctattgccacattagcctttgcactgtatagcgtctggctttatggaacttaagtttaccaaatataaaaagaaacttctgcttttaaaaaaattatatatatatattaaatttgaaacctgcatttctcccacagcaatgtaagaagtaggctctgatgtcctaccactttgaatggttttctaatatcttaatgaatagttcctgaacattgcactgatatcatcgattagaattttgatatttaatttcatctttatttcctggtagagaatgcaggaaaagatgtcaggtacataacataaaacagattgggaatttattgtttccaaagggcatggccttccttagcatcagtttgaagcttttgttatgacttagctgacttgtggcagcggggcaagcaaaaacaataacactgcttataaatggcaccacatcttgttaacctcccccccaaatactctctgaaagtcatgcacatacctatgggattttacacaccaccagcttaaaatgctatgtctctatccatcagaaatagtcattattctatttttaaggcagcaacaagaaaagaaaaaacacttttcctgagggatttctaaccatgtatctaatcctcccatttgggcagtataggtgtttgcttttttgttttctttttttaagaaaaaccttgaaacctttgacactgacagatgtgtttgcaaggatacggcttcagtattactaatttccatgtgtatctggaagtatttttaaatggcataccaaaatccagaagtttaaagatgcctataaaagtaaacaacatttatttaaaaagaactctgaatatgccttcttttttaattagaaatatcttcgagacttgggtgtttgttaataactaataactggagtaagctacaggatctaaagcagccctttttacagtctagttaggagagagaaaataattgcaaatatccacttagaggcaaagaacaattttttattatcaaaaaggtttctgcacattgttgtggcaatattgtatctgtttagaaaatgggcttttccaaaagcaaacaaagataggttcctcaggtgaccaaaactgaaaatcaatatttccatgtttcattaatcaaggcataaaatacaattaaagcaaaatattttacattaaaa

SEQ ID NO: 4360 - DNA, 4524 bp, Homo sapiens
  source 1..4524: mol_type = unassigned DNA
ggcccatcggggctaggggaaccccggcgcagacctggggtggggtcggaaaagctgtttcatcgcccgctcccgggccctccgctccctccctccctccctctctccctggcaggactccccgccaggcctccccgccactctccgcggcgcattccgggaggcagcggccgcagcggcctcgccatgtcccagcccggccagaagcccgccgcctccccgcggccccggcgagcagccgccgcccgccgcacccatgagcatgtcagtgaaaaaaccagtgaatcgccttccaaaccaggagaaaagaaaggatcagatgagaaaaaagcagcaagcctcggcagcagtcaatcctccagaacctatgctggtggaacagcctcggccaccaaggtgtcagcttcctctggtgcaaccagcaagtcttccagtatgaatcccacagaaaccaaggctgtaaaaacagaacctgagaagaagtcacagtcaaccaagctgtctgtggttcatgagaaaaaatcccaagaaggaaagccaaaagaacacacagagccaaaaagcctacccaagcaggcatcagatacaggaagtaacgatgctcacaataaaaaagcagtttccagatcagctgaacagcagccatcagagaaatcaacagaaccaaagactaaaccacaagacatgatttctgctggtggagagagtgttgctggtatcactgcaatatctggcaagccgggtgacaagaaaaaagaaaagaaatcattaaccccagctgtgccagttgaatctaaaccggataaaccatcgggaaagtcaggcatggatgctgctttggatgacttaatagatactttaggaggacctgaagaaactgaagaagaaaatacaacgtatactggaccagaagtttcagatccaatgagttccacctacatagaggaattgggtaaaagagaagtcacaattcctccaaaatatagggaactattggctaaacccatagggccagatgatgctatagacgccttgtcatctgacttcacctgtgggtcgcctacagctgctggaaagaaaactgaaaaagaggaatctacagaagttttaaaagctcagtcagcagggacagtcagaagtgctgctccaccccaagagaagaaaagaaaggtggagaaggatacaatgagtgatcaagcactcgaggctctgtcggcttcactgggcacccggcaagcagaacctgagctcgacctccgctcaattaaggaagtcgatgaggcaaaagctaaagaagaaaaactagagaagtgtggtgaggatgatgaaacaatcccatctgagtacagattaaaaccagccacggataaagatggaaaaccactattgccagagcctgaagaaaaacccaagcctcggagtgaatcagaactcattgatgaactttcagaagattttgaccggtctgaatgtaaagagaaaccatctaagccaactgaaaagacagaagaatctaaggccgctgctccagctcctgtgtcggaggctgtgtgtcggacctccatgtgtagtatacagtcagcaccccctgagccggctaccttgaagggcacagtgccagatgatgctgtagaagccttggctgatagcctggggaaaaaggaagcagatccagaagatggaaaacctgtgatggataaagtcaaggagaaggccaaagaagaagaccgtgaaaagcttggtgaaaaagaagaaacaattcctcctgattatagattagaagaggtcaaggataaagatggaaagccactcctgccaaaagagtctaaggaacagcttccacccatgagtgaagacttccttctggatgctttgtctgaggacttctctggtccacaaaatgcttcatctcttaaatttgaagatgctaaacttgctgctgccatctctgaagtggtttcccaaaccccagcttcaacgacccaagctggagccccaccccgtgatacctcgcagagtgacaaagacctcgatgatgccttggataaactctctgacagtctaggacaaaggcagcctgacccagatgagaacaaaccaatggaagataaagtaaaggaaaaagctaaagctgaacatagagacaagcttggagaaagagatgacactatcccacctgaatacagacatctcctggatgataatggacaggacaaaccagtgaagccacctacaaagaaatcagaggattcaaagaaacctgcagatgaccaagaccccattgatgctctctcaggagatctggacagctgtccctccactacagaaacctcacagaacacagcaaaggataagtgcaagaaggctgcttccagctccaaagcacctaagaatggaggtaaagcgaaggattcagcaaagacaacagaggaaacttccaagccaaaagatgactaaagaaatacaagttaaggtatctggtatctgcatgtaaaatcttcagctggtggatggtgacttttgaagaacaaaaggctttggcaacagaaaacaattgttctgggtgatttctagaatggtttttgttgagtctctgaacatcctaaatattggtttgttattcttttccagaaagaaaatgaatttgactggttcacctgtgtactgagtattgataaactttgaatttttttaattgccttcaattgggagagaaagctttatatttgtaagaaatatatttgataaagtttcttaaagcaacaccaaaaaaacaaaagaaaagctaagtgaatttttgcacattctacacacagtgcctgtaaatctcatttgtattttcagtttgcccttaattttttttgttagtgtttagaaaacaatgttttaaacattcttcagtgttctgatttcttattaccccctttcctcttgggcttttgaactgtatttgatgttgctttgggataatgtttataagtcaaacataagatattgtacattgggcacatatctcctcttgggctgctaataataaattaataacaggtaacctggacaaaccaggaagcaccaaaccccttttcagtttgaactcttctttgccaggtgtgaggacttctgcatcttacagtcagcacagaacacactgagacttgaatcaagtcagcaacagagcaaaataaaggttagataagtccttgtgtagcaaatttcgagcataagaaataaaatctaattaattcttagggtactcatctgacttgaactctgttggtttactgtgttagtaaactgtgctttctattatctatacataaaacctgagcagcaactgtgtctttagagctattgccacattagcctttgcactgtatagcgtctggctttatggaacttaagtttaccaaatataaaaagaaacttctgcttttaaaaaaattatatatatatattaaatttgaaacctgcatttctcccacagcaatgtaagaagtaggctctgatgtcctaccactttgaatggttttctaatatcttaatgaatagttcctgaacattgcactgatatcatcgattagaattttgatatttaatttcatctttatttcctggtagagaatgcaggaaaagatgtcaggtacataacataaaacagattgggaatttattgtttccaaagggcatggccttccttagcatcagtttgaagcttttgttatgacttagctgacttgtggcagcggggcaagcaaaaacaataacactgcttataaatggcaccacatcttgttaacctcccccccaaatactctctgaaagtcatgcacatacctatgggattttacacaccaccagcttaaaatgctatgtctctatccatcagaaatagtcattattctatttttaaggcagcaacaagaaaagaaaaaacacttttcctgagggatttctaaccatgtatctaatcctcccatttgggcagtataggtgtttgcttttttgttttctttttttaagaaaaaccttgaaacctttgacactgacagatgtgtttgcaaggatacggcttcagtattactaatttccatgtgtatctggaagtatttttaaatggcataccaaaatccagaagtttaaagatgcctataaaagtaaacaacatttatttaaaaagaactctgaatatgccttcttttttaattagaaatatcttcgagacttgggtgtttgttaataactaataactggagtaagctacaggatctaaagcagccctttttacagtctagttaggagagagaaaataattgcaaatatccacttagaggcaaagaacaattttttattatcaaaaaggtttctgcacattgttgtggcaatattgtatctgtttagaaaatgggcttttccaaaagcaaacaaagataggttcctcaggtgaccaaaactgaaaatcaatatttccatgtttcattaatcaaggcataaaatacaattaaagcaaaatattttacattaaaa

SEQ ID NO: 4361 - DNA, 2972 bp, Homo sapiens
  source 1..2972: mol_type = unassigned DNA
tctgggcatcgaaggaggaacgctgcaacctccaaccccttctttctgaccaaccgggaccagagcagtgctggggccggggcgggtcaccggcatgtcagtgaaaaaaccagtgaatcgccttccaaaccaggagaaaagaaaggatcagatgagaaaaaagcagcaagcctcggcagcagtcaatcctccagaacctatgctggtggaacagcctcggccaccaaggtgtcagcttcctctggtgcaaccagcaagtcttccagtatgaatcccacagaaaccaaggccattccagtcagccaacagatggaaggaccacatcttcctaacaagaaaaaacacaaaaaacaggctgtaaaaacagaacctgagaagaagtcacagtcaaccaagctgtctgtggttcatgagaaaaaatcccaagaaggaaagccaaaagaacacacagagccaaaaagcctacccaagcaggcatcagatacaggaagtaacgatgctcacaataaaaaagcagtttccagatcagctgaacagcagccatcagagaaatcaacagaaccaaagactaaaccacaagacatgatttctgctggtggagagagtgttgctggtatcactgcaatatctggcaagccgggtgacaagaaaaaagaaaagaaatcattaaccccagctgtgccagttgaatctaaaccggataaaccatcgggaaagtcaggcatggatgctgctttggatgacttaatagatactttaggaggacctgaagaaactgaagaagaaaatacaacgtatactggaccagaagtttcagatccaatgagttccacctacatagaggaattgggtaaaagagaagtcacaattcctccaaaatatagggaactattggctaaacccatagggccagatgatgctatagacgccttgtcatctgacttcacctgtgggtcgcctacagctgctggaaagaaaactgaaaaagaggaatctacagaagttttaaaagctcagtcagcagggacagtcagaagtgctgctccaccccaagagaagaaaagaaaggtggagaaggatacaatgagtgatcaagcactcgaggctctgtcggcttcactgggcacccggcaagcagaacctgagctcgacctccgctcaattaaggaagtcgatgaggcaaaagctaaagaagaaaaactagagaagtgtggtgaggatgatgaaacaatcccatctgagtacagattaaaaccagccacggataaagatggaaaaccactattgccagagcctgaagaaaaacccaagcctcggagtgaatcagaactcattgatgaactttcagaagattttgaccggtctgaatgtaaagagaaaccatctaagccaactgaaaagacagaagaatctaaggccgctgctccagctcctgtgtcggaggctgtgtgtcggacctccatgtgtagtatacagtcagcaccccctgagccggctaccttgaagggcacagtgccagatgatgctgtagaagccttggctgatagcctggggaaaaaggaagcagatccagaagatggaaaacctgtgatggataaagtcaaggagaaggccaaagaagaagaccgtgaaaagcttggtgaaaaagaagaaacaattcctcctgattatagattagaagaggtcaaggataaagatggaaagccactcctgccaaaagagtctaaggaacagcttccacccatgagtgaagacttccttctggatgctttgtctgaggacttctctggtccacaaaatgcttcatctcttaaatttgaagatgctaaacttgctgctgccatctctgaagtggtttcccaaaccccagcttcaacgacccaagctggagccccaccccgtgatacctcgcagagtgacaaagacctcgatgatgccttggataaactctctgacagtctaggacaaaggcagcctgacccagatgagaacaaaccaatggaagataaagtaaaggaaaaagctaaagctgaacatagagacaagcttggagaaagagatgacactatcccacctgaatacagacatctcctggatgataatggacaggacaaaccagtgaagccacctacaaagaaatcagaggattcaaagaaacctgcagatgaccaagaccccattgatgctctctcaggagatctggacagctgtccctccactacagaaacctcacagaacacagcaaaggataagtgcaagaaggctgcttccagctccaaagcacctaagaatggaggtaaagcgaaggattcagcaaagacaacagaggaaacttccaagccaaaagatgactaaagaaatacaagttaaggtatctggtatctgcatgtaaaatcttcagctggtggatggtgacttttgaagaacaaaaggctttggcaacagaaaacaattgttctgggtgatttctagaatggtttttgttgagtctctgaacatcctaaatattggtttgttattcttttccagaaagaaaatgaatttgactggttcacctgtgtactgagtattgataaactttgaatttttttaattgccttcaattgggagagaaagctttatatttgtaagaaatatatttgataaagtttcttaaagcaacaccaaaaaaacaaaagaaaagctaagtgaatttttgcacattctacacacagtgcctgtaaatctcatttgtattttcagtttgcccttaattttttttgttagtgtttagaaaacaatgttttaaacattcttcagtgttctgatttcttattaccccctttcctcttgggcttttgaactgtatttgatgttgctttgggataatgtttataagtcaaacataagatattgtacattgggcacatatctcctcttgggctgctaataataaattaataacaggtaacctggacaaaccaggaagcacc

SEQ ID NO: 4362 - DNA, 2487 bp, Homo sapiens
  source 1..2487: mol_type = unassigned DNA
acattggtaaggtgttttcccccattgaaactaatattttctattttcaagaaaaaagcagcaagcctcggcagcagtcaatcctccagaacctatgctggtggaacagcctcggccaccaaggtgtcagcttcctctggtgcaaccagcaagtcttccagtatgaatcccacagaaaccaaggccattccagtcagccaacagatggaaggaccacatcttcctaacaagaaaaaacacaaaaaacaggctgtaaaaacagaacctgagaagaagtcacagtcaaccaagctgtctgtggttcatgagaaaaaatcccaagaaggaaagccaaaagaacacacagagccaaaaagcctacccaagcaggcatcagatacaggaagtaacgatgctcacaataaaaaagcagtttccagatcagctgaacagcagccatcagagaaatcaacagaaccaaagactaaaccacaagacatgatttctgctggtggagagagtgttgctggtatcactgcaatatctggcaagccgggtgacaagaaaaaagaaaagaaatcattaaccccagctgtgccagttgaatctaaaccggataaaccatcgggaaagtcaggcatggatgctgctttggatgacttaatagatactttaggaggacctgaagaaactgaagaagaaaatacaacgtatactggaccagaagtttcagatccaatgagttccacctacatagaggaattgggtaaaagagaagtcacaattcctccaaaatatagggaactattggctaaaaaggaagggatcacagggcctcctgcagactcttcgaaacccatagggccagatgatgctatagacgccttgtcatctgacttcacctgtgggtcgcctacagctgctggaaagaaaactgaaaaagaggaatctacagaagttttaaaagctcagtcagcagggacagtcagaagtgctgctccaccccaagagaagaaaagaaaggtggagaaggatacaatgagtgatcaagcactcgaggctctgtcggcttcactgggcacccggcaagcagaacctgagctcgacctccgctcaattaaggaagtcgatgaggcaaaagctaaagaagaaaaactagagaagtgtggtgaggatgatgaaacaatcccatctgagtacagattaaaaccagccacggataaagatggaaaaccactattgccagagcctgaagaaaaacccaagcctcggagtgaatcagaactcattgatgaactttcagaagattttgaccggtctgaatgtaaagagaaaccatctaagccaactgaaaagacagaagaatctaaggccgctgctccagctcctgtgtcggaggctgtgtgtcggacctccatgtgtagtatacagtcagcaccccctgagccggctaccttgaagggcacagtgccagatgatgctgtagaagccttggctgatagcctggggaaaaaggaagcagatccagaagatggaaaacctgtgatggataaagtcaaggagaaggccaaagaagaagaccgtgaaaagcttggtgaaaaagaagaaacaattcctcctgattatagattagaagaggtcaaggataaagatggaaagccactcctgccaaaagagtctaaggaacagcttccacccatgagtgaagacttccttctggatgctttgtctgaggacttctctggtccacaaaatgcttcatctcttaaatttgaagatgctaaacttgctgctgccatctctgaagtggtttcccaaaccccagcttcaacgacccaagctggagccccaccccgtgatacctcgcagagtgacaaagacctcgatgatgccttggataaactctctgacagtctaggacaaaggcagcctgacccagatgagaacaaaccaatggaagataaagtaaaggaaaaagctaaagctgaacatagagacaagcttggagaaagagatgacactatcccacctgaatacagacatctcctggatgataatggacaggacaaaccagtgaagccacctacaaagaaatcagaggattcaaagaaacctgcagatgaccaagaccccattgatgctctctcaggagatctggacagctgtccctccactacagaaacctcacagaacacagcaaaggataagtgcaagaaggctgcttccagctccaaagcacctaagaatggaggtaaagcgaaggattcagcaaagacaacagaggaaacttccaagccaaaagatgactaaagaaatacaagttaaggtatctggtatctgcatgtaaaatcttcagctggtggatggtgacttttgaagaacaaaaggctttggcaacagaaaacaattgttctgggtgatttctagaatggtttttgttgagtctctgaacatcctaaatattggtttgttattcttttccagaaagaaaatgaatttgactggttc
